United States Patent Application Publication US 2026/0272820 A1, published September 17, 2026 (application 19/165,132).

The application's sequence listing, which the Patent Office published only in electronic form, follows.

SEQUENCE LISTING (20 sequences)

SEQ ID NO: 1 - DNA, 651 bp, Nitrosocosmicus ssp
  source 1..651: mol_type = genomic DNA
atggtctggttaagacgtacaactcactatttgttcatagttgttgttgcagtaaatagtacgttgcttacaatcaacgcaggagattacatcttctatactgactgggcatggacatcattcgtcgtattctcgatttctcaatccacaatgcttgtggtaggagctatatactatatgttgtttaccggtgtccctggcacggctacgtattatgcaactattatgacaatttatacatgggttgccaaaggagcatggttcgcattgggatacccgtacgattttgtcgcggttcctgtttggataccctctgctatgttattggatttggcgtactgggcaacaagaagaaacaaacacgcggcaatattaattggtggtgtattggtaggaatgtcactcccactgtttaatatgatcaacttgttgctggttgctgacccattagaaatggcattcaaatatcctagacccacattaccaccatacatgactccaattgaaccacaggtaggaaagttctataacagtcctgtcgcgttgggagcaggagctggagcggtactttgtgtacctatagcagctttgggtgcaaaactcaacacttggacttatagatggatggctgcatggagtaagtgggactag

SEQ ID NO: 2 - DNA, 651 bp, Nitrosocosmicus ssp
  source 1..651: mol_type = genomic DNA
atggtctggttaagacgtacaactcactatttgttcatagttgttgttgcagtaaatagtacgttgcttacaatcaacgcaggagattatatcttctatactgactgggcatggacatcattcgtcgtattctcgatttcccaatccacaatgcttgtggtaggagctatatactatatgttgtttactggtgttcctggcacagctacttattatgcaactattatgacgatttatacatggattgccaaaggagcatggttcgcgttgggatacccgtacgattttgtcgtggtaccagtttggataccatctgctatgttgttggatttggcgtactgggcaacaagaagaaacaaacacgcggcaatattaattggtggtgtattggtaggaatgtcactcccactatttaatatgattaacttattgttggttgctgacccattggaaatggcattcaaatatcctaggcccaccttaccaccatatatgactccaattgaaccacaggtaggaaagttctataacagtcctgttgccttaggagcgggagctggagcggtgctttgtgtacctatagcggcattgggtgcaaaactcaatacttggacttatagatggatggctgcatggagtaagtgggactaa

SEQ ID NO: 3 - DNA, 588 bp, Nitrosocosmicus ssp
  source 1..588: mol_type = genomic DNA
gttgttgcagttaacagtacgttgcttacaatcaacgcaggagattatatcttctatactgactgggcgtggacatcatttgttgtgttttcaatttctcaatccacaatgcttgtggttggagctatatactatatgttgtttacaggtgtcccgggtacagctacgtattatgcaactataatgactatatatacatgggttgccaagggtgcatggtttgcattgggatatccttacgattttgtcgtggttcctgtttggataccatcggctatgttgttggatttggcgtactgggcaacaagaagaaacaaacacgcggctatattaattggtggtgtgttggtaggaatgtcacttccgctgtttaatatgatcaacttgttactggttgccgatccgctagaaatggcattcaagtatcctagacccaccttacctccgtacatgacaccaattgaaccccaagtaggaaagttctataacagtcctgtcgcgttaggtgccggcgcaggagcggtgctttgtgtccccatcgcggcattgggtgcaaaacttaatacttggacctaccgatggatggca

SEQ ID NO: 4 - DNA, 588 bp, Nitrosocosmicus ssp
  source 1..588: mol_type = genomic DNA
gttgttgcagttaacagtacgttgcttacaatcaacgcaggagattatatcttctatactgactgggcgtggacatcatttgtcgtattttcgatttctcaatccacaatgcttgtggtaggagctatatactatatgttgtttacaggcgttccgggtactgctacgtattatgcaactataatgactatatatacatgggttgccaaaggtgcatggtttgcattgggatatccatacgactttgttgtggttcctgtttggataccatcggcgatgttattggatttggcgtactgggcaacaaggagaaacaaacacgcggctatattaattggtggtgtgttggtaggaatgtcgctaccactatttaatatgatcaacttgttgctagttgccgatcccttggaaatggcattcaagtatcctagacccactttgcctccatacatgactccaattgaaccacaggtaggaaagttctataacagtcctgttgcgttaggagcgggtgcgggagctgtgctttgtgttcctatagcggcattgggtgctaaactcaatacttggacctaccgatggatggca

SEQ ID NO: 5 - DNA, 651 bp, Nitrosocosmicus oleophilus
  source 1..651: mol_type = genomic DNA
atggtctggttaagacgtacaactcactatttgttcatagttgttgttgcagtaaatagtacgttgcttacaatcaacgcaggagattatatcttctatactgactgggcatggacatcattcgtcgtattctcgatttctcaatccacaatgcttgtggtaggagctatatactatatgttgtttaccggtgtccctggcacggctacgtattacgcaactattatgacgatttatacatgggttgccaaaggagcatggttcgcattgggatacccgtacgattttgtcgtggttcctgtttggataccgtctgctatgttattggatttggcgtactgggcaacaagaagaaacaaacacgcggctatattaattggtggtgtattggtaggaatgtcactcccactgtttaatatgattaacttattgctggttgctgacccattagaaatggcattcaaatatcctagacccacattaccaccatacatgactccaattgaaccacaggtaggaaagttctataacagtcctgtcgcgttgggagcaggagctggagcggtgctttgtgtacctatagcggccttgggtgcaaaactcaatacttggacttacagatggatggctgcatggagtaagtgggactaa

SEQ ID NO: 6 - DNA, 651 bp, Nitrosocosmicus arcticus
  source 1..651: mol_type = genomic DNA
atggtctggttaagacgtacaactcactatttgttcatagttgttgttgcagtaaatagtacgttgcttacaatcaacgcaggagattatatcttctatactgactgggcatggacatcattcgtcgtattctcgatttctcaatccacaatgcttgtggtaggagctatatactatatgttgtttaccggtgtccctggcacggctacgtattatgcaactattatgacgatttatacatgggttgccaaaggagcatggttcgcattgggatacccgtacgattttgtcgcggttcctgtttggataccctctgcgatgctattggatttggcgtactgggcaacaagaagaaacaaacacgcggcgatattaatcggtggtgtattggtaggaatgtcactcccactgtttaatatgattaacttattgctggttgctgacccattagaaatggcattcaaatatcctagacccacattaccaccatacatgactccaattgaaccacaagtaggaaagttctataacagtcctgttgcgttgggcgcaggagctggagcggtgctttgtgtgcctatagcggccttgggtgcaaaactcaacacttggacttatagatggatggctgcatggagtaagtgggactag

SEQ ID NO: 7 - DNA, 651 bp, Nitrosocosmicus franklandianus
  source 1..651: mol_type = genomic DNA
atggtctggctaagacgtacaactcactatttattcatagttgttgttgcagtaaatagtacgttgcttacaatcaacgcaggagattatatcttctatactgactgggcatggacatcatttgttgtattttcaatttctcaatccacaatgcttgtggtaggagctatatactatatgttgtttacaggtgtcccaggtacagctacgtattatgcaactataatgactatatatacatgggttgccaaaggtgcatggtttgcattgggatatccatacgattttgtcgtggttcctgtttggataccgtcggctatgttgttggatttggcatactgggcaacaagaaggaacaaacacgcggctatattgatcggtggtgtattggtaggaatgtcgctgccactgtttaatatgatcaacttgttactagttgccgaccccttggaaatggcattcaagtatcctagacccacgttacctccatacatgactccaattgaaccccaagtaggaaagttctataacagtcctgtcgcgttaggtgccggtgcaggagcggtactttgtgtccccatagcggctttgggtgctaaactcaatacatggacatacagatggatggcagcctggagtaagtgggactaa

SEQ ID NO: 8 - DNA, 651 bp, Nitrosocosmicus hydrocola
  source 1..651: mol_type = genomic DNA
atggtctggttaagacgtacaactcactatttattcatagttgttgttgcagttaacagtacgttgcttacaatcaacgcaggagattatatcttctatactgactgggcgtggacatcatttgtcgtattttcaatttctcaatccacaatgcttgtggttggagccatatactatatgttgtttacaggtgttcccggcacagctacgtattatgcgactataatgactatatatacatgggttgcaaaaggtgcatggtttgcattgggatatccatacgactttgtcgtggttcctgtttggataccgtcggctatgttgttggatttggcgtactgggcaacaaggagaaacaagcacgcggctatattaattggtggtgtgttggtaggaatgtcgctgccactatttaatatgatcaacttgttgttagttgccgatcccctagaaatggcattcaagtatcctagacccaccttacctccatacatgaccccgattgagcctcaggtaggaaagttctataacagtcctgttgcgttgggagccggtgcgggagctgtgctttgtgtgcctatagcggcattgggtgcaaaactcaatacttggacatacagatggatggcagcctggagtaagtgggactaa

SEQ ID NO: 9 - DNA, 588 bp, synthetic construct
  source 1..588: mol_type = other DNA
gttgttgcagtaaatagtacgttgcttacaatcaacgcaggagattatatcttctatactgactgggcatggacatcattygtcgtattytcgatttctcaatccacaatgcttgtggtaggagctatatactatatgttgtttacaggtgtccctggcacagctacgtattatgcaactatwatgactatwtatacatgggttgccaaaggwgcatggttygcattgggatayccgtacgattttgtcgtggttcctgtttggataccrtckgctatgttrttggatttggcgtactgggcaacaagaagaaacaaacacgcggctatattaattggtggtgtattggtaggaatgtcactcccactgtttaatatgatcaacttgttgctggttgcygacccattagaaatggcattcaartatcctagacccacmttaccwccatacatgactccaattgaaccacaggtaggaaagttctataacagtcctgtygcgttrggagcmggagctggagcggtgctttgtgtacctatagcggcattgggtgcaaaactcaatacttggacttacagatggatggcw

SEQ ID NO: 10 - protein, 196 aa, synthetic construct
VVAVNSTLLTINAGDYIFYTDWAWTSFVVFSISQSTMLVVGAIYYMLFTGVPGTATYYATIMTIYTWVAKGAWFALGYPYDFVVVPVWIPSAMLLDLAYWATRRNKHAAILIGGVLVGMSLPLFNMINLLLVADPLEMAFKYPRPTLPPYMTPIEPQVGKFYNSPVALGAGAGAVLCVPIAALGAKLNTWTYRWMA

SEQ ID NO: 11 - protein, 216 aa, Nitrosocosmicus ssp
MVWLRRTTHYLFIVVVAVNSTLLTINAGDYIFYTDWAWTSFVVFSISQSTMLVVGAIYYMLFTGVPGTATYYATIMTIYTWVAKGAWFALGYPYDFVAVPVWIPSAMLLDLAYWATRRNKHAAILIGGVLVGMSLPLFNMINLLLVADPLEMAFKYPRPTLPPYMTPIEPQVGKFYNSPVALGAGAGAVLCVPIAALGAKLNTWTYRWMAAWSKWD

SEQ ID NO: 12 - protein, 216 aa, Nitrosocosmicus ssp
MVWLRRTTHYLFIVVVAVNSTLLTINAGDYIFYTDWAWTSFVVFSISQSTMLVVGAIYYMLFTGVPGTATYYATIMTIYTWIAKGAWFALGYPYDFVVVPVWIPSAMLLDLAYWATRRNKHAAILIGGVLVGMSLPLFNMINLLLVADPLEMAFKYPRPTLPPYMTPIEPQVGKFYNSPVALGAGAGAVLCVPIAALGAKLNTWTYRWMAAWSKWD

SEQ ID NO: 13 - protein, 196 aa, Nitrosocosmicus ssp; identical to SEQ ID NO: 10

SEQ ID NO: 14 - protein, 196 aa, Nitrosocosmicus ssp; identical to SEQ ID NO: 10

SEQ ID NO: 15 - protein, 216 aa, Nitrosocosmicus oleophilus
MVWLRRTTHYLFIVVVAVNSTLLTINAGDYIFYTDWAWTSFVVFSISQSTMLVVGAIYYMLFTGVPGTATYYATIMTIYTWVAKGAWFALGYPYDFVVVPVWIPSAMLLDLAYWATRRNKHAAILIGGVLVGMSLPLFNMINLLLVADPLEMAFKYPRPTLPPYMTPIEPQVGKFYNSPVALGAGAGAVLCVPIAALGAKLNTWTYRWMAAWSKWD

SEQ ID NO: 16 - protein, 216 aa, Nitrosocosmicus arcticus
MVWLRRTTHYLFIVVVAVNSTLLTINAGDYIFYTDWAWTSFVVFSISQSTMLVVGAIYYMLFTGVPGTATYYATIMTIYTWVAKGAWFALGYPYDFVVVPVWIPSAMLLDLAYWATRRNKHAAILIGGVLVGMSLPLFNMINLLLIADPLEMAFKYPRPTLPPYMTPIEPQVGKFYNSPVALGAGAGAVLCVPIAALGAKLNTWTYRWMAAWSKWD

SEQ ID NO: 17 - protein, 216 aa, Nitrosocosmicus franklandianus; identical to SEQ ID NO: 15

SEQ ID NO: 18 - protein, 216 aa, Nitrosocosmicus hydrocola; identical to SEQ ID NO: 15

SEQ ID NO: 19 - DNA, 3077762 bp, Candidatus Nitrosocosmicus epidermidis (residues 1-1,538,881 of 3,077,762)
  source 1..3077762: mol_type = genomic DNA
aataaccgattagcattctattctaagtgcatactttacgactatttttacaaatgcattcaaaaagttggagcctttcacacttaatttatgtagggtactaaatttgttaactttactttcagtaacacgatagtcatattgaccataaccacaatgatcaaaaaacattttgatattcaaactttagttaaatcaagtaaaagatatgataaaaataaagccaatcaaataattaaatcaagcattattttatgaaattttagagccagatcagaatcacattttaatgaagcatctctcttctaatctgaattcaattcaaatcaattcttttaacttatctactttgcagttaagacatagacaccttaccaaaatcccatgtagagaaaaactttggtgttatttcaattacgataccttctccgcttttagagcgttcactaatagtctttgccattggattatcgagtgtacccaaatatttgatgataatcttatcagatattgatatgactgtttgaacatcgtcggaaatagttgctacacctttaccttttacacctttatatggactgttaccatcttcgatacagaaatagatggtaggtctttgacattttgactcttatttgtctttttgcctgtcatgatgaatagtttttcttcatttttgtcgtagtagaaccatacaggttgaatgttaggatctcctttattatcgatggtagcaaactgtaaatttaatttattttcgagaaatcgctggacctcttccatagtcatgctaggaatctcgagcttgctttaaggatcttcacattctgaaatcattcttgtcgtataaaagtattgtagatctaagccaccgtgtcgatcttgaactttattacctgtaaactgaattatttaagttacaacgtgttatcatggtccaataattctatgccgatatataatagaaagtatagtaaattagtcagggcgcatgggattaagttacttgtgataatggggttctaatgcaaatacggatcttcctatgacaagaggatttgaaaggatgtgacggtattgaaattaagttgagttcataacgttcttagggcatattttatccccctcaataatcacgtagatattgtttaacgataagattatttgaaaataaatataaccgataatatcaaagatctgcacgttactagtatgagaaaataaaatatccagtatcaaaagtattagtatcgtgggataaacctggctaggtatgcaattttagtactggacatgttaaatgacttcataaaaggtagtttaaaatgtgaaagggcattagagattattccaaatattcatgctttgttggatatagctaggaagaatcaaattccaattttttattgtgtagatgagcatcttctgactgatagatatgaattagacctgtgggggcctcatgcaattaaagggactatcggacagcaagttattcatgagttaaaaccacttaggagtgacagagttattcccaaaagaacgtatagcgcttttgaccgaactaacttggatagagagctaaatgaagaatataacggaaaaggtgttgacacaataataatcacgggtgcacacacacatttgcggaaaacatacatcttacgacgcttttacaagaggtatgaaaataataatagcagaagatggagtccaagccttttcagaagatgatcatctatcgggtcttgaatatattaaaaaaatttatggcgcggatataatgaagatagacaagatcatcaaacttctcgttgctaataaacagtaactaactcagtataacaagaaaagacgtgtgcaagttcctgatatggatcaggactataaattattcaaatttcagctaactacattatgtgccaatttaaaagatgtttcaatattagaagttataaaaagtatataatttattattctaactaatgcagttctcatctattttaacagatcactttttaacaatgtatgaaattcattatcagttagttcttttttaagcctcgagtatttttttgaatcgtttccaactgttattcttaagacgggactagaagtatttgattcatcagagacaattccaatactagtgattatttcgtctgcaacaacccccggatgaggagctttactcattgcattaaagtaaaatgtcaagaatctttgcatggtttcattatagaaagataatgaagtatccttattatcatcgtcaaactggttaatctgaatcccttttttatctactccatatttatttgaaggtaaaactaaatcttgtacaaattcggtatttattactccaggttcaattaataccattttgattccataaggttctaattcgtatgataaagcttcactcattccctctactgcaaattttgtagcagaataaacggattgagaaggtattccggccaatcccgacatagaactaacattgattattattccacctttttgttgtctcatggttggaagaacatttcgaattactctcataacaccaaaaacattagtctcaaattgtttcttgatttcatccattgtaaagtcctccattgctccaaacaaaccatagccagcgttattaattaggatgtcaattcgaccatattcatttattatttttgttattgctgtttttactgaattatcattatcaacattcatttcgaatacttttatcggaatattttctttctgtgctacgctttctattttattggacttttgtaaatctctcatggtggcacaagttaaataaccatttcgagctagggccaaagatgtctcaaggcctatgcctgttgagcttccagtcactactgcaactttattgtattcgttagacataacaaaaatcatgagatggaacaagactaaaaatgttttattagtcgtatagagagtttatttttcaaagtattttcactatgttttcgttaaaaaataggaataagctgtcatcccggtgtccatgatatcatgcgtatatcaaagattcctagtgttgatgggttcgggatacagagttgtaccttatacattatgcaagcatactcacttgaatccatattttcggttactttaagagatacttttgataaatatcacaactataataatctggcgaaattatgtcccattatctaataaatagatacaattttattatttgtaagcaatagaaaaagtctactctcataaggatttgttcggacttaaccatcataaaaagttatatatcgatttagaattggaaacctcatggaaaaaatgatgataatcttattgcttattatagttctaactgtagtgttacctgttaactccctgtttgcaatcaaaggaaatgaaagctttataaatcaagataaggttaatctgaatgctaatatttctagtttagtatatgacttgaattcaaagccatttaatataacctatgctgattggactgaaaaatggtggcaatggacgtatgcaatccctgggaacaagaatccgtcttatgatgacactggggaatactgtgacgaatatcaacatggaccagtatggtttttgactcaagcgtttgagcatccagtagaacgcaattgtaacatacctcaaaatactgcattgttaattacgctattaaattccgaatgttcttatgctgagtttaaacatctaaaaacagaaaatgaactaagagagtgtgctaaaaatatgcaagatttagttactggaggagaagcattccttaataatatcactatccctcatgtagaaaagtaccgtattcaaactgatctatttaactttacattgcctcaagataatatcttaaatttaactgctcagacaacacaagctgtagcggatggaaactggctttttctaaagtccctacctccaggtaagtatgagttgaaggtaaaaggagaaatagattcaaaagtctctgcaaatgaaacgggtggtaatgaatatagtggtccaattggttggaatcaaactactacatataatttatgggttaaataatggattgtcactagtatcttatctcttcgtcatctagtttgaatttaagtaaatattgatccttgaatatattttattagtttggatgcaccaatatgttatcattttgagtataaataaaagcctgttcctgagtgacttttatcaatatatttagcaacttttttatacaagacaaaattcatggtgctgtattctagtaataattcttattcgtagttggggttaagttcctagctatagtaggattctaatgcaatgtagatttatttgatgttaaatcttaggataaagatttggtgggtgtatgttctccactaattatagcttgtacaattgaccttcttggcgttggcaatacttctctatcggaatagcctattcgtagaagtaattgtggatttgtgtcgctatgactaggtattaaactgccaagactttttctcaattcggggacctcaataggctgatttagatgggaagaccatatattctcgaatttgagatataataatatgtttgataatgccaggactgcattaagccatgaaagcgtgttatcggagtttgtacctatcactaatagaacaggagaacctatagcaagttccttgtccttggctgcttgtcctttaccaaagtcaaatgttcgtattacaaacgggccgactaaagacatgatatcgccaaatccaaacgcataaccgggcatcccatccctaagatgactcctatttgtgtcgacccatgaagccaattccctcctaaactttttgtctgacatttgaatgatatctccttgtgtaatcagtttagcaagttgctctttttcctccctgttcttctcaatatgaagtcatacgctttcaaatttttgagcgataaattgaaggttggagagaatttcttgtgagatttccttatcatcgtcaaatctaaatctatttgttcttctcatagtaattgagttaaacaactttttagtccttaatctttgattttctctagtttttcattaatgtctatcaccctaacggtagccaacaaatcatcatgatcactctcgtcttctcctttttgttgtggtaacaaggatatttcaaatctatagccaaagtatgatattatcaactgcaaattaaacaaggcagttccacaactaatggtcaattccctatcctcagggtctacaacaggcaatgctcttgttctgtctgcatagagatgaattgtgttatcatcatcaaatattctaaatgctgatggttgagcattgtggcctgatggggctaaaatagcataattgagaaaaaaaatattaacttatcaaatggtttatcataactagaaaacccagtttcagacacattccaaggtttaagacccatttgatccatgggtttttttgttgatagcggcatgatattaaaagaaggagcaattagaaaagtattattcaatgtataaagctattagacagtatttttttagcattctaaaaatatataatgctaaatttggttgggacttttcattggttcatattataagtataattaaaccttggatttaaagacaattgcttattgataggttacctttattatctataatatctgtgtaagcatttatcacataaaatattgaaaaccaatttgggcgcgcggggatacggttcaatgttgaatagaatccaatatttagagcaatgaacacagtatcaatatcctgaaaagtttagcaagataatagagacatttctttcaacaacgccatagtattatgttgtttaatattctacttttcttatactcaaccaactctctcttctaccgtttctgatttataaaatctttcatctatatgaattgatgaaattattcgtgaaattcctatatccttaagagatagatgggcatactctattgcttttaaaatattttgaatcgatttagattttatttgaatactcatgcccgttaccacaacattaattcctttaacttttttaatagcataagtagcaattgctagttcgtccctcatgcttggaggtaattgatcatttgaataatgtttttctaggaggactatattaaactccgcaacaacctcacgattttcacaagtcatttttaatctaaagtattcttgttaattaagtcttgatttcaactaaaatctataatcgataggtaaattacaccatttgaaagtcgtacaattcttttatatccaaatgtgatagtctttaataatcggacaatatatttactatattaaagaacgggcatccaccattaaaattcaacgtgctttacgatataagaataacaagtggtatgaattattgctccaaatatatcagcaatgggtgcaaaattgtggctattttaatttgtaaactaaaagtgtttgttcagaagatatgtaatggagtatgatagtgtcttagcggtatttggattgggaatttgtctctgggtccatatagagaaggaccatacgtaatgtgaaaaccttattagtttttgcaattatacataagcgaaagtaagatgaccgattcactctctgacggtatgggctggagggttaccatatctattattacctttttcgcttctataataggtattatcatctggttattcttctttgctgaaagtttcactatctatcagaacgttgccataattattgtgatcttcttaggattcatcgctgtaatggcggccacgtgggcctcttggggtatgaagcaaagtagagaaggaaaatggcgaagtagcagcaggaagaaaggcgatcttcaataagataggtcatttagttttggcgcgtgggattaagttcccagtggtaatagagttctatgaaataattaattataccagattaatcctaaattaaactgaaagtacaaattaaaaaaaagataggtgaatttggacttagctttgtgctaatgcgttgtttcctgaattttcttgattctgaacgtttatgttgttaccagagcctattgtatctccaccagaaactacatgactattttggttggatgattgtgattggctgatgctttgttctgcagagtttccaccttttccactaccactgccttgttgtgctaatgcgttgtttccactgttcttttggttttggaagctaaggttattacacgacacgaatatttcagttccagatgcacacaatgcgttctgcactgatgcttgtaattgagatattgattgttgagctacgtttccacctttgtatttctttttggttgcaaaggcgtcgttatccatagccacaatggggcttgcaaaaagagctaatgcgaccactattgcaattgaggcgacaatgagtttgtttttggaaattctttattgttaagaagatttaaaagttcattataaatactcgtgtagtgagaacattctatttttctttctagattagcgagtgattcttttggactttcacataattgattggtgttactggaaagattcaactaataaaattttgctctttgaatatataacaatataggcagaacccacacttgaggcgccgggagtgggactcgaagccctgttataaaaacagggaatctaattctaaatggattgtcaaaaattagaaagaaatgggatttgtttgctcatatgttaggtagtgatacatagttagtaaatatcaaactggatacaaaatcatgaaattaaaggtatcaagattcaataaaactctaattagttcttgaacgattgttattaattgcttgtgtgtggagttgattaccatcctcataaataaaccttatatatattttgaagcaattgaaaactatgggtaagttaaagcttggagatttaaatctatattacgaggaggctggtagtggtgaccctccgattttgttggtccatggtgggatggatgatcatacccactttgctcctcagtttgagcattttggaattaatcatagaacaatagctgtagatttaagaggatatggcaaaagtgataaaccaagacaacactatactatagctggttacgccgacgatcttgtttggttatgtaaggaattaaagatcgtaaaacctgtaatcataggacatagtatgggaggattaatagctttagaacttgcttcaaagttttccgatttaccctcagccatagtgatcctcgattctccggttatccctcccaaggagttcattgaaggattgaaaccacttgtcttggcaatgcaaacacaacaatatcgtgagaatttaaagaattttctgcttccattcattgggtttactaatgatcctaatcgtaaagatcgactgttgcaagagctgctgttggtcgaacaacacgtaattgcttccactctagttagctactctacatatgactccgtttcagctgctttagcctgtaaggtgccggtactttatataggatcgggaattccattctcagatttatctcacttcaatagtctatgtcctcagcttattgtagagaaaacctttggctcgggacattatcatcagcttgaagttccacaacaggttaattcacttatcgacaggtttctaataaaaatactaaactccaaacgtgtttcttcacaataaaacattagatattgaaacgatgattttctaccatggggaacataagaagaaggattattactcatacgaataattaggtcattgcaaagattcaagtattgttcttgcttcctgaatatcttttgtctcaaaaccttctgtaaatttttcaaagactgcgcgaagcatcttttgagcttctttaatctttcctctttttttccacaagtgaaataaacttaatacactgcgtaattcaaaagataatgccattcttctattggccaagtcaatagctatgagataggatttttcagcctcaagttcatttttatcggccattatagctaggtctccttttattcggtataactcagattcgtaccatagttctttgtttctactgaccatatctaatgcctctgacactactttttgtccctctataacatctccatttttcttgtgagcctctgccaataaggcaagataatatgtcttgtttacggccgattctgtcatctttaaattagctaggccatcttgaatttggattattcctcctttgatgtctcctttttctaccactgaccaacctttcaaaatactagatattgacccaaaataaggaaaatcattgtcagttgaaaggattattgcctcctcggcccatcggtaagtcataaggtgatcatgacgaagctgataaattttagatgtaccaaataaagcatatgccaaactaaagggatgattacggttcctagccaagttaacggcttcgctgatttttttcaatgattgatctggatatcccatagtccaaaggataaatgcgtcataggataaacaaacaaacaaaggatcttgacctaaaagaaatgtatgtatgtaatgaagttggggatcgtacattgcaatgactttttcgaaatttctatgtgcatattgaaaatctccacgccaaaatgatgttacacctattataaagtaagtgtccatcagaaattgctggtgtgtattttggttaacgagctttacaagtctgtttgccagatcctgtgcgacttcaaaatttgctctgagcaaataaaatctccataatccaaaaaaaacaggaaatagtaacgacgattgtccgacttgttcacataacgttttggctctgtcatatactctttttacctcagccgatgccggccccttggttgccataagagctggtccaatagtggtaagtacatctatttcctgttgtacgcgcataggtgaatctgctaaattattgagtaactctaatccttttgtgaggtgacttactgcctctacattagaagatctttgaatagcttttcttcctcctgattgccataatgggattgctatttcaaagagttctgcttctgtgtaatgatgagccaaaagttcaggctgtgtttcgattacgtacggaagtacctgcttgattgcgtcagctgctttcctatgcaatattcgacgactggactttaacaatgtttcataagctacatctcttgttaatgcatgcttgaaagtataagatgtgttgttctgtatctgcatcgtgaatccatttctagtaagattatctagattctttattagatcagtactttcaagttctgatactttttctaacacgcgaatgtttaactcgcgtcctataacactcgcaacttgtagtatattctttgactgggtatcaagtctatctatacgtgcagccaaaacaccatgaaccgtttgtggaatatttagcttgttgaaatgcattacaaaagaataagagccgtttaaatcaacagagttagtttctcttagattgtggataagctcttcaataaaaaaaggattcccttcggtgcgatccataataaagtcctgtagcttcttagagacgggagcatcaaatagggctcgtacaagtgtatagccttgggtaacgggaagcgaagttaactgaattgatatatatgattttaatcccttccaaggaggctggaactcaggacgtgacacaagaattaacataatatgattaggttccgtctctttcatcatccaatctaagaactctagagatgtttcgtccatccactgtaagtcatcaagaaccaaaaccaaaggtcgatccacagaagcttgttgaaacagagccccaagaccttcaaaggtttttcttcttcttatctcaggcgaaagctgattgtagtttttatcactaggttcaagggaaaaaaactcttcaaaacaagagatgtgctctttaatcccgtcaagcttttgttttagatattctctcttgtcttcagtaaccggttctagtagacccagatattgagcgactatatcaataaaaggttgatagggagatattcgaccatagggtttgcattgtccttcaagaaaggtgattgaagacgaagatatctgttgaaaaaactcgtgtaataaccgtgatttaccaactcctggatccgcagaaatacctacgatacatccttccccttttatcagtttggagaacagattttttaacaaagctaactcatgttcacgcccaacaaaaggacttaatcctttagactttaacttattaaaacggctttgtataggtcgcatactcagagggaggtatactttaataggtttttcctttcccttaacagtaatttcacctacttggtcaaaattaaagacatctttggtaagggtatatacgctttcacctacaagtatctgacctgattgagctgcactttgaattcttgatgcagtattgacagtgtcccctataacggtatattgttttcttaaataggaacctatacttccggctacaaccaaaccagtgttaattcccacatgcatatgaattggaataggcaaagtcttattcaattcatctaaagcctccattatctccatggctgtcttaactgcgcgctcaggatcatcttcgtgtgccacgggagcaccaaataatgcaataatacagtctcccatatacttgtcaacagttccctcatatctgtaaatgatttctgtaagcttgtcaaaacaattgtttagaatatctatcacctcttccggatcaagtttctcagacattttcgtgaatccactaatgtctgtaaataacacagtaacattttttctctcacctttcatctgtattgcattagggtgaattctccttgatggtaactgtacagatgatgctaatgagtttatcttaaaataccatgctgattcagattcgggtgcagcaagttcgattccacattcatcacaaaactttgctgttgttcggaccttatgtccgcaatcagtacatgatgtatttaaatccgtgtgacattctctacacgtctgagatccaggcaagttctcagaattacatctgggacatgtatgttttagatttttgttattgttgatgggcctcattacttccaccaatattccattataaccaaagcctggaattgtagattttggtcgatattccccattactgtatataattaccaaagtcgaatataaggattctttaaatctaaatggtttattattttaatagaaaacagaataattacatgaaaacctgttttaaagaatcatataataacgcatgatacgatggcattttatggatttgtttacatattaggtggtcatgagtttaaacattgcaagtcagttttaataataatagatgaaccaagatcgctagaagtgggactcgaaccccgatggtcaacttggggattctctatcgaaatttaaatttctcaattatgtataaaatgagtatattgattcactaatattctatagtttatcatgaagcgtcatatgatttctaccaatgaacagtaattttttattattagtgtttacatcggtaatcatgagaggctcatttaatttacgagttattgtaatactttattttacgtttatcatattccaaagtgccaatactaacttagtggttacatatgcacaagaatcatctttggattctttacagaatggcttatcgcaacctatgaatagtcacaatatgactcaaatgatgcaaagaggtaatcttgccatggggtttgatcagtccaagatcgctcatgaattctctacaactaaggatggaggacaaataaagataacagccttggatgagaaagacaacaatattattaaccaaattaaaagccacacaagagatatacaaaatgactttactgaaggaaactttacaaaacctttctttattcacgcagaatctgttcctggcacagatgctatgactcaaaataaagatcaaatacaatacaagatacaggatttaaaaaatggctcgatcttgttattaattacaaataattcaagtctagtaagttctattaatcaatttatgacttatcaatcaacagagcatacaggtcactgaataaagctcaaaagaattaacctgaaatagtattcgctgttttcatcttctgatttttcatttactctctgttccttaaggttttttaaaatcttattgactctatactcttgatgtaactttttaacacctttcatcataattggagctaaaatcataccgattatcatgcctaacgacatatcaataatattgaccattaactgcttcaaaataggatagacctcgaccaaattaaattatgcaaattatcaatttgcttttctctcttctggttaacaaagttctcaatcaaatatacgttaaatagccaagagtaaatttgaagctcacaaaaatagggaatccaaaaaagtggaacattgcaataagcagtaggatgggatttgtatacatgtcagatagtcatgggtttagttattccattttatcatttgatagatatcattttggaaaggataattccgcaaattgatccattgattcttggcatttctttaaacattcttttagatttgtaattttaggtgatgtttttatccagtctttcgacatgaccttctctacccacctgtttaatccatcaagaacttcttccatctcttctacctcttcctgtgtaaattttttgtttttaatgttcaagtcagtctcttctatgaactcttcacattcctcatagatttcgtcgtactgcttgtctctttcttctctgaacatttctaacatcttattatgttctttttcgtcatattcattagtagatatttggatgaatttaccattgtcaagtatgattctggaaatatcttcaattttttccctattttccttgttgttaggcagtatgcaaaacgacatttgagggtacaatgcccctatttttttaaactccctccatatccttacccttagttttgtaggttcggtaggaacatcataaaaaacaattatccatgatgttggcttatcaatcatttggttgctataagacgacacctattaaataataaaaattatcctttacctagttcattcgattagtcaacatgattcccttaaaaaaggctattcggatattaagaattaataatttcgataatgtatattgctgaatagcataaatgtaactgccgttacatttattaattcttgtatttgctttaacccttgtttggataataattgtaaaattatcgcaatcttgtctgattatgatggcacgctatgtccaacatctcatatcgatttacaagataacaattcaggatttgttccgggggaattagaagatatattagttgatgtttcatctactattccaatttgtataatatctagcaaggatttctattttttatataaacgagttagaaaattttctaaaataatatcatgtatgctaggaatagaaacattgtttttgaacgatgctaggaaaacgaacgataaagaccgaaaagttacaaacgcagataattcaaaacctcaaattgattctttagatatagagattgacaaacttagtacttttagacatttattgattgacaatgagaccataatagaaaactccatcatattaaaagagatttcaagttttcttgaaattaattttcctttcattaacgtagaaaagaaattctcaacaatagccaaggacgtggtaggtggaataacaatagattggagaaatgataaaagtgaggattgggtgtccaacgccaaaaaatataaaaaaatcgtcaaggagagtatgtacaatgcgttcaaaaaagccaaactagtaaaaaaggagtctaacaagaattttgaatattatcttaaaaaattctttatccaagaatatgcaactcacccgttcatcgatatttatggtacaaaaacaagtaaaggagatgcctatgattgtgttgtttcagagctatttaacctaaacaatggtattggaaaagtattatatttaggagattcagaaaacgacaatcctgcttttaggaaagctgatatctctataggtataaattcagatacaaggcttagacctgacctgacgtctaaatacagattagactatcaagacttgcctaactttttaagaaaattatctcaaaataattttgaatttcaagaatcattgttgaacgctaattgagagcacaattcatactcggtctatttagaaattttgggtttttaacttgattaaagaattagtagacattttatttcttagtataggtgcaatcggaggagcgttcattagatacaaaatcacatcatatcctgaaatatatggtgtcatgggatcaaatgttataattgttaacataattggaagttttatcttgggagctttttcaattatttctgcttattataacttggatacaaaatattcatttcttattgcgattggattctgtgggtctttaactacgatgtcttctttagcattggaaagtactattatgtttgagaacagagaactcttgaatgtgttcataaatgtagtggcaaatgtgtctttctccatattgtcgttggttggtggcagaattttattaacaatgcttttgctatcataagatatgacatttaagaaaatgatctgtttaaccattcgaatgaaaaaaaatgacgttgttgatggtaaaagaatggaaaaaaggatcattgattttttgatcaaagcaaatattcttggtgcaatcgtttggcttggggtagatggatttggtagaagaggtaagtcaacagtgcatttagaaggactaatgataaatcaaccaatgatgatcgaatcagtagatgagagagagaaaattgaaccactattaataccattaaaaagactaataggagataatggctttattaccatccacgaagtagatgtggtataatgtactatatgtaattggattacctcggtgatagcattgatatatagaaaaaagtttgaatgaataacaaatattgatctactattggtaacatcagcaacctggtgccatttgatttgacctgttgtttcgcatagacaatatttgatgtacatattataatacgactattaaatatcagggtttgttaagacaattctgcaatattttatagtatctttttttcttaaggaacaaaaacttgataagttgaacaataaaaaaccagacgaacttgggactcgaagccctgtgataaaaacagggaatttaattcctcatgaacatgtacttacaatcctagtatgcgaatagtatatcatcagaacctatctgtgggcttaaattctttcaactaatttgttgttatttgttccttctagtgtccaggtttttccatcgtctttactgctgaatacacttgatgctacatcagtttccatactatcctgagttacagcaacatatacttctccattgttaccgaaggcaaatttacttacaaatactgatcctgtaatttgtccatctgtcttcgtccatgtttttccaccatccattgattttatgataaatccgctttcggtctgaccagctgaattaggaactgcaaaggcatatgctgtattgccatctgaggatattcctataccagcaatcattgtatcattgccactgattaattcattgtttattttttgccagttctctccttggtccatacttgagaataatccaccagttgtagctgcatagacgttatttgaattagattgattggcagccaatgtaataacttgttgcccgtcaggggggctggtgatggtccaattcttaccgccatcggtagaaataaagatgttatcacccattccacttgcggcataaataatttcaggattatttccaatagtcattgtatgaagatcaataggggttggagtcgttacatctgatactttttgccatgttactccataatcatcacttattctaaagcccaaattaccacctgtttgaggatgtccacttgaatacataacacctttgtttgatggatcaattgtaaaacccattaaatctgacttatcgctaccaacttcaacccaaccagaagtattagaagaattattaccgatttcctttttgaacaagccattatgggttgctaaatatagtgaattactatcgtcacctgtctctgaggagtaaatccctacaccatgtacatccatccaattgcctgttaggttttgacttgaagaagtggaactgatattttcagtggcagaagtggtcataaaacctattattgctatactagcagttaacacaacaacaatggatacagctaacacaatccgttttgatttttgactgtttttgtttaatattttcttattattagctttgttatttgatttaattttctttgtacccaattaattcactaacctaaagctagtatacccatattaaacaggaccggtttacaattgcaaaattatgaccatgatagaatttaacaaaagtaaagaaatatttatctaaatgttttctttgtatagtcaaagttagtggaattacccaaaagttttagtatcttgtattaacatattaacatatcattgagtgataatatgtcaatcaatattcagaaattatctctaaaagccaagctatttagaggcttggctgatactacaagactttccattctagaatgtcttagaaacggagagaaaactacgtcagaaatagtaaaggagactaaccaaaaccaatcaaatatatcgaatcatttagcttgtctactagattgtggattagttagaaatagacgagaaggaaagaacgtcttttataatctaaataatgaacgagtcgcacgattattagcggaaagtgattctgttctaactgagattattagcggattgtataggtgtgtaaattacaatgaatctttggtagacataaagaaaaagaaggaaagctcaaattgaaaaggaaatttaccttatcttctgatatcccagtaggaaataaaaaagataatttgatacaaaaggataaaaacaatctcgaaaatttaaatgagattgaggataattgcggttgtggttgttcttgcagttcagaatcatcacaaataccgtcatcatcattgtctacaggaaccatgatggaaaactcttttgaaaaacaacacatgcaaaaggaaagagaaaggaaacaagacaaacaagcaaagatactcattctgataggactagcactaactattccattagtcatattagaattactagaattctataatctagttagagatagcgtactttttggatatattcttttaatcttagccactcctatccagtttctattaggtagaccattttacaaacgtttttacaattctattagaaaaagaaaaagttttaccgttgatacattagtggtattaagcacatctgtagcatatgtatatagtgtaattgctctctttaccaatcaaggcgtgagtttttttgaagcgtctgcatcagtattaacaatatttacaatcggagaatacattgaaagtagaacgttaaagacaacttcggaatctatcaaaaaacttgtagctcttaaacctaaaaagaccattatcatcagagaaaatggaaaacaagatgagatacaagttgataatttaaaaatcaatgatgtttttattgtaaaacctggtgaaaacatcgcaactgatggtattatcatctatggagaaacctatgtcgatgaatctgcaataaccggtgaatcaattccagttgaaaaaaggttgaaggataaggttatcggaggtactgtaaataaaaatggctacattcacgttaaagcaacaagtgttggaagccaaacagtattagcaaatatcatagaattagtttcaaaggcacgaacaaacaagccttcaatccaaagaattgcagataagtgtgccaaatattttattcccattgtattttctatggcaattgtttcttctctctactggttaataatagcacaggttccaatacaatttgctatcacagtttttgcgacagttttggtagtatcatgtccatgtgctttaggtattgcaactcctatggttgtatctttggcaattggtatagccgctaaacaaggtattataattaaagggggtgtgtatcttgagaaattagcctctgtaaatacaatagtatttgataagacaggaacgttgactaaaggtaaaccagaagtaacagatcttattccaattaaaggatatgataaatattatctactacaaatggcagcttcttctgaaataaaatcagaacatccaatagcacaagcgattgtaaaaaaggcaaaagaagaaaaaatagccttacatgaagttactgaattcaatacagtgactggtcatggagttatggctaaatatgaccaaaaacagatattgattacaagtccacactccaacaagcaaaatgttctcaaaagcaatgaaaattccttgcctcgttttcaatctaaggttcccatagaactggaaccaaaaataacagaattagagtcagaaggcaaaaccgtagtattaatttttttagaatcgaagttagttggtctcatagcagtcgcagatgtaataagagaagatgcagtatcaatagttaaaaaaatcagatcaatgggaaaggaagtaattcttttaagtggagataatcaaagaacaactcaagctatagccaataaaataggcatcacaaatgtattttcagaaatgttaccacaacaaaaggtagaaaaaataaaaaatttacaggagaaggaaaatcgtgtggtagctatgattggagatggaattaatgatgcgcccgccttaactcaagccgatattggaatagcaatagggtcaggtacagatgtagccaaagaagcaggacatattattttaataaaaaataatctatcggatatcttgttcacactacagttatctagctactcattaaaaaaaataaaacaaaacctaacgatttcttttgcttataactctataactattcctatagctgctggcttgttatttggatttaccaattctctcatattaacacctgctttggcagcgttaggatgggtaataagtgatacactcgtttttggtaattccttactattaaggagatttaaaacttaaaaatagaattcatttctacatttggaaaacatattgatcggagtcattatgtttatgttatttaaatacatatacaatctcgaattatattaaactttgacaaattattgatatgttttcatctggaagggttttgttttttaaatatgttattttgctaggtttaacatctcttgtaaataattatcatccttcactagtcaggttctttggacgtttacaaccgtcagaaatatggttattgttcttcgtatctatcttttttatgttgggagtattttgtttctctctagttggcaatgagcaactagcttttgcacattctttttttggagatactgatgctgattttaatggtactcaaaatcaatcaatagggaattatacggtggctcttttggtaaatccatcaaaacccattattgatagaaatgtatcttttcttttccgtcttacttctaacgcgggagaccaactaatcgagcttcctgtttccttttatatttttaaagacggtaagcctgtattctccaatcccaataattatacactagtaaggcaagggcattacgattttaattacacctttagtaagcccggaaagtatctcttgcatatggatatcaaggatattttctatacattagacatcgtgaattttgtatttgagattgatgtcggggtaccagtaacagaaagagtccttaatttattgaaagcatttttgatgaattactattacatttacattccatttattatattaattggattatctattgttgtaaaatcaaggagacccaaagatgtaaaaaaggtggatgaacggtttgatgaatgaactaaaaaagcgattaaaaattgaaaatataagaatcaagttttaataacgaacaatcgtatatgttccaaagtctataatatgatgaggaatttttcgaggtgagcttaaacaagaagtgttcaaaggtgttatcggtcaaaataagacattatcttaatgaaataattattccttatgatctcccaaataaagaatgcatatttcacaaaagagacgggcttccaataaaggtatcagttcaaagctttttaattattattatccaatgcaatcacgaaataaaccatgtattcaggcttccaatagaaccattaattgagtggaagattgtaaatggcataaaagatggagcgtttaaacatggaaatggattgactgcaaaatattccgacgccgataatgagaattgtgtcatatactaccccattataagaggaagtaaagacgattacagagataaagaaatacctatttcaataagaattcgaccatgtagaataaaaggatcaattgaaaatttctcagcaaataattattgccatgaaaacaaaggtactgtattaactgaggatattgcgactcaacttttaatattacgattaaaacaaaaacaaggttttttgaataagatgtattatgagagttacataacagttaaacaatcagctcaagaagatctaaaatattcatcctctcagctaattacaaacaatagaaatgatgagaattcaaattgtagatattcatttgatgaaaatagaaagattttatctgttgaaagcaaatacatacctgaatgtgctgaatgtaatgtgagcataacttttcaattgcctgctagctattcggttatgaatcagacaaaaataactatggatacgaaccgattcttatcttcggaatatattaaaatttcaaacagtatgtctgaatatgtttacactgtagatagatctgatatagattttgacataaaaaacaacaataaaagtattgataagttaagtattagtaattgtccagtaatcaaaattaaagaaaccttttggacatctactgcgggttcatttccatgcggaggaggtaatagtaattccataatttattattcactaaatgaaaaagaattgtccaaatcaccaattacttttaaactctacgagagaaatctatatgaacagaaagaggaagacattcctcatcctattgatgaaaaaaagttttggattgtaaggaaagcaatcatgggaggataaagtgtaaagtgtaaagtgtaaagtgtaaagtgtaaagtgtaaagtgtaaagtgtaaagtgtaaagtgtaaagtgtaaagtgtaaagtgtaaagtgtaaagtgtaaagtgtaaagtgtaaagtgtaaagtgtaaagtgtaaagtgtaaagtgtaaagtgtaaagtgtaaagtgtaaagtgtaaagtgtaaagtgtaaagtgtaaagtgtaaagtgtaaagtgcatcttcctttcatatcgccccataagacataaaaactaattagtacaaaccttacaattattttatcatccttatttatcgataacttgttatttgtaattacgatagatcccgaaagtgtaaagtatcattttggtaattcgtctttaagatacggtattagtaccaatccagaatttgtgaaaatacctcatttagcatgatatattgggactttttaatatatcaaattgtaagattgattcgaaattaatattgaatttgataattacctcatactaccaactgatttgacagtgcttggaagtctatataagtgatagtaattatagaagaacaaattgactgttttctatgtattattctccttattgacactgtcatgtttttattatgtttatgtccaacagtcggacccatcatcgtttttgtatgcacaagaacaggattctaacaagactttggttagtatacctataggatctgcaaatcccgaagtagatataacgaatctatctccaaggcagtggtacgtaccaagtcaaattaaaattaatgttaatgacacagttacttggaataataatgatactgaacctcacactgtaaccagtggtataggtggaggattaaacagtttattgaccaattcacaaggaaagcccagtggtttatttgatagcggtctgttttccacaggcaattccatatctatcaaatttaataactctggtactttcaattatttctgtactattcatccctggatggaaggtattgttcaagtagttaatgttactggaagtaatataccttcttttgcagttgatgaattgggtaatagaattgacgactttcctctttacaatttaacagatgatggtaaggtagagattggtttgtcatggactcctgactctattgtaacaaacgagcccgtatcctttattatggatttttttgaatccccagaaaactccagattacatttatggtcgtataactttgtaataatgcaaaatggtacagaaatttatagaactgacgaaattacacaaatcggttcatctgttcagacatatactttttcttcacctggaaaaactactatcagaattgaaagtggcgaaaataagagttcatttgtgcaatttggtactgtggtctatcaaaatccatatggaaatgcagaaagcatacaaaatgtgtctgatagttcatttagattaatatctccattgactttggtatatgcggtatatgcaattataataatattgccactgtttctaatagtcatactaatactatacaagaaaaaaaagatatgaggtatcactgtaacaatgttttaattgaggcattttccatacatactttgatcatattataattgttcttgaagatagagttagaattttagtatagtatgttatttagagattttatttttttatattacaataaagatactgtgtctttacccatatttttattaaatttcgtaatccaccacattagaaaagggatgtcatagagtaacaattagattctcaattcaaatatagatcgattatcctcctttaactagtatctgcctgagtaactatggagttaatctgttttcgattcttcctaaaattcacgatgccaattatagcgataatgacagctaaagtcatgattagatataggaaaaatgaattgctagtatttccaagattattatcttgaatactagtcaagccttgatctcgggcctctaatgagggcggtgaggtcactgaaagaaatgcggctacaataaggacagaggtgccccatagtgattctattatcagagatttatttaaagcgatatatacagtagtcctcttttcttgatatttttttagaatgttattatctttagcatttctcagctcttttacaatactggaagtcaaggatgtgtatttttgtattttaagctggttatatcttccgataaaaattaatggaaatgccaatgcaagctttagaacaagtatttgtccatactgtgtattaaataccgaatttaaattcagaaggtgcacataacccagatagagaccagatattccaattatacagagggcaataatgactataaaagaaaagtacattaaagcaatagacatgttgtgaatgctcattatactattagaaacgttagaaattgtgattgtactgtttgatttatcatcgtggtcatcaataggtttgagattttttacaagaactagcgaaagatgaaacaagccacctatccaaatcgacacagccatgaaatggatccaatccatagatactgcaaatccagaaaatgatggtaacgaattgctatgtcctaccatactgttagaaaagagattgatagaagacaaagcaattacagttaacaataatatttgatttggtatgttgttaccatgatatattttatttactaaggtgttttctctcttcgaggtaatctcttaattccctgcatacacaatggagtcgatctttgtctattatctggttcttcttgattaaatagccatctgaagaattttgatagaactatatatctgccattgaaacttccaatccatttgtgagatgggtcttcatcttgagattttctcaatttgtttaaaaatgcaagaatatcttctttagtcatttgttcataatttttgccactgtgaaaatttgataaccataccagaatttttattttggtctccttagttgtattctttatgtttatttcattttgttcagccatgatgtaattacataatgtctctgcattgtggaagttttgttcagccaatttctttaatgtatttttataatattgtctaggtaatgatttagttattatatccattctaacatctaagctattgcccttttctaaaccaaatctgtttttatcatcgtagttacccaaagttgacgttacaacgtgattcgtcagattatttaagagtattgatagaatccacaagttaggcgccgggagtgggactcgaacccacgagtccggaaggacatcagctatctatcctattatttcctcattattagatctcgaggctgaccccttttagggctggattttttgattgcttacctagcttgggtaccccggctttttaccttacatttactttaattgttatatttttaaacttatgttaatgaatttttatttcgccataaataattaatagcctacattataacttatgatatgctttcattaaatactaaagggcctactctagctactgtaaaagcgttgtctcttactgatctagccattatgtcttattcatcacacctattaagaaacagattgtctagttattttcatatagatagttttaccacacctgatccattttctgaagaggatgaatttagctattttatagttgtagacaaagcaaataccaacaggataatttctttcattgcactaaaagaagttgttgatattgatctatgggatttactatttggtaaagatatgttaagattggacatatcaaaagaagatgcattatctttaaaagaagaattaatgcctaaatatactgataattttttcccaattcggaaggagagctccgtaatcgggtatattgcttttactttcgaaatctgtggtatgaaaaattaacttgattattgttgatgataaattcattcagtatgtaagattctttttattatagctccatacttactgaaattggtaattccaattctccattttttagtatatttattttcatatctttcaaaattttccttgctctagtaattccctctctgcggataatcttgtttgctatatccttcctaaatgaatcagaccactcttgtccgattttatatttaccatcaattgtatcaacattaatttttattactgttagatagataatggattttgcattttgagttaattcaatgtacttaccttcggattgatatttttgcatcatcttattcattgcaaatgctttttcttgattgtcagaaacaatagatgctttcccttttattactatacttgtatacaatgtgtccgcaaaagaagcatcggtaggatgaaaatagtacgagggtaaaaaacaaatttccttatcgacttcaaatcctactttttgatttcgcgtaaggttttcaattttctcccccttgtgatgggagtgcatataaattacatgtttatgaagacttgggtttttggtagagacataatttactagcttgaaatctttgactgtatttccaatcttgtcatcttgatatgttggtttcccgtaactaaggctaaagtttttactgcttaaatctgtaactgtatgaacaaaattcatcggaattatttgaggatatccgtttacgtcgattgttgctaatctcccaacatgtatatcattcaaaaattctattatattaatgatattttttattctaaatctggacgttaattgcatttttctattcttttagaattacaaaaccgacatttttgattcattcctttctcattcctttctcattcgcttcttctgcagtagtaaccggagaaattctttctttccttgctataattattaataaaatcccaaatagtcccaatattaatgataaaccctgagcaccgccatagggtataaatatataataaccaatcgaaaagcaaaaacagattatggcttgtaaggcataggtaattgtctttcttaaatctatttttcttgtgataaagcctattgcaaaaaatgctatactaggatatataatcaacagtatatactgatctatatctatgccattgtgtgacatattgtattctatctttttgtactaattaagatatcaaaaagtatgccaaaagaaaaaaaatatctaacgatatgatttctgttttcttcttctagcccctgggccaccatatttctttgattctgtttgtcttggatccccaaccagcaaatgtctatcaaattctgttatctttttcttgatttcttctcggatgtttcttgtaaatggatgatcccttggatcctttgcaccctttgtttctcctgttaatgcacgtgaaattgctactgcgcttgcaaacgcttgccccataaaaccgcctccattgacgtgcacgttaacatctaccctatcccgtagttcgccaattatgttcgtaggtgttaaaatgagttcctttgctacttctggttgaatgacttctacaggaatattattaattctaatttttccatttcctttgactattgtagctactgctctacatgtttttctttggcccggataaagatctattttattcatattattgaactactcctttccaacctatctgttttgccacttcactcatggatatgtaaaatgattcgggtctagtaatttttgcgtcctcaaatgattgcattgctgaattttttaactcatctggtactcctatatatacccttaatctcttaaaagattgcattccactggattttctttttgggaccatgcctcttatcatttttgtaattatggtgtctggtcttcttgggtgaaatggaccgtgtatgggattaacaactgatcctacttctaatcgtttcttgtaactctcgatgacctcatacttgtttccggataccatcactttttcagcatttactacggatactctattaccttgcaatagtaattttgataccttggaacagagccttcccgaaatacaatttgttgcatcaactactataagcttattttgttgagattgactttcttcgggttttgtatccaattttgtttccttaaccaattatttttacacctttaccatcaggatatttacttattaatgattgtaatgaaacaacttctgcccctgccgtgttcaatttactgatggcagtttctgaaaatgaatatgcatatactgttaatttgtgccccaacgttccattgcctaaaatcttgcccggaactactactatatccccgttattagtaattttatccaacctttggatgttgacttgtcttctgtttgatctaaatctggaaaattctttctctaatgctttccaaacctgtgccttgttacttttaaatgctttacggaggatccaaattgtattatctattaaagtatcgttaaacattatttgctattccacttaaaagagtataaagtaccaaataaatttacctagaggttgttcggtatttggagtgcgttaattgtttcgccaaactcctttatgcttttatttaattgctcaattgctgctatgattatttcttctgcagttaatgctccattagattccacagttaaaaaaatttcattttcattttcattttcaccatattttactactgctatcgtagctggctgccattttgcatgatccctaccaaatcccagcctcgcatatgcctcaaactttattttttgaccaggagcaagcacaatgatggggatatcctgactaaccggttttacaaattcatcttctgaaattaactctgaagtagtaattgttttagttttttcattagcttctgcatctagttgcaataaaactcggcaattcgtacatcccaatgtactcttacaactacattcttcaggtaatgaaaatttcttcaagtcagtccttagtggaattaaaccaagcctgtgagcaactgcttcatcatgcattactgatgagttttctagaataactacgtcatcaatagcaaaagtaggcacctcgctaattgataatcgcctaattgcatttacgtactgacgaggtacgttattaaatttaatggttattctttcatcatgtttctcaataacctttaaatctatggagatcaaatcaaataattttaatcttaagtatattaaaaatgtaatgaatctataatgaatattgcgtcctgctaaatattattatattaatatatcacagttaattttctattgtatggctgattcaaaagttaccgttgtaaaattaactgttggaaatgatagatttgaaattttagtaaagccagatcctgcattagaatataaattgggcaaacgaactgatttgtcatccgtattagtctcagacgaaatatattcagatgcaaataaaggatctagagttgccgctgataaattaaataaacatttcaaaactagtgactctaatgaaataatcaaacaaatattacttaagggagaactaaatcttaccacagatcaaaggcgcaaaatggtagaggacaagcgaaaacaggttgttcaatacataaataaaaattttgtagatcctaaaacaaaacttcctcatcctgttcaacgaatagaaaatgcactagaagatgtaagagtcacaattgatcctttcaagaaaccagaagaccaagtcaaatctattgttgactctcttagaaaaattcttccattaaaatctgaaatgttgcaacttgttattcttataccaagctcgttttcctccactagttataattttattaaaagctcaggcgttctaacttctgaagaatggctatcagatggttctttaaaagtaaatatagaaataaatgctggtatgaaagggaactttctcgaacgcataggttctttgactaaaggatccgcacaagttaaggaataactacttacagattatattatagaacaatttctagataattagatatagaaatatgaaaaagtttcattttacatctattttgttattggaggtagacaatttctaaaatgcaggaaataaagaggagatatgttatacctggagataaaattattgaaggtaattataaacctttaatgaatgttattaagagtggtaattatttagtatctaccagagtggggattgctgaagctggtaaagatggtgttaaagttatacctttatcgggtgtttatattccacgtgttaacgacttagtaataggaaagattattgatcgatcttctctatcttgggatgttgatattaatgcatgctttttcgctcatctgcctgcacaagatgtgtttgggcgagatttttcaccagccaaagatgatatgggccgacaactaagcataggcgacttaattattgcgaggattgtatcttttgatagaactagagaccccatgcttacagttcaagataaggatttgggaaagatcccttacggcgaattcataaaaatttctcctactcgagttccaagattaattggaaaacgtggttccatgattcaaactatagaacaagctacccaaacaagagtaataatcggtcaaaatggtatcgtagttgttacaggcagagacccagatggcctcagtttggctgcaaaggctatcaaattggtagaggaagagtctcatactactaatcttactcaacgagtcaaaactttactaaatgttcaagaccctgaagatccagaacaaccagaatcaatgaatgtttcttccagtacctgaatcacccactgaatcacccaaacagccacaatccagtacctgaatcacccactgaatcacccactgaatcacccactgaatcacccaaacagccacaatccagtaccgaatcacctacaccgaataatagtaaatctggctctacttcaaaagaaaagcatagacatgataattctgaaaagtcatccaacaacgatagcaatgatgatcaaaaagaaaaaaaacaagagtgatcaaataggatatgtctaatttgaaagaattaactttaatggatgaaaatggaaaaagatccgatggtagagggatagatgaattgcggtcaatcaagattaccgtcggtgtggtgaaaaatgctgacggttcagcttttatagaattcggaaagaataaaataattgtagctgtttacgggccacgtgaagttcatccaaaacacatggctcttccagataggtgtgttctgaggtgcagatatcacatgtctccattttctacggataccagaaagaatcctgctccttctcgacgagaagtagaaatatctaaagtaatgcgtgaatctttggaaccctccttaatattaagtgactacccgcgagcagtaattgatgtttttgttgaagtattacaagccgatggtggatctaggtgtgctggcataaatgcagcatctgtagcattagctgatgctggaattaatatgcgagatttggtttctgcttgtgctgctggacggttatcagaaaatattgtactagacattaatgatcttgaagataaagaaggagatgctgatatgcctgtagcttatttgcccaatttggaacaagtaactttgctgcagttagatggtaagctaactacagctcaatttagtgaatgtttagaaaaagcaataagtggatgcaagttggtatatgaaatacaaaaagaagcactaatgaaaaaatattttggtaatgaaatggagttgaaggaagaagcatgagttcctctaaacgttctacagtaattgttgaacaattacgaaaacaacaaatgatagaagctttatctaggggaaaaagattggatggtcgcgattttgagtcgtacagaaattttgaaattgaggtaggaataatagataaagcctctggttctgcaaaggtaaagctagggaataccgaagtcatagcaggtgttaaagttgaaacaggcgaaccatttgaaggattagaaaataaaggtgcattgatcatgtccgcagaagttttacctacagcctcatcacatgttgaacctggacctcctgacgaggacgcaatagaattatcaagggttgttgatagaggaatacgcgaatcagaaatgctagatttagataaattggttttgattcctggaaaaatagtttatactgtttttgttgactgtagcatcataaatagcgacggtaatttgttagatgctacatcttatgcagtagtgtctgctcttttaacaagtaaatttccgatctatgaaattaaagatgaacaggtggttgatactggtaaaaccatgcctccacccattactacaatgccaatatctattacagcggttagaattggagaatcagtcttattagatcccacaacagaagaggaagcttgcatggatgcgcgcataactatgacaactcaatccgatggaaatatagttgctgtacaaaaaggctttacgggtccattttccatcaatcagattgtccagttctctgaaatagcaagaattaaaggagaggaaatgcgctctaaaataaaggagttgaattaaaggttaaaagaaaaaagggttcaacagcattaaaaggtttgggtgttaagtttggtgctaccgtacgaaaaagatatggtaaggtctataggacattaaagcaaaaaaggagatgtccaagctgtacttcatttcaatttaaaagagtagcaatgggtatatggcagtgtcgtaaatgcgaatataaagtcgcagcaggagcctatgacgtaaatcttggaaagcttcaaggctaaaatttttatttattttgatatagaccataataacagatttttccactctaataatgatgacggtgattttttaaaaaaaccgttgaattctatttttgttgcattaaaaggcgatattcaatctacgcccgattttgatactcatgttactgtttctatagaaaatgattgtataatattgtcaatatccggtaacaacatatctaagttccgtgcgtcactactatctcttttgagactattagatttagcatattctgtactgtatgttgacttatgatatattattgtaataatttttatcttagtgaatatttagttactttgtattaacaatgagtgaacaagagcttcctccatggctaaaagagcaacttgcaagattacaacaattacagcaaaaccttcaagcaataatgatgcaaaaacaacaggttgaactagaaatatctgaaacggaaagggctttggaggagttaaagaaaactacttctgatgatgtcgtatacaagcttgcaggccctttactggttaaatctgatagggataatttaataaaagaactagaagaaaagaaagaactatccaataccaggactgtagttttaggcaaacaagaatctagggtcaaggaaaatctaaaagaagtggaaaataagattaatcaaatgatgcatatggcccaagggggatctcaatccaataaatttaatcaacctccacaataacaacttttttcttatgaatgttaattaagaatatgcttttttattattgcattggctattcgaattgttgcagatgagcgagagaaaaatagtcgagttcctaacctacttaaacttaagggggtatttgtcgattataaacaattaacagttggagattatattgtttctcctgagaccgttattgaaagaaaaaccatatatgatttgataaattctgtctatgatggtcgcatatttattcaatgttccaatttaataaattattatactaagccactgattattatagaaggaaatttaacagacctcgatacaagagaacattttgaaaatgatcctaaattaattatcgataaaatacggatagcatatgaaactttgataagagtagcacttgattttcgaatacctattttatatactaattctgtattttatactgctgaattattggttttattagcttcccatcaatttaagagtaaaaatgatgggcctttgcttaaaaagataaaaaaatcaaatcctttccttcttcaacaattatatgttcttacctctttacctggaataggttctaagttagctaccagattgttggataaatttcattctcctgcgaatgttttgaatgcttcgatagcagagcttgctaggataccaggtcttggaaacatacgtgcagaaaaaattcgaaagattttggatactcctgtagccaaagaagtagatatctatactcaaaaaaaattgatgattgataatacaaacgaaaatactgatgatgataatgatgatgcgcgtgataacgatatgaaaaactgatattatcaatataaaattttattcttgacttattaaccaaagatcactatatcgacaatgacttttcaattacagatattaccttttcattcatctctgtatttcctattgtaattctcattgctccattgtagttcccaatgtctccaaaattctttattagtattctttcatctaataattggtttttgattttattgtagtgattaaatgtttgaaagaaaaagaagttagaatctgatttaaatattttgattttgtctaatttatttagccgttcaaacatttttgatctttccctctttattacttctatacttctatttacaatctggatattttcaagtgcttcaattgccaattgcatagagaaactacttaatggatacggtaattgaatatattgattgaaaacatctgatatctcttcgttagacaagatatatcctattctggctccagccagaccaaaagcttttgaaaatgttctcataattaaaacattgcgatattttgttactatattagataaactatattcagcaaattctacataggcttcatcgattattatcaacttatcttttaaaatatctattatacttgaaatatcatcgagtttaaattgatttccagtaggattatttggtgatgctatatatataatatcataatctctcgctttcttgataaagagttcaaggttaaaggaattatcaatagcggaaagatctattaatttagtgggtattttatacagattacatctatctgtaaaataagaaaaggtagggttcactgttataaccttttttcctttgcctattgttgataataataaatccattatttggtcagatccactacctatgccaatatttcttgtacttagtttagtataatctgccaatttcatatacagtttttcaaattgttctaatggatattctctaaagtcgctttcatgaagagattttgatgcgattaattttataaatctcggttctaaaactaaattttcgtttgaatctagtttatagaagtcatgaattttttctggccttgtataaggtttgtgtgatttaatgtgggaaagttccttatctaaccaatccgccatcattttatccttccctttaccgcttcatagtgattaaataatccttcggttgatgttatttcttttatgattggagcaattttttttaaagcatctcttttcatttctatcacatttaccagtttgataaaatctaaaacagatagtgctgatctggattttgcgaatctgtaagttggaagtacatgattagagccaagacaataatcacttacagatgatggagtatattctccaatcaatatcaatcctgcattataaatctcctttactatttttttatcgttacttgcaaatatttcaagatgttcaggagcaaattcattaatgaattctattatttcttcattattttcacataatgctatgaatccattatcatttatacttttttcgacaaattctcttctaggtatttcaccctctttaattattattctatttaattcttcagaaatctttgtggctacaattgttgatttcgttactaccccacatagtgtatcttcactatgttctgcctgtgagatcaagtctaatgcaatatatcgtggatttgaattttcgtcagcatatattaataattcggtcggacctgctatcatgtctattgatacatcttttgataccactgactttgcaacagacgcatatactccacctggtccgactattttatccactttttttatagtcttcgtaccgtaagccagtgctgctattccatacgcaccgcctgccttataaaactcatctacaccacagatgttacctgcaacaagagtcaaggggtccacctttccatttttcataggtggtgtaatagccacgatttgctttactcctgcaacttttgctggtatggtgcacattactattgtacttggatatctagctttgccccctgggatataacatcctactctaaaaataggcattattgttttgtttatcttaattccgtctgaatcaatttttatattcttaagattatcgattactgctttttcacttttctctaatttggatttcatgtattttattattcttatttgcttggctgagacgttctcataggcttctttaatctcagcattactaacaacaaatgaatcaatcttaacgttttcgtatttctcaatacattttgataacccttcatctccatctcttcttatatcgtttatgatttttagaacattctttgttggaattgaaaggtccttattccaagatctttctcttaattcattagcttgaacttgaggctctctaattcttataatcttaatcaaactttatttcatctttattatctagaatgatcttatccattgataatatttgacttggttccaaaattaccaacccctgcgcaacttttctgatggttggaataagtctgataaactcatttttgtctattatggtatttactccataccatccctctttacttaagttacttatagttggacctttcaatgatggaagaatacttaataactcttcaagattgtctttttctacattaacaaaaatatgtagtttttttcttgcttctactactcctctcaataggacaatcatgtctattattttttccttttttataggatcctttagagcatctttatttgcgatgagcactgctgtagattccattacttgatctatgatctttaaattattttgaataagggtggttcctgtttctgtaatgtcaaaaactgcatctacatcttctggaggttttgcctctgttgctccgaatgataaaaaaatctctatcattttattattaccagtcctagaccagggagttactattatggggtcgagatctccaaagtgttttttataactctccttagattttatatacgtggatgctgattttagatactctgttgaaaatctcaaagtctttttgttatgagcaaaattatctatcaactcatcaagattattgaactcaaaaaattccggaatagctattacctgcctaactttgccgtattctaaatctaacaatactctgacatcagcattcgtttcctttatccagtctttacctgttattccaacatcatgaaatccctcttgtacgtatgttggaatctcctgaggtcttagaatctttacttctatatctgggtctgcaatctttactctgtatattctacccctaccactaacactacattgccatgcttgttctatcattttaaaagtagcctcttctatactgcctttgggcaccacgaattttataagacccatatttgatacctatatcgaatatactaattattacgttgtttatttgttttattaattcgactttttattctatcaagtaaggcctaattttcttttaatgattctaaaatttccttggctcttgaaaccgatacatttctctcttcaaccatttttctggaaaccatttctattttgtcatttgtagctcctgctattattgcaatattttttgagtgcaatttcatatgtcccttctggataccttcgttagataaagctcttatggctgagaaattctgagctaatcctgaagcagctataacagttgctaattcttgcgaatttgatatattcattaatttcaagcaagctttaacgataggatgcgtatttgttattccaccaattattcctactgccattggaatttctatttctcccacaagatctccattagaatcttgataccatttagtcaaagatctatattgtccatctctacacgcatatgcatgacatcctgcctcaatagctctaaaatcctgaccggtagctattgctacgctgtcaattccattcataattcctttgttatgagtgacagctctatggacatcagtgaacgctagggaataagcaaataaaatccttttaagaatttcttcgccaccgattaattgttttggaaatatagctctacatcttaccaagcgctgcgttgcataattggataaaatttttagtattaccttacaacttgttaatgattctatttcgggtgcaatggtttcacacatggtattaattacatttgcacccattgcatctttggtatctaccataatttctattattatcattagtccgagtttgtttatgctttcatcgttgacttgtttaattttaatgtctatacatttcgcaaatttgcttttagtatttgctagggatattatttccatcttattatctgatattaactcaattagatgttgaactactgtttgatcgtttgaactatttgggattaattgaatttgacctatcatgatagaatcatctgcgtgagccataaaacctccgcctttacttgctatctttgcagcattgcttgcagcagctataacagatggttcttctattgccatcggaattaaatactccttattgttgatgacaaaattatttgctattccaatagggagtggaaaaattccaatagcgttttcaatcattccatcgatattatcaaatttaaatattgatgtatttttaaacaaatcaatttcgctgtcattcaagcttgtttttatcttgatatattgaagtctttcttcatgacccatgtctctaaattttttttttcccaaatttttcctcacttttcctcatttttaactattttcaagatcctgtcaccaccaccattgttatcaaaaaattctctattatttgttattagatacaatgatccattgttatcttctactacctctctaattttaccgtatccagttaatatggaagattgatcttttgaaacaagatcaatacttctcaaatgttctccttttaaagtagccacaattaactttccataataatttagttccgtggaattgcttatcaaaattccagagggatatatagaaggagtaaaacagaattttgcattaacaaataaactttcttctaaattcccacactcctctattggccagccatagttctcgccttgattgattatattgatttcgtcatttccaatcctgccagcttcactagcatacattgtattattgttaaaatcccatgtaatacctacaacatttctatggccatatgaataaattgaagagttaggaaatgggttatcatttggtgtggttccatcatcgtttatacggagtatttttcctgccaaactagataaattctgagataactctgaatttgtagtgtcgccaacacttatgtacaattttccatccggtccaaactttaatactccaccgttatggagttttgaagccggtatattatcgattattgtctctgtttcagtgagtgagttatttttttcttgtaatcgaattactttattgaatatctgattatcattgtttttatatgtatgataaagatacaaataatgattattaacgaattgaggatgtattgctactcctaatagtcctgccccttcatcaaaataattatcaattacttcgtaattatttagctgtgatccgttactattaagaattagtatctttcctgtctgttctgttattaggattcttttatctggtaaaactgctattcctgtaggaaactctaaaccacccgctataacgttgacagcagatgcactatcttctgcatatggtgaaggtaaaaggatcgttgtatctgaaggagtatttagtattgttaatgcgcttattattacaactataattcctattactatgactagatatttattcatcatcttatcttataacctacattttgcgttagagtcaatataaaatattattctttagcaaattaagttcctttatgtttctatatctacatcgattattctactcttcatctggttgccataccactcatgattattggtattttgttttttcatttgattcagcccatatatttttaaattgtatgatctttcatgccgaattggaaaataagccaatgtgctagtcctacatcaaaatcaaaaattttcagcgcagatgaggagatttgaactcctgatcgccgtatggcgaatcggctttcttttaatctaccttgttattgactcaaggccgacgcattactatggtcctaataattttgtattaggatgaccactctgccacatctgcactaaaactaattattattgccctctattatattttaacacatattgtatcctcactccgtttagaaaatcagtagaggcacttgtctacctatactatggtttatggttaaataaagtagtacaaaaaatataaattgttagacatttactaatttgttgcatattttgctggagtagggtcaccacaatagaggtttgtaattttagaattttcgaatatcataaattggttggttggttaattgattggtctttttaatatctattagtgggcgctctgtacgtgacgagctataaaaataatcgatttctctttatttagacccgtttattactgatttttatatctgtttaataataattatcaaataatgattccgataaataagccgtggttggatgacgaaactaaacaagaagttttgaaagtattagatgaaaatgctttgacttctccagctaagaatggtggaaaacgggtacaagaatttgagaatcttttaaaatcatatctcaaagtaaagcatgtaatagccgttaattcgggaacatctgctatacatgcctctttgctgtctttgggagttaaacaaggcgacgaagtaattcttccatcatttacctttgtagctacggctaattcagttattgccgctggagcaaagcctgtttttgtcgatataaacaagaatgactacacattagacatttcagatgttgtaaaaaaaattaatagcaacacaaaagcaattatcccagttcacctttacggtcatccttctgatatggatgaaatcaattctattgcaaaagataattcactacaagtagtagaagattcatgtcagtcattaggttcattatatgatcaaaaacaaactggtacaataggaaatttaggttgttttagtttttatgctagtaaagtactcacgactggagaaggaggggcgattgttactaatgatgataatctatatgaaaaattgttaatgataagaaaccatggcatggtacatggatatgacacacaggtatttggtctgaacttgaggttaccagaaataagtgcagccattggaatagcccaaatgcgaaagctagacaggatgctaaaaatgagaaaaacaaatgcagaattattgtttgatggattaaagaaatttgaacaaaaaggcttacttacattgcctcacgaacctgaaaataagaaattcaattggtatctctttactattggattcaaagaagattctcaacgagagttgatcaaaaataatcttattgaagaagaaattggtgctactgtctattatgatccaccgatacataggactccttattatagtcactccaacgatcttagctctgatactcttctctccaacactatttgggcttggaatcatgtattgtcattacccgttcaccctctgataactgaagccgatataaacaaaattttaaaaacatttgaaaataatttacaatgactaacaatacagaatgaactaattggaactgggctttctcttaataaaataccatttttatatgagttcttaaatcggttttaatataaatgaaaatgaaattaacaatagaaaaagacgaatttctttctaggagattttacctcgtcattttttatttatgtgcattttttatggcaacaattactttttattcattatatataagccttgatgaatatttgaataccggaagggtcataataggagaggtattggttaataccgaatttccagttaaagggttagcaaaattggtaacctatcttatgatagtgtctgtcgtagcttggtattgcgttactaaacttggagcagataaggtaaaaaatataccaaaaagtgtcagatccattttgcaattgatagttcttgcaatactaataatttcaatttatgaattcttttataattttataatatggaatgcattaatcactgctgatttaatcaacggtgaattaagattagatgatttatttatgccctatcctaatcctgatacaccatggaacttggtatttgctacaaagatgtctttggctgctttgattatttctgctcatggtttctacataatatcaaaaagaacctgagaacccgagaagcttagaaagccacaaggctagaaattaatacttgtttaattccataaacagttagttatcattatgattcttgttgtctgtctaattcatttatgatacttgaataccccattatattaaaagcaaataagattttattacagaaaaactgaaaaattttaccatgggtaatattgataagaagaatattcaattaactgaacaagagtggcaagtaatccttgattctttgagcaatactatttttaacgaagaaataactgaagaagccagaaaaaatgctaaagatttatttatcaaaataaacaagaatgtgtaaatttattagatttgatataattagtgcaagttagtataatagatcatcagtggcatattatgtaagaaagagtttatctttgatttcgtaggaaatttatcgcattgtagcatgaccgagcttgcttatcacatttacttaatcttcagctgaatctatacgtacatcatgttgatcatttaacgggttttcattatttgctatatttaagatctaacacttgaagaaaaaatgccaattttgacataaatttaggttggattttattcctatttaactactatttatattctagcaatatgcaaagtccgatatagactttattgattatagattgtggtttgtggctttatcaaattattaattttgtcaaacaatgtcccacattgagaaattaaaatgcccgtcagcagatcattatatatttccaactgcataatactgctaatttccaaatctatttcaagaatatagtcaagatcaattataatttcacagctactttgtaagcgtatttctaatttgctttactaattccaatattctgtcaatatcgtctgcttctggattcaaatctatataattataaagaatttctaaagcctgctgatattttttatttctgtataaaattatacctttatctcttagtgcttcagaactagaactatctaaggagagaatcatttcatttattttcattattttgtttaaatcatccacttccatgtatccattttttaaattattcaaaactctgattaaaatttgtgatgaattagtcttcttcatcaaattattagacaaagaaatcgtagatttagggtatgccttgttcaaaagatcttgtaagatatagtcatccattattcgacctttattgaaagtatcaattactatagattcgtccgtatcttcgtctagtacatatttgactaaaaagtgggatggaaaatttacgggatggagtttaaaatccatgtaagtagcaaggtgaatatagattaatgatagcgttattggaattcctgtccttttttctaatactatatttaaataattattgatagggttataatagtcactaacatttggttgaaatttcttatcgtcaaagaaaaattcatttaatttttcaataaggtgggttggtctcatactttttgtattttttatttgtgattttaactcttttcccatctcatccatcatattcatataatctgaaattttcaggtcgggatagtcgataattctagcaatatgaagtacgtattctgttatctttattatgtcatcattttcttgcaccttatctattactgtctctttccaatctttcaggtagtcttctttgtctatcttatcttcaaaacccaatattagtaaaagcttgtttcatgcttataagtaaaatcaaaaaatatatcatgttacagtcgttgaaatattatcgataatttttatcatacatttagtagttttttcaagaaggtcgatcctagcaaattcgttgggtgaatgtattcttgaaaatatataggtcccaccaatagaaatacaaggggcttttagtaaatcaataaaatcatacatgggtcccgtacccgcagatgaaattgatattattgaatctccaaaaatttcatttgcagattttccaattatttttacatacggattatctaatgcagttcttccagcggcttctccatgaataagtgtaactttgatatcatcaaatccattttctactaggtgtttctctaaccttttaaactggaggtttgggtccatatttggaaccaaacgaaagtcaatcttgaccattgcttttgaaggtgtaatagtttttgcgccaggtcctgaatatcccgaatttaatccagatatattacatgttggttcacaagtcaatgctttcttaacttttttgccactaagattattgataaatttactgattccatattcatttttaaaactttcctcatcaaatggttcgctgtttacaaccaaactttcctcttcagataattctttaacttctttgaaccaatcatttatcaaaatatttccttctctatctaccaatgttgataacgcttggactattctccaagcaggattttctatcaaaacggctaaactagaatgaacatctctagatgcaccctgtgccgtcaattctacgtataaaagacctttcattcccaaactgataataggtttttgttcctgatctatatatccaaattcccaaatgaccacgtcagtcttgaattttgtattatatctttttagatattttgatatgttattacttccaatctcctcttctccttcgattagaaactttatatttattggaacatcgcctctttgttttagaaaaaattctatcgcttttaatcgggttacaagttcacccttatcatcagaagcacccctcccataaatcagattaccttctactttaccttcaaatggctcatattcccataattccttgggttcttctggttgtacatcgtaatgattataaaataataaggtcttgccattgggatttgatttggatttgatctctccatacactaggggagggggtacagaattatttttatcatcctctaaatatatcaactctgggacaattcctattcttttcatcattacaacgatctctttagcgcactcttccaaattttgctttcttgcagaaacactcggaatttttatcaatttctgcagatcgcttatcagcccatgagtatcaatatctattgtcaacttatttgaagacatttagctatgatgataaatatttctttaatataaaaactaaatttttttaatatttttataaccagacggtattacttttttttattgagtaatgaaaatttaaagaacattttcctttcaccatcttctattgctgtaataggagcatcagaaaaacctggagtaggtaaagctattttttcaaatatattgagcggctataagggaaaaatatatccaattaccccatcaagtgtatctgtagctggtataaaggcgtacaaaagcgtccttgatgtagatgacgacattgaccttgctgtagtcgccactcctaatagaactgttcctgcagtcatggaggaaatagggaaaaaaaatataaaatcttgtataattgtttctgcaggctttaaagaagttgacgaaactggtgcaaaattagaacaacaagtacaagacattggtaaaaaatatggaatcagaataataggaccaaattgtcttggaataatgagtcttaccgatcaaaatcttatgaatttaacatttttgaaaattactcctaaacatggcgaaatagctcttgtttctcagagcggtgctatttgcgcagcaacggtagaggatgccatagctcagggaataggcttttccaaagtaattagtatgggaaacaaggtagatatggatgaaactgatatacttgaattattagaagatgatccttataccaaagtaatcgtgatgtatttagaggatatccatgatggacgtagattcatgaatacttctaaaagaattactttagaaaaaagaaagccaattgttgttttaaaatctggtaggactccagaaggcgccaaggccgcaatgtctcatacaggtgcattgatgggttcagatgaagtatacgatgctgtgtttaagcaagctggtgtgattcgtgtagatacaatgcaggaattattcgaattagcaaccgctttttcaaaacaacctttaccaatgaataataagggagtagtaattgtttctaatgcaggtggacctgcaattatttccaccgattcttgttccaaatacaacatacaaatggccgatatttctaattcgagggaaaatatatctagagttatcccgccccatggatcctctcgaaatcccgttgatatagtaggagatgcggatttcaatagatttgaaaaagtattgatcgaagtattagctaattctaacgttgggtctgtagtaacaatgtgtactccatctgcgactttagattataatgagttagccaaaacaataattcgaacatcaaaaaatagtggcaagaccatgttagctgcgttaatgggtttagctgaaggtgttgaaaataagtctatattgtcagaaggagaagtgcctcattttatgtatgcagagcctgccataagaacattagattcaatgtataggtttagtaattggttaaatagtaaaaaggaatcgatgccttctttttccgttaataaggagaaggttaggggtgttatatcaagtgtttacaaacaaggtagaacaaatcttctagaggatgagggctatgctgtacttcaagcatatggatttccagttccaaagagtgtgctagtaaatattgaagatgatgcagttaaatctgcaatggaaattggttatcctgtagtcatgaaaatatcttcaaaagacatcatacacaaatcagaatctggcggtgtaaaaattggtttaaaaaatactgatgatgttcgaaatgcatatagttctatcatgtctaatgtaaaaaattataatccgaacgcaagaattgaaggcattttggttcaggaaatggtaaccaattccaaagaattaatccttggtgcaaaacaagacaaattatttgggccgttactgatgtttggattaggaggaatctatgttgagatcttgaaggatgtaaattttagactggctcctatttctgaatcagaagctagggaaatggtggattcaatcaaaactatttcattattgaaaggtgtgagaggtgaaaaatcatcagatatttcatcagtaattgattgtttgctgagattatctcagttaattgtagattttccagaaatcgaagaatttgatattaatccgttactggtcctagaagaaggccgtgggtcacgagtagtggatgtgagaattggattgaaaaataaataaataaataaataaataaactctatttcattctagtttttttccacattcctcacaaaaaacggattctgcctcattaggggatttgcaatttttacatgttttagtatctaattttcctgttaatgatgatgatgctaatgatgaactattggtgtttatattactattatcaccactaacgttactaatatcatctctcaaacctcttgatttgttctcactatcttgtaaactctgatctgccaaaataattatgtctcctattttagaaatcttattccattctatctctctaatttcattatttgaatcttttatcttgaaactaaattcaacatttccatctaataattttcttaaacctatttcttgtacattgccaattaggtgtgcattattatcataagttgacattccgattattttttcaatatgcacataagtggattttaaatctggaatagctttatcattatcgctgttttcagttggattgatcgagttaattgggttaatactgctcttattgttgctttcatttttattttctgtttctactacctcgtcataacttttattcccattttctttttctttttcattctgatcttttgattctaaggtagcattatctttcgattcatcaaattttctatactgggctataatataatcacagtttttgcatttgtattctcctttttcttttagtattatattctcacccaaatcttcattagggttttcaaattcaagatttggtgctccctgatattctttttcacatttattacaataatattttttaaatctatcattatctaacttacctacgcctgccaaaaaaagctcaggaccgcctaaatttgctttcttttgttcatcgtcactaacctttgcaattgcatatcctccagaccctctcaattttttttcgacaaatgttttttccttattcatggttacaaggccaattaaacggtgagatttaaataatatataggtatcttggtttgaatatcaaattataaagacaaaaaaaatttaatcggggcctactataggtaatgccttggcagcgggcaaagttattattttttcttgttggtctttatctattctctcaaattcaagtgtcatctcaatcggtgcgttatatcttgaactcagttgttccgcaagttgggctatagattgtttgtctgcaaattctttagatccttgcaagaatgcccttgtttgtctataggctatatggccaccaaactttgaactgagaaaatttgcgatatcttttaccttttcaacaggtatctcgttgtaatagaaacatattccattaacaggttccttatcaaatggagttccatatctataccaaaatacaccaaaatgctcgtgatcaccttgtaaacatttaatctcccaatgatttacattgtcaataggataagttccatttcttaaatcatctaggctaagcctccagtatcttacacgcatttatttatggataagattatgcattttatatttgtagatttaaagtaatgttataaattagtcttctttgaatcaaggcgtttgactgtccttaatgtgattttgctagaaaaaagggatagataataaattatcgttagggagaattttacaaaccgttataaatccttgtaatttttctaaatctatttggataatagactagacctgttgatggaaatggaacaacactttgataataaagacgaggagtattttaagaatctagttgatcataaggattatgtaataagaactagagccgtatgcatactagcagatatctctggagaaaaagccattgaagctatcggacaagttctattaaatgattcagaccagcttgtaagacacgaagcagctttttctctaggccaattaggatatacaagtggaatagatgttctatcaaaagccgtcttaaatgatcccagtttttttgtaagacacgaagccgcagtagcattgggagttataggatccgagcaatcacgaaaaacccttgagcgagcactaaatgatgagagcgaagaggtaagagaatctgtcatgatagcactggcgaatttagactatattgcacatgtaaaaagaactaataagtttacaagcttgaccggtggatgattggatgattgccaatccaaatcaagaaagaagaaggctgtcaattattaacagggaatatgatatgattagttttcagctaatagatgaactggcaaccaaaaaaatcgacaaattaatattgattctctaaatatagtatataaaatggctgatcccaaacaagatgagggcttaacactacttcttgaggaaaatgtaaacgaatttaatgagtggcggttaaaaaatctaactttaaaattagattttactgaaactgatttttcaaataaagatatctctaaaacatatcttaacggtgttaattttgctgaatgtaattttacaaattcaatagtgatgggcacaaatttcgtacaatccaatttaacaggaactaatttcgaaagttctgatatgtctgaagctttgataatgtacgctacagtaaaagattctaatatttctaaaagccaattaagcaataccaatttcatgtggtcagatttgcaaaactctgattttagacaaagcagtatgtacaagaccattttcgttgaggcaaatcttagaaatgccaatacagaaggactagataggaataatgcatatttaaaatatgcaaaattaaatggaaccacttgggaataacattatctatttactattatacagtaataacaatagatgtaggtggatattcttttagtgatgacaaaccgatttgctggcttttaaaagctccaacaaagttaaagttaaagtaagcttacaatcaacctaccaatcaacccaacatgatcacttttaccttttattttgaatcgttttgtatcatatcgggttcattcatttgtatatgtatgcatatatccaaagttaataattatttttaaaattttgatgatctgcattcataacaatacattatatttaccatatcatattttatcaaattcttatatgacaatattagatcgagttcactcgatcaattttttaattactgcctgaatgctattgtgactaatatctcttgttttttattcgttactttattaaagatctttatgtaaatatcgtcacatatttgtttaatgtaattagtctttttaaggcaataaaaatatccaagtaataaattttatattttacggattattttaggatcgattctggagccaattttgttactaggctacgattctaatatagatattctcataaaattaggataatttaaactatttacactattagcacaaaattaattataatacgtataccaaattcacaaaccgtatcttcagattcatttctagtaaaattctccggtcgtccctatactaggatcatatctatatttatcacgatattattaatataagcacgagttcttaatcaacaaatttatcgttagccaccctgtattagatgaaacatactcattccacatctatgtttaaggaatacgcctatatcatcgttaagaggattgttgtcatcttcgacgaatatagataaatatcaaatcgtcatccaatatatgtcattaataattctgaatatttttatatatatcagcattatacaaatctgttataccgtgtcacagaatatatctccagattccaaaaataaaaactgtatagtaattatcgatgatgaaatggatttgcttgtagtttataagaaagcattggaattatctggactaatagtttctgcttttgtagatcccattaaggcactagatgaatttaaagtgaactactcaaaatacgatctagtgatgtctgacatacgtatgcccggtatggatggatatgaattgattaatcaatttaaaaaaattaatccaaatataaaggtaatttttgttactgcacaagatataacaaaatcagatatcctttccaaattgaatgatggggtctcaattgatgaatttattagcaaacctgtatctttagataagttgaacaaggtcgttcaatcagtaatcaataactcctgatccagaatcatttcaaaaatattcatactactatgatttgtattgatataaataaatcatctataccactataaattaaaatagtttattctccataataaggcaatataggtgataatggaattataaaaacaaaagaagctcccttttcattcaggttgttctcagcccagatttgaccgccgtgtgcttttattatatttttacagatgtacaagcctaatcccgttcctttacttgatttggtagtaaattttgagaatagtttgggaaatatttcggaatcgatacccttacctgtatcttttacagaaatttttacaaaatccgaaccttctgttctaaatttttctgtgtttattataatttgttcatattcatcagtaaactttagagcattatctatgaggttcgtaagaacctgtaaaattctagacttatcaatctcaacataacagctttgtatctttgagcgagaatcattaaatgaattttcaacttcgtcttccacaaacaatagtttaggaggattatttttcaattctccatcatcaatgtgaggatctataagatacttgttcctgtctaaattaagttgattgttaaaatcaaagacgctctcagataagagtttcctaatatccactaattctctctctaatctaagagaattagactcaattcgagttatatctagtacattattggttagttgggagagctttttagtatttctaataataatatccactaactcatttaaatgagctcgactgacctttatctcgtctttgccatcatgaagtatatcttgatctaaaatagacttaattaaatcagacatcattaatattggctgcaatggatttttcagttcatgagcggcaatatgaataaaatcgttttgtagtacttcactttcctttaatttctcattggctttttttaacttcattgaaatctcggtttgttcccataaattctcaaagaaaagtacatatgacaaaacacctgccttgctatttgaataagttgataatcctatagcatcataaaatgaatctttagaatcatcttttaactccattaccaaggaaactcttttgtctactattaaaatagttgacttggtctctaaaaagttttcaataactctaaactccatatcgaaagactttgacgtcaatagatctttgtcagctttgagttcttgtataatcaaagatattctacgatcggaaggcactaatgcctttaattttatattattattttttacggattcaaagatagatggaatcaagcctgcttgtgctgtcttataaaggctccagcggatggaaaaataatcattatttcctttttggcagaacgtactattgtttgatagagactgtgtatattcttagactttgaaagaatatctattctctctggatcatagcccatgtcaatatcattaatgatatcctttacatcggtactatttttccataaatcttcaaagattgaagaataatatttaatatgaaaaggatcgttactagctagcatattctttatttgtttaccatcggttatagtatcattactttcaatattcgcgagaagtattttattggtaaccaaaaagttaacaataggaagactttttatgttccttattttaattccgatatccataaacaatctcgctatctctatgtcttcttttccatttattgagattatccatctaattccctcatgatgctttttctcatatttgtctattattttctggtacacgtcaaaaagagactgatatgctaatctaagcatgctcatatctgaacaaatcaatacttcttcggatgtctccgctagattgctaataatcttatgaatttcattccaattgtcaattacttttgtggatattctctgatatccttctctaatttccataatcctctgctcagcagggatagctttttcccaaaggctctcaaaaacctcttgctgttgttcaacaatttccataacattactataaattagatgggcaaccggttgtgcttcctgtaggttagcagtagctatatactccttttcagttaccgccatcccgccttttgcattatcgagatgacgcaattcggcaattttcataaattcttcgcaataacgtaagttactgttactaatctccgtaatgaagcgtattataattccccttttataggcatctataaaaccatttcttatggggttaactcccatcccaatggaaggtccttgggagtttgtgtagttgtcccatttaattgacgtattatcaataacttttaagatcatttgggtcgttttttcacttccatatataacctcagtcctttcccgttttgacttggttcctcttatggtattgataaattttgaagtatcgttgttagaggtttccttgccttcaccatggaaacttttatctctcaaatatccgttttcctcatgcaactttcgctcatgcatttattatgcacctatgacaatatgaattgaagctggagtatttcacgatattgtatttaaaataaaatattcaaatatataaggatttttcaggataagtagatttgttatcagaaaaaagtaataagaaatagaaataaaacatataatataattctaccgtaacatcacttggcacaacatttttctcaagaaaattgagaataatagacgtgttcttgtttttgagaataataagaatccccgatccaaaagctggaactctatagtattaagctaaaattacacatgtcttttatgttattgtcattattaaacattctatgccatttactaccattttatataaaaaattaatatgtatgagtaactttttagataacatggaggaaataggtactgcagaaggattagaagagtccactaaaaccatcctcaatgtcttaaataattctagaaataatcttttaatctgtgcagaccagtactggccttcagtcgctatcggaatagaagtttttaataaagggatgtttgacttgaagaaaagaaatgtgaaatctagatttattaccgaggtaactaaagaaaatattgctttttgtaaagaattattgaagatagctgcagtacatcatttacccggcctaaaaggaaattttgcggtaaatgaaaacgagtacattgcatcggcgacaatgaaaaatttacgattattgtctcaagttgtgtacagtaattcaaaggcagttgtagaacaacataatttcttttttgagaacctatgggataaatctatttctgcaacagagaagattgatgaaattgagaagggcatagttcccgaaattgtagatgtcattaagagtccttttgaaataaagaaaatttattttgatgttttaaaatctagtgctaccgagataatgcttattcttacaacttcaactgtttttatgagagaggaaaacgacggaataatgcaatctttgatagatgcttcaagaagaaatataaaaataagaataattactccatcatttagtcatgcagaaaatgagttgataatctaagtcaaaacgacaatattgaagttagacgtattgaatcgccatttgatgcgaggataaatatattggtcgtggataaaaagtactcgctgatagtggaattaaagaatgacaaaaagcaaaagtttaccgaagctattggctctgcaatatcttctacaagtaaaccaaatgttatatcatttgttaccatttttgaaactttatggaaacaaaccgaactgtatgaaaaactaaaagacaccgacaatctcaaagaagaatatataaaaaagctgcgactggcagacaaagcaaaagatgagtttgtaaatattgctgctcatgagctaagaactccaacacaaagtatcttgacttttgcaaatttgttaaaatatgatatcaataagaatgaatctatagaagcgattcatagaaatgccaaaagactcaacgttctgataaaaaatattttagatgttaccaagattgaaggtaacaaacttttgttgcatcaagaaacttttaacttaaacgatttattaactaccatcatcaaggattacacaagacagttaaaaaaactcacttcttataaaaggcgtataaagttacattataccttacaaaatgaagacttggggccggatgctcttattcatgctgataaggaaagaattattcaggttatttcaaatttgctcgacaatgctataaaattcattgaaaaagatggattgatcaggataactcttaagatatcaaaaggagttagtgtacatacgtacggctatgcagaaataataattaaagacacgggaagcgggatatcagaagaaatccttcctcatctttttagcaaattttctactagatcgtttcaaggtactggattgggtttgtacatttgtaaaaatatcattatgtctcatggtggaagtatgtgggctgaaaataataaagatgagaaaggtgcaactttctcttttaaaatcccattaattaagaccgacctgattcaaaatagttctgggatgagttaatgaaatgaaaatcaaaaaaataaaataaaaattcttatcgtagacgacgaagatgacattacgttatcttttaaacgcatattagaaatccatggatttgaagtggatacgttcaatgactcttgtttagcgttgtcaaaatttaaggtaaattactatgacatagcactccttgatatcaagatgccacatctagatggttttgatttgtacaagaaaataaaggaaatggacaataatattagaatatattttttgaccgctagcgaggcatattatcaacaatttcgagaaaaagactattcccaattaagcagagatttgtttatccaaaaaccaattgaacttgaagaattactaaaaagaattgacgatatgatggaataattatgttgatagaattggatgttattgacataaagggcaagtcttacgaccttcatcataacatccaaaaatccgtgatatataatatctgttctcgtttttttgatctatataacagcattgtagtgttacaaatagaaatatttttaaatcttgttttaataagctatgttagcttaagctattgaactacaatgaccattattgcaagtttttcactaaaatgaggctgctataccgatattggtatttatttgcaataataaacaaaaaccataaatagtacgtgatctatattatccatataaacatgatagataaattaaacaatctatctaattacgataaagataataactttgaaaatactttcaataatcccagcgctgaccttccaagttcaaacaccaattcaaatagtttaactaaggaaagtagtcaagaacaaataaattttattaatttcacacaacaatattgcataggatttatagatataattaattccactcaagaaactgcgaaaataaaagaccctaaaaagttaagaaaatattattcgctttttttgaattccatgagtgccatacttaatcaatataatggaaagattgttaaaaatagtggggataatttgtttttttactttccaaaaacatcaaatctccgtaatcaacaggcattgcaagacgtttttgattgcagcacttcaatgattaaatcatgcaaacctttgaatcaagaattagcagaagaagacttgcccccaatcaattatagaattagtctgaattatgggttggtagaggtcgccctgggctctaataacaaggaagtagacttgtttggctcggtagtaaatgagtgcgccaaaataaacagcttatctaaatcaaatggattggtaataggaaagaacttgtattccttattaattaattcaacctttagtaaagaatttgaaatatctgagattaaactatcattagatggggatagcagaaatattaattcctgttacacaataatgaataacagaaaaatattaaccccagacaaacgtaaagccctcctcctcaagcatcaatccccttcgaatgaaatcaagcaacctagtaaaatggaaaacaaacagtacaatatcttattaatagatgatgatgaggatatcttatacacatatcatgcactgttgagaaaggaaggatatgtagtacattcctattcaaatcctattgaagctctaaaaaacttggcaaaaaaaaattcacataactatgacttggcagttatggatataagaatgcccgagatgagcggaataaagctattctacaggtttaaagctatagatccatatttgaatattctttttataactgctttggatttggtaggcgagttcgtagaagcattgcctgaaataaaaataactgaaattgctagaaagcccttaagcggtgaacaatttgtctcgattataaaagagaagttatccaaagccaatcgttggtaattgacagtattgaattctataatttatactgtcgttgggattgaaaacaacaaattaggacttgaattaataacaaatagactaatagaatttattaacccgtcaaatacttgctcaaacttttttatgatcgttatttaaagatgataattttgaaaaatcttacatatattttctccccggattccattttatcaagtctaatcaagctagtaatattgccatctctactgctgtctctgatcttggcaatttcattagatcctactttatggatttcttcagaaatacatcacttttacatcgaactaattgctgtaatattaggctcggctctatcattttattacattttgcgttatagagttctaagagacagatttagtctttttgttggtataggattttttattagtgtttctattgatatgttccatgttatagtatcttatgcattaatggagaatatatcatttgtaaagtattttattccccaaacttggtttgcaggccgattattccttggggcgatgctcttaattgctattttaaaatattcctcactttcacaaagagaagaaataggacaactaaatgatatcaactctccatcaaatactccaaaagaagtaactgaaaagaaaaacattactgaaaaaaaagatagtatgattttttatatatctattctggggattattgcaatagtaacagctgtgtcctcactctttttggtttatcctgcatctgttctggataattattcggtgcacaggccatacgaaatacctcctctaatactattttgtttagtacctgttcttttattacaagaaaaaactttatcaaaaaaaagatttggtatataaaggccttgtcttgtatcttgtaattgatgtttttacacaggtcgtaatgtctttttctgctatgtcttttgatactgcccacaatatggcacatgttcttaaagacgtgggatattttgtaaatattattgcacttatcatgtcaagtatacaatatagtatatatctgaaaaaggcgaattcattaattagagaaaatcttaaaaaattgcaggagaacgaaaaactcaaggatgattttattaatatagctgcccatgaactacgtacaccaattcagcccattctaggactttctgatttgattaatcgtactcttcagaataacacaagtgagatcgataagtcagaattgaaagatgatattaaagtgatatatagaaacgcaaagaaattgcaaaaactaaccaatgatattctggacgtctccagaatagatagtcataaattaaatcttgatgtctcaaactttgattttgtggatcttattaaaaatactattcaggacgtcaccataaatgcagaaaaaaaggaagaaaacatatcaatcgattgtaatttcgaccatgaaactaaatcaaaagttgtatttgatcaatcaattttagtagaaggtgataaggctagaatatcacaggtgttgttaaacctgttaaataatgcaagaaagtttactaaagaagggaaaatagtcgtaacagtattaaggaaaaaggacggaaaagaagtagttgtgagcatcagtgacaagggtaatggaattgattctgaagtaatgaatcatctatttgaaaaatttatttcaaaatcagagagtggaactggtttagggttatacatttcaaaaaacatagtagaagcacatggaggtaaaatatgggcatcaaacaacctggatggaattggcagtacttttagctttagtattcctgttgaattaagacctgtttcagattccgaatcccaaccaccaaactcagaaacaaatatcgcctgaacatatcaataatcaaacatattattgaaaattatgataatggagataagagtaaataacttgagtccgaccttagcatcggtatcagtatcatcatcggtatcggtttatatggtaagtatagactcttgaattaaggaattaccaaaaaaatttagtctcttttcaactagcagaaagtacaagaaacctctgctttggcctaacggacacccccaccaccttcaacagaatcgatccaatggccgtgggtcccaatttacctaaactatggagtctgtccagtaggccttgcatatttaaagagtgactaacccatcaactctaaacctatagaaagagaaaaagaaaaagaaagagaaaataattggattgaagcttatagacaaataaatcatctaattgttgtaatgtctgaaattcttttgtcaggagaagctttatctgatgatctgccgctaccttctaaatagaaagaaagaattcatgttttatacgcataatcgatgtgggactcattatcatacctagaatgacaatgcaccattattattacaatttctagtccagtatctaatcatttactttataacatcattaaatagtgcaaaatactacatcaaggtagtttatcatctaaaacaaatcgttcaagtcgatatcttagatgatctcaagccgccctgttctccctaattctaaaataagcagaataaaatcagcacataggctatgatatttaaataaatttgtacatacatagaatatatttggttaattatctaaggttttgtgtctctagagacacactttaattctcattaggatgtattgatctgtctaatgatataatgaaattcgcatttaagccacaagacgtgagtgctatattgaattttggatctagtcatatgtatctgcattgattgtatttgcaagcctacgcgatcctcggtcaccaggagtgcctgcacctcctctgtcccttcctcctcctccatccctctgtcccttcctcctcctcctatattcaatgctagtcatctgcagaagataatcataaaatgttataattttggggctgatatcattacatttttcaagcatagtatggcctttttgctgaccgaaatacaagtatagtatgccttctaccaacagccacactttttttcatttgattttttaatatcttataccataccataccataccataccatagaatcacttctattgcctagctgttcaatattcaatatttgctcttaatcataattataaatttgcagctactaatcgacagctactaatcgacagttatggataattaaaaaaataatatcaggtctgttgcttattgaagctaactccagctttccctgattttccaattctacctacaatagttggattaaacttatgcttggatagctcctccataatggttgtggcaaagtctattgatactactatcatatttgtatcaggagtagatgcactgatatttgatattaagtgctcctttgatacaaaatttttaatatcattatccacatatggaatatggtcaattattatttcgttgttaattaattttgatagttccaaaaatgacgcaacaccattctttgagataggatgcgttactagtatatgagactgtaaatcaaatagattctcaaaatcgggcaggtattttgatattattttcccaattgatacctttggctctatgagattttttagagcaatatcctttaatcggattactttctctctatctatgccatatttgttcattttttcaaaaattatatcatctagattggtgattatgtacaagccaagacatgccaaaagtcccaagctgtcggttgctattatttgcatatcttgttctactaaatcgtatctgtttggtaattctttgtgagtgttgcctactgccgtagtaccaaaaaaaagacctcccaactttaatgaactataatcttcaaatgtataattatattttgctgtaaaactatcaatatttcttcttatattatctaataattcatcagtcggtgcatcatatattggataaagtttaatatccttagaacacccaagtaaatttaaaaggctaatagattcggtaaatgatatttccatgtgaattggagactctattggctgagtaacatctgttgcttgggtattggaattagtaacaattgtatacccagttttggttcctctttgagttttaatatgatcaaataagataaattgaaaatcccttttactatttgtaggtactatagatactctgtctacttctatttttgtatcaaatgagtttgatattctcttaatctcgctaattattaggctgtcgtcattaactatatttttatcatactttaatattgatacggcctttttggttttcaggtcttcgtgtctgaactcttcgtctattttgtaaattcttctaattatttctacatcttttttttctggatactggaaatagctatagtgatttggtattattcttaaattacttcttttgaattcatctgcaataccatcaaatttttcatagtttaactcgttataacaatcaggtaaccatctaagtggatcaaagcccaaattattatattctgaaaataattcccatttttctaaactcagaccctactttcaccacgagttctgtttactatgataacctccctaataaactagatgtctttgaaacgtcatcttttttttagatgatatcaaataatacgagataatattatatgacttatacttgcaattaagaatatgtccatcaccgatgataagaaaattgaatttatgaaactttattctgcaaatccagctaagtatgaagcagaaactgcaaaagatatcttatctttgtcaatcaagaccttttctccaaaaatagcttttgcatccagttttggtgcagaagacatggtaataattgatttgatatataatattcatggtgacaatgctcgagtttttactttggatacaggtagacttaatccagaaacttatgatgtaatggacaaaataagaaaaaagtactctatatctattgaaactatgtttccagactttatggaagtagagaaaatggtgacagaaaatggagtaaatctaatgtacaacagcgttcaagaaaggaaattgtgttgtgaaatccgtaaagtccatcctttaagaagaatgttaaaggatctggatgcttggataaccggattaagacgtgagcagacttttactagatctagtgcaaaaaaagttgaaattgatgaatcaaataacaacattatcaaaattaatccaatcgtagactggactaatgacatggtttggaattacataaaaaagtataacataccatataataaattacacgataagggatatccaagtataggttgtgccccatgcacacgtgcaatagcagcaggtgaagacctaagagctggtagatggtggtgggaaaatgatttacataaagaatgcgggctacattggaataagagttaagtgaaggatcagcccttacgaattaagataaggcgtataaaaaaaagaaagaaataacctttattatttcatagaaggatgcctagaccacatggtggtagtttaacaaataattttatagatctatctaaaattgacaaagatttatttacagtagatgtggataccggattaaaaaaagaaatagaaaatatttcatttggagtatttagtccattaaaaggatttatggatgaagaagattttactagcgtagtaaaaaaggggagactagccaacgatttaccttggacgatacctatcattttagatgccaacgaagagttagcaaaaaaagtaaaagattcgtcacaaattgctttacgtaacaacggtcaaatttttggagtaatgctgataggagacttgtataaatttgataaaactgaaagcgctaaatccgtttttcaaactgacgatccatcccatcccggattcaacaaatttgttactatgcaagatatacttattgcaggagaggttaaaatagtcaatacccaacccaacaataaatttgtagacaaatttcgcttaactcctgcagaatctcgaaaagaaattgaagatcaaggttggaggagtgcagtcgcatttcaaacacgaaatgttccacatgtggctcatgaaatgttacaaaaagctgcattgaacatttacgatggcttatttataaatcctttaataggtaaaaaaaagattggagattttaaagacgatgtaatagtgaattcctatacagttttaatagataattattatcccaaatctagaatcattttttctaccttacataccgagatgaaatatgccgggccaagggaagctattcatcatgcaattatgcgtcaaaattttggatgctctcatataataataggcagagatcatgccggtgtaggtaattattattcgccatttgcagctcacgatatttttaaagattatccagaacttgaaattgagcctatcttttttccagctttttatttctgcaaaaaatgtcaatgctatgttaacgaacgcacctgtcctcacgatttgagctttagagaagaattaagtggaactaaaatgcgaaaaatgttttcctccggtgaattaccaccttctcatctaatgagacctgaaatttctaaagtaatattgtcatattccagaccatttgtagattgatttatttgtaaaatttacaaatatataatcgcattatgaagaattagtatgataattaattataaattttcgacttataatttatcatattaccacattttattagttcttggtttaaatattgttatggtaactgttctttttcagaatccctccttctctcaattaactaatggttctcaagatttacaaacaaccaaaaccaatgtctcagaaagttttgttttgccttttaataatactaataatgataggcgtaatcctgttgaatatatttttgatgagccaaaggtaaataattggcttatcactataaacaacaatctcagctactataatagtaatgattctaaaaccatcgtaagaattaaggaggcacctcctagtgagaaatttatcgaattgatgatgtttggtgatcagtcaaagaggttcatagtatctgtgaatacaaatgaaactggatatatgcgaatgtatgaaaacgatcaaaacggttggtctacggacggtctggtgaccatctctcacgcaaatgtccaaggattgtctgtcactaacggacaaagagtagtattagataaacttggattaagtggattcgatgttggatctatagttgtttatggaaaagatgaaccttcgatgccaaattctacatttgcaggttctatccaattcgaagttctcagtggcaatctgtccgaatctattctttactacatgccattagtaatggtagtaggtgtaggtggaattgtgatatttctattgatttggaagaagcgaaattaaagttatcaatatatatagataaccaaatacaagcaaagaactttcttaggcctttttgcttggttttatattttcttcactttctttataatatttacaaatatgtcttaaattacagtaattacattttggttttagcggcaggcaaatattttggccatatctcacaaatacagaatttagcctaatccaatgttttttggcaactgacatatacaactcttcttctgtttcttctggactttttgtatttactattcctagtctattgcaaattctatgcacatgagtatctacaggtatagcagatttttggaaggcatacactagtacgcaatttgcagtttttcttcctactcctggtagtttcaacagttcttctgcattatctggtacttgtccatgaaatttactttctataatatttgcaacttcttttattctacttgccttaatattgtaaaaaccgacggatgatatctcctctttaatatcgtctatattcgctttagaaatctcttttactcctttgtatttattaaatagttttataagtgcatgtgtagtattctcgtctcttgttctagatgaaagtatagtaccaatcaaaattttgaagggatcacctttttcatttttatgcaaatcctccaaagcagttaatctcaaaaagtggttggtgtttagagcaaattccatttcaccaagtatttttgagatgtcatacattacaataaattttttgatttcttaatttattgtctccttttaactcttgctcttcctgtcttcctgggtgcaatattacctactttggcaccaggcggggtgttccttgcaacagatgatggatgacctatgtgttgatgtcttcctccaccatgtgggtgataaactgctgcttgagcaattcctcttactactggatataatcttcctctggattgcataaattttgctttattacctgctttaaggaacggtttttctgattttccacctcctgcaacaattccaatcattgcacgacatttaggattcatatctaggatcattcccgatggaaacttcacctttacactatctacagaatgtgaaaaaactatagctgatgatcctgctgcctttatcaattttccaccgtcaccaatgtttttttcaatattgcaaacaagtgttccatctggtatagatcctaagtctagaatatttttagacaaaggttgtgctccgtttcctatctcaattttgcttccgactgttgtgccttctggtgccggaatatatgaataattattgtcatcaaatttaattttagcaactggtgcatctcttcctctttcatgtaccaaatccattacaatgccatgatgaacttcattaatctcaaaattaggatatttagtgggagctatttttccagttatgattgctctaaattgttttcctcctttccctcttcttcttactaatgtcctctttcccaattaaatctaatttattgttctaaaaagcccgctattaaatttactcttgatatttttagaaattttgatagtatgacataatttctattataatggaatcagacacattaatttgaaatttcctaactaaagatatctaagaaattagcctagtagttgataataaagttataaagagttgcgtcgttatataattatgagccaaaacaccatatcactaaaagtgcttgaagcttatacacgagatgttggccgtggtgttgctagaattgattatgattctatggatgctttaagcgcgtctacaggtgatgtcgtggaaattagaggtaaacgtaaaacagttgcaaaatgcttacctctatatccttcggacgaaggtaagggtataatcagagttgatggtctggttaggaataatgcgggtgtagctattggagacactgtaattgttagaaagattaaagctgttcctgcagaaaaagtcattgttgcaccattagaagctattcctccaattgatgaacgatatttagctgatgctcttgaaagtgtaccattaatcaaaggtgacaatgtgatggtaccatattttggcggtagacttacatttcaagtcattggtgtcacacctggccccggtgttgatgccgttttagttactcaaaaaactgtatttcatatagctgaacgtggagaaactctccgtggagtaccacaagtaacatacgaagatattggtggcttaaaagaagaagcccaaaaagttcgtgaaatgatagaactgccattacgacatcccgaaatatttgaaaaactgggtatagaggcaccaaagggagtgttgttgtatggacctccaggtaccggtaaaaccttgttggcaaaagcagtggccaatgagagtaatgcacatttcgtaagtatctctggtccagaaataatgagcaaattctacggtgaatctgaagcaagactgcgtgagatatttaaagaaaccaaggaaaaggctccttctataatgttcattgatgaaatagactctataactccaaagagagaagaagtaacgggagaagttgaacgaagagttgtatctcagttattatctttgatggatggattagaagcaagaggtaaagttatagttattgctgccacaaatagacccaatgctatcgatccagctctaagaagacctggtcgatttgaccgggagattgaaatcaaagtccctgataagcgtggtagattggaaattctacaaattcatacaagaaatatgcctttagaatcagatgtaaatcaagaaaagatagcatctgtaagtcatggttttgttggtgcagatttggaatatctctgtaaggaagctgcaatgaaatgtcttcgacgattgttacccgaacttaacttggaagatgagaaaataaatcctgaagtattgaataaattgattgttaccatgtctgactttgaaaatgcccttaaagaagtaatgccttctgccatgagagaagtttatctagaatctcctgatgttgagtggaatgatataggtggattagatgaagttaaacgagaactacaagaagcagtggaatggccattaaggtatcctgacctttataccaaactgggtcactctaatcccaaaggaatcctgatgcacggtccatctggtaccggaaaaacaatgcttgccaaggcagttgctacagaatccgaagccaatttcatcagtgtgaaaggaccagaattattgtcaaaatgggttggcgagtctgaaagaggggttcgggaaattttccgacgtgcaagacaggccgcaccatgtgttgttttctttgatgaaatagattctattgcaccggtaagaggactgggtggcgatagcatggtaactgaaagagtcgtttcgcaactattaaccgaattagatggaattcaacaattaaacagtgtagttattattgccgcaactaatcgatcggacatgatcgatcctgcattgttgagacccggtaggtttgacaagatagtatatgtgcctttacctgataagactacaagaaagaaaatattggagattcattcattagaaaaacctatttctgacatcgttgattttgatagaatcgctgaacttactgatggatttagcggagctgatgtatctgcagttgcaaatacggcggtttcacttgtgttacatgagtatcttcaaaaatatagtaatcctgaagacgctgcaaaacacgcaacggaggcacatgttactatgaagcatttcgaagatgctgttaaaaagataaaaactcagagagatagcaagtctggtgaaaaacttacagtaccttattataggtaatttttctattttctcccatttttcaatttctttattacttgaaaaaaatcttattcttatattttttatcaatatagcataaaaattattataaattatttaatataattattaaaatagaaataatttttaggggcaatgtttttaagtataatctctttgaataactttcacaaaaggaatggttgaaaatgtactgcagattattcaaaacaaagtaacgttatctaagataaatcgtttttttacagacgaagaaattagccagttggttgaaaaatatgggactcctttatatctagtaaacgaagaggctctgcataataaagttttagaacttaacagagcttatgaaaaatttcatggtcaggtaaagattgcttattcaattaaagctaattttaatccatctattcttagaacattcatgaaagaccgtattacttttgattctacctctcttggtgaattgttttttataagggaattaaacattagtcctgaaaatattatctacacaagtgtaacagaagaactagatgagtataaacaggtcctttcttatggaattacgagaattgtcgttagttcctactttggattagttaatttgtctcaagctgctaacattattggcattattcctaaagtaatggtacgtataaatcctgaagtaggtgttaaagccgaggtgcgggcatcttacaaaaatggaaaatttggagttcctttaaacggtgggaaagttgattcagcttattttattgctaaatcgatttttgataatcccttattggagtttgaaggttttcattttcatctgggatcccaaattacagactttgtgtgttatgttaatgctctagacaggttaaattctttattaaataaactaaaaaaagatatccccaacttttcactgaaaacactagatattggtggggggactcctgtattttataacgagcccgttcctaccccaagtgaaatgtcatctgtatatatagaaaaactaaataatctagtatcctctcatggtaaatttatactaatgatagaaagcggtagatacctagttgcagaatcgtctataatggtttcaaaaattgtcaatactaaagaatacaatgatcataaaatagttgttttagatacgggataccatctattgttagatgctgctttactcaaacaagaatatcctcagcaagtgatatcaaacaaaaacaataataatcatctttatttttcaaattctaacaaacagtatctggagaagaatattcatcttgtgggaaggttgtgtgatactttggacgtttttcctacctccaaactattcggcctgtcatatgcgaacattggagattatattttgttttataatgtgggtgcctattctctagtgtttaatatgccctttcattgtcaaactaaacctccagttctgatgaaaacttgtgagggtgatataaaattgataagaaaaggtacctcttataaggatctttatgaagaagaaggaggcttaattctataactttaattagtatgattcagatataatgtggttttgacttgatgaattatactagagtccatatttttgtaagtggaaaggtacagggtgtatattatcgtcaaaatactgcacaaaaggcacaggagctaggcattgttggttgggttagaaatttgtcagatggacgggtagaatctgtaatggagggtgtggatgttaatattgataaaatgcttagttggtgtaagtcgggacctaaagatgctctggtgacagatatcaaaattatgaatgaggactataagaaggagttttctacttttgatatcattaaaacactttaaatgttaaagtgtttccctgacaagtaatacactttaaattctagaatattgttactgctttatttttacaatattaactcttaatgctatggtcttactaatatattatttttctctaggtattttttaacctcttttagctttgccttattaaaatggaacagagatgctgccaatgctgcatcgacctctgtttttttatatacttttaatatatcatcaaccgatccgcatcctcctgaagctataacaggaatatttattttatcgcaaatcgaattaattaattcaatatcgtatccattttctgtcccgtctgtatctatgcttgtcaaaagtatttctcctgcccccatcttttcaacttttttagcccattcgattgcatcaattcctgtagattttttcccaccgaaaatcttaatttcaaaccaatatttttttccatccttgaaaaaaaaattttttccaccttgatcatagtttctttttacatctaaggccactactatacactgttttccgaaaatacacatcaattcttgaatcaatttcggctctactactgctgcggtatttattgaaaccctgtctgcaccactcaggagcagatcacgtgcatcttctaatgtctttataccgccccctactgtaaatggtatgtttattacacttgctacattttttacaatatctttcattgttttacgatgttcctcagcagcagtaatatctaaaaatattaattcatcggcgccttcgtcgctatattgtttggctaatttgacaggatctccggcatctttcagctccttaaagttaataccttttacaactctacctttgtttacatccagacagggaatgattctttttgccactgccatattaaatcaattcttgaacatgttttattttcaatttctcgtcatacagtgctttacctaagattactgcataacaattaacgttccttaactttaatatatctatgatattgctgactcctccgctagaaactatttttatatctttaaaggtattatttattttgattaatgtttctatatctggaccttctaaagtgccatctttgtcaatatttgtcaacaagaactcattaatacccagctctttgtaaaacctgatcgcatcaaataattttatacctgaaaattccttccatccagagatcattacgttttctttattatgatctacagaaattataatccgatttagtcttttctttgatatcttttgtattatttcgggctgtttgaaagcaaatgttcctattacaacctttatcggcttttttatatctaagaatctatttatactattaatcgttcggataccgcctgcaacctgtactggaatatttaccgaatcaatgatcttttgtattatttcgctattgctctttcctgtattcaatgctgcatttagatcaactatgtgtaacatgtcaaccccttctaattcccatttttttgctatttctaatggattgtcatcgtacacggtcttattttctaatttaccattaaccaatctgactacttggccatctaatagatcgattgctgcgatgcttttcattttgatcgtttacaaatatttataaagtttttaatcattttttcgccaattgtacttgatttttctggatgaaactgtgtacaataaatactgttaatttctattgaggcaggaatgtgtactccgtaattcgatcttgatgttattatgtcgctattcttaggtgtagtataataagaatgtacaaagtagacccaagattgattcggtactccttcaaatagtttactttttttatctgtgatctccaaactattccaacctatatgagggatttttaccaagtttttgggaagggataacacttctccttcaattatgtccagtcctgctaattttccctcttcgcttttctcaaataacatctccattcccaagcatattcccaacactggaatatttttttccataaattgtgagaatccagttttacatttgtttatagaaataattgctggatcaaaatttccaacaccaggcaatactattccatctacttctgttgattcttcaaaatcatttataattgatacttgtgctccgtttctttgcaaggatgattgaagactaaaaatatttccggctccatagtcaaaaattgctattttcaccatatactacatcattcctttggtagtaggacctccttcactatctggatcgatcccgatggcattccttaatgcaacggcggtagcttttatggccgactcgattttatggtgatcatttgttccataatgtactataatatgcatacaacaattaatatttccaataaatgattgaaagaaatgaataatatcttcttgtgaaatactttcaatcttttccctttctaatttcatgtcgatgtgactatattgtctctttattagatctacagcgacgctcgaaacggattcatccattggaactgtggcatttccgaaacgattaatgctctctctcttgtctagggccttattgatagcttgacctaatatgatgcctgtatcttctattagatgatgcttaataccatcctcacttttagctttcaaatcaatgtcaatcctactgtgtttcgaaaaagatactacaatatgatctaaaaaatcaattcctgtattaacgtttgaatttccttttccgtctaaattaattttagtcacgatatttacttccttcgtccttctttccatttcacacgtacgttgatgatcctctataatcactatgtgcttttaattttttgtattatttaatatatttggtaaatcgtttacattcttaatgattacatctgcatgatttgattttagtagccttttcttatcaattgattccttgctatttccaccatcaccatatactccacaaaaaaatattctatcctcaattgtttgcttcctaaaattttctaccattagaagatctgccatggagtctccgacatacagtgcactacttaattttaaactatcaaatactttgtggagggaaaatgcatgaggtttggaaaattccctcttttcgtcctctaaaaatacacacgcattttcattaaagtaatctatgatactgtttagagtgaaataagaagcaaccttgctccgtccggatatcaatcccaaatttccattaaatttctgtgaaaggagacgcatagtattctcctttattattagaatatcattagttattagtggcttgtcaaaataatatattggctccttattgaaccgctttttatataaaattggaccataaaagatttcattaaaaagagtagaaatcatatcgtcattgctaggatattttaatttttttgttatgggtgttatatttccgaacttctcgagctctttttctacagaatctttgcctttgtcatctaatttctccaataaattatgaaaaatttgaactgtcttgtctatattcattttatttattacaatacaatatagaattattagcactattgaataagccgtatcaatatcattattaaatccgccagtatctcgaagttttgaaatcaactcctgaaaaggaaaattatttaaacttatgtcaaaattcttgaccaaaataagctcgactgtttttattattgcttcattataggatttgtttacatcaactaatactccatctatatcaaagataatcgcttcacattctgaaatattgattttcttattagtcaactttatagatatagataatcacgattcaataattaatatcctgttattccctagtatgtcctatgtatgccaactaatcgaccatagtatattgatatagaataatcaacgatacaagttatataatacattcttctatattattgtgtgaaatatcggaataggaccgaaataatttctaatatcttaaatgccgctaatggaggcatttcaaaaactaagataatgtacaaggcatttctatcatatgctcaaataaaggaatatttgcctatactattagaaaataatctgttggctcttggtaccgatggcaaatacagaactactgaaaagggtattagattcttaaaaatgaatgaggaaattcaagaattaatcgaatcaaaatcacttcaggatgattttacctaaatatcatttattctgatattaataatttcacaaaaataatagtatagtatttaataaaatggggactttagcttatcaaaaaccattttttcagcttaaatataaaaaacaatatattgttatggtaagaaatagaaaaggaattacgcaatgctagttgttaaaatttttcatctaggaatcttgtttaccatttttatctttattattcatattgattctgtttatggtacggttgatgccaaaaatagcagtagttcttcaaccggtaataacacctcatcactagaatctgataactatgctattaaagtgggagaaggaaataatactgtatccgttacaaagtatttccctgcttatgtagaaataactgccggagatagcataacgtggtataatggagtcgacgttccaaatcctcatactgttacctttataagggatttagataatatcgaaaagattggagtacccttctacgtttctaataatacaaaatttgtccctgtactaaataatctgggcgaaccattagaagaaaatactagcaatggaacacggattgttatgatgttaaatgcccgagcattaactcctactgtgattacatcggatgataaagtaatggaactaaaaaaagattccgtatatgtttataacgaaaatgacaaatttattaactctggaccattgctatctttagataaagaacagaactttgattattcttttagcagctccttcactgttgtttttaataaacctggattttttgaatatacctgtctatttcatccatggatgatcggaaagttattagtgaaaccatgagtagctatatactttcttaaaatttacctctcatgatctaactatatattttctaacctttttcatacttctataaatgacacgaaatactgatctcggtcccaatgatagctctgataaaagctatagtagaaattctcaacaatttttaaacaaatttaaagttaatgtaggtgatgaggtaaaaatagttactaaaaaagcagaattttttggcattattctacctcgatatgaaacctttagcgacaaatatatcgttttaaaattaaaaagcggttacaatattggaattgaaatagaaaatattttagaaattattaataaaaatgttgatagcttatcaagaaaaaatatagtaaaatcagatctcggtaataatgccaattctaactatgagaaatatgaccataatttattcgataaaatgaaaggttctaaattattgccaaaaatattgctaattagtacaggtggcacaattgcaagtaaaattgattacagaacaggtggcgtaacttcacttttgactgcatcagaattgtattctgcttttccagaactttctgactatggatacatttatcctgaattcttattcaatgaatatagtgaaaacatgaatcctcatcattggtctgctctagctgataggatatcatatgccatcaagaatgaacaatatgatggaattattatatctcacggtacggatactatgcattatacttcctctgcattaagcttcgctctccagaatatcccaattcctgtggttttggttggttctcagcgatcatctgatagaccatcttcagatgcattcagtaatctggttggtgcaataagatttatcaaggatgcaaaatattcaggcatttttgtttgtatgcaccataatacttcagatgaagtgattgcgtgtcatcttggtacccgagtaagaaaaaatcatacaagcaaacgtgatgcatttaaatcgcttgatggtatgccttttgccttaattgagaattcaaacataaaatacaacaagttattacacaatggagtagaaagtgcgaatatttcaaaaaattttacttcaaggacagcttttaacgatagagtgtttctattgaaattctatcctgggtttagttcttcatttcttgagaactttttacagatggattataaagtcatcatattggaaggaactgggcttggacatgtaagtaaagactgctttcctattttaaaaaaactaataaattcaggcatttttgtttttatgacttcgcaatgtatatttggtaaggtacagatgactgtttacgacacaggcagagaccttgtggatctgggtgttatcccactttcaaatatgagttcagagacagctgttgttaaagcaatgtgggcattaggcaataatacagatgctgaggattttgttaggatgatgaaaactgaatattctaatgaaatttctaacatgttgccactagtttaataggtttaaagaggacaagtttgatgaatctagatatcgacaaattaaacgtaaaggttggctttgaaatacatcaacaactaagtacatcatctaaactcttttgttgttgtaaaggcgatggatccaacgatggaggttatgattttaactttatacgagttttgagacctacaaaaagtgaattaggtgattttgataaagctgcattatttgaacacgccaaaatgaattcaattaagtattattctaaagtaggatatagctgtttagtcgaagctgacgaggagcccccacatgaagtaagcaaagatgcacttgaaacagcattattgttttcacttgccctaaattcaaatattgttgatgaaattcatgtcatgaggaaattagttatagacggctctaatgtcagtggatttcaaagaactatgctgatatcgactggaggttacttagaagtcgataatttcaacaagataggtgttcagggtatatgtttagaagaggatgcagcaaaattaatttctaccaatcctctattaaaggaatatggactagatcgactggggattccactggttgaaatcgcacttgatcctatatctgggactcctgcagaaattgtaaacgtcgcattaactctcggtagactactacgaagtagtaaaagagtcacgagaggtattggaagtataagacaggatgtaaatatatctgtcaatggtggtcaagtagtcgaagtcaaaggggtacaacaattatcacaacttatcaaagtattagactatgaaacaaaaagacagtacggattaatcaaaatttcggaagaatttaagaatagaaatatagatgattcatatatcggcgataaaattgaagacattacatccttgttctccaattcgtcagctaaggtcataaataaaattttaaaagatccggatccagtcattaattgtatccgtttgaggggtctaagaggactgattggctacgaacctacgaaagatgtaagaatgggtaaagagttgggagagtttgttagattttttggattgggtggtgtctttcattccgatgaattacctaattatggaattactatcaacgagatagatagccttaagaaatctgttgatatttgttctgacgatgcctttataataataggtggtaacagggaaaaaataaacaatcttcttgaaccattaattaaaaggataattcaatttaaatatggtgtaatcgctgaaactcgttctgttactttagaaggaactactattttttcacgacccagaccaggttcttccagaatgtatcctgaaaccgatataatgccaattcctgttgataataccttacttgatagtttgaaagataaaatacctttgccgtggaatgaattaatcaaaggaattatgaaaaagtatcaattaaataagaaattatctgaacaaatctttgattctgattattataatttatttgagagactattgaattccaatcccgctatttcacctaccttcgttgcatcaaaacttactgaagatattgttagtctctcaagaaataatcttgataaggatctcttgacagacgaaatgattctagacattttcaataggcttgataagggacttattgcaaaagagtctataatattaatttttgaaaaattaatgaaaaaagattgcatgtcggtagaggatgcaataaattctctcaacctaactaaattagatgatacagacttattttctacattggataaattgtttgatgataatttgagcatcataagagagaaaggagccaattccatgggggtattgatggggaaaagtatggcagtactaaggggaaaagtagacggcagtaaaattaatgactacttaaaacacaaattagaaacatttcttaatgaaggatcatcctcttcatcatcctcttcttaacatgactcgcgtacctaaatcaatcaagaaccattatatcgattcatttatcataaattcagaaaacttgaagtcatttctctcctctcacgagatttcaaaccctgaactggaggatgtgtcaattacaatttccaaactatatgatcaaaaggttgatgatattttagcctcgtgtgggaatgattggactaggctcgattctgcttcttctcctttaattttgttcattcaatgcattgatgaattactctctgcaaataacttgaatattacatcgcgatgtagatttattctaaattcattctcaaaaacgttagaatcttggatgaactggtagttcctatttggcaatttaactttatttacttttataattctaagtgagaataatattatcagtaattattgcttattctaaaaaaaatgtttagtgtgcgtgaggcggtggtgcactaccttttgataattcttcgttaaatgttcctgatgctttttcgtggaattctaatgcggcttgatctaccttaattgcttgaggcggacatactgacacgcatgccatacaccagatacaatcatgttctcggattggatctgctttatctgtgtagtcttttctttcttctttaactgaagaaccagtaccttcaaatacttgatttattgcctcttttgctggtacatcatgttcagttctgtaccactgaaaaacttgtacaggacatgcttcgatgcatgctccatctgctacacatgagtcccagtctacagctaccatagttccacttacacccaaaggccctatttcttctccttttgcttggaatgcttctttaacttctggattctctgctgcctcttttagtgaacctggaccccataaatagtgaaaatgttcatcgtctgaagtttttatctttccaattacctgatgattgtttggaaaatctggatcgattggcatattttttgcagagatacttgatccttctaaatatataaatcatgtgtagaaatatctataagaggcaagatatttccagtaatttttcacaattcctctgatctgactaactgacttattctttcatattcaccaattgaatatattgatatgccgaggtttcattatcaaaagcataatgtaccttttgaaagttctttttgaactctgtcacattttgcaaaatcttaacattatcttgtttgtcaattacaacttttttaataaaggttgctatttcctgcatttcgttttccttcattcctagtctggtcacttcaggtactcctattctaatgccgcttggatgaaagtaatttcttccctcttttatatctccaggaagtaattgtctgttaaggattatattgcatttttccagatccttttctattgttccaccgtcgccataatttgagacatcgacggctagttgatgtgattctgtataaccccttttttcccctagaacattaaatccatgatttgcaagggaatacgcaagcatttttgcatttttgatgacttgtttggcatattcctctccaaattctaatgattcagctaatgctaccgccttgcccgcaacatgatgcaagtgatgactacttgtatttcctgggaaaattgccttctttatagaatccgaatatttttcaactgatactataatgcctccctggggtccccataatgtcttatgggagctcattgtcattgaatcagcgccttctcgcaacgggtcttgaaattgtccaccggcgattagacctgctacgtgagctccatcataatttatatacacatttcgatcatgcaagaattctgataattcctttacagggtgtggaaacaaaaaaagactaccaccaaacatggctatttttggtccttttccttcgtcaatcatagtgtctatttttttcttggtcagctcaacatcgatggtcatgttttcttttgaaaaaggaaagtgttcaattactaatccgtgaaccaagccggccgttcctgagtgttccttttttccgtgtgaaatatgtccaccagtaggaattgatgaggctatcatagtgtctcccggatttgagaatgcagaatatattgctaaatttgcaacgactcctgatgttgccctacaatctgcaaattctgctttaaataccgatcttgctaaatcattacagatattttcaaccttgtctataaaagtgcaacctgcatacactctttctccaggccaaccctctgcgtacctatttccgaaatcagaagctacggcttctctgacggctggactggggatgttttcacttgctatgagaggaatggagttattgaaccactcatgatgctctttaattaattttaaaatattatcctgaatttcttttgcattcaatatcattttttgaaataattacttatataaaatatcgtaattcagcaaaatagtactattttagtgatgattttttagtcatttataacaataattttatactacatgtattttatttactcatgcagaaggttaaacagatggaaggatattgtgttaaatgcaaagcaaaacgagaaatgaaagatgaaaaacaggtaactatgaaaaatggaagacctgctactcaaggtatatgtactgtgtgtaatacgaaaatgttcaagataggaggaagtaagaaataataaaaagtagccaagtttgcaataaattcgtcgatttatatcgatatttctatatttatcttattttgatttgttttgttatccacaacttgattgatttcaacgtcagtattattgagaatgcgctgacttttgtatagatgaattaaattatatacagtgaaaatagaaattctgtcattatatatttatttagtgacctgaaaaactaattaatatttttataggtgtcattattttatgatattgcagtaatgatgacaaccttctagctctgaactgttgtattttaattaatggctattatatataggaatttatgaaaggatcagacagagaatttgaaagacctgattgggatgtttattttatgatacaagcttttttggccaagctacaatccaactgccttaccaggcaaattggagctgtaatagttaagaataatagacaaatatcaacaggttacaacggtactccatctggatttccaaattgctttgagggtggatgtaaaagatgtacagatagaattaatggtattgttaaatcaggtgaatctttggaaaggtgtatttgtgtacatgcggaagccaatgcaataatgcaatgtgttatgtttggaaatgccggtagtactaaaaatgctactctgtactccactctggctccatgtatagaatgtagcaagatggctattacagttggaatcaataaagtggtcattttgtctaaatatgacgaggacggaacagagattttgagacatggaaatgtacaaatattagaaatggattcgtctaaattacaaatttggacctcaaagctatttggatgatgaatgcttagaagtacatacaatttctatttaatcgaacctggctatcctaaaatctcgttaaataacgcaggtataaaattaattataattagctaaaaaacaaacaaacaaaaatcaaatcaaaaaacaaactagaccaaattaaaactaaaactgataaaacaaactgattctaaaactgattctaaaactaaaaataaaaaagattaaggaactgatctgctgtagagttttccttctaatgctagtttgtacatttctgctacataggggtttcttgcaggagtttccgcgccaagttccaccaaacgtgcgtataccctaactacataggccaaagcacccatgaaagctactactacacccatgttaaacatccagtggttaggtactgaaaatatttcttcaacaaaccaaaagtgccacatttcattgataccaatagtgaacatggtagctaaataaccgataatggttatctttagaccagtattcattgaattgtttggtcctcttaaaactggtactctcctgtcatacattgcaacaaatccccaacctagtgggagtgcaataaagtgactgtataaccaccaatgagctggtgtaaatgcactgtctctgatagctgtttgatgtaatgatccgtcaacaaagttgtctacttctactgatgcagcaatagaccctagcataatgaccatcaaatatatcttttttagcctttggatttctacttcctttggaattaatgcaggcatttgtgccattttactatcactgtatcttcactgattaaatatataagatgtgaactaaaatatttggaaataattctagcaattaatataacattattaaattattagactattagtcaattaattaactaaattttacacattttattagttttatcaagcttatcatctttgattatcatggatgataaaataatccaaactataaataattaattgttttaaaatacttggtgaaaccattcatcttctttgaccttgggcaaactctcattgatgaatggaactacgttacttattttgataaactattattccagacacttaatgactatggagctaggatagatcaaagaaactattatacgttgagaaatgatttagttcgaaacagaaaatttggctcatcaggatttctggaaattatttctttaatggtgcgtcttatacttcctcaagggtatgattctgtaattttcaatgttctaaagactgatttgctagaaaataaaagaaaactagtcagactatttagtcaggttaactacctgatcccattattatcaaagaaatattcgttaggtattattagcaacaattcatccggttcggcaaatttattgcataaacacgatctagacaagcactttaaaatagtatgtttggcagaagatattggatttaaaaagccccattataaaatatttcaaaaggcgttacttgactctaattcaactgttgacaattgcataatggtaggagataggttggatatcgacattttacctgccaatgagcttggaatgaagactataagaacaatggactctttatacaaaattcaagagcctgtgaataagaaggagacgccactttttactataaactccctttctgaattacctaaagtattatcccatatatcttaacttctttgtatttccttggatattttttcccattgttcgtccaaattactttctcgagtgtctcccttaccaaaaagggaatggattgaaatcttttcatttgattctgcaattggaataacatgaatatggaaatgcggaatttcttgccccgcatcctttccgttatgtatacctactagtgaagaattacagttcattgatttttctattttttcagtcaagaaatgcaatacatcaaaaatgtccttattttctatcaaactcaaatcttggattttgggtatatgtgatttggaaattacaagcgaatgtccatccttgagaggaaatgcatctagaattgctattgagtgttcagtttcatataactttctcgctttgatatttccattaattatttcacaaaacacacacttgtttgtcgaattcatattcttattttgtgcaactgttcaataaaggattatgatcaatatatttatcaagattaataaaattggattgaaaaagtaacctatgggaaaaactatagttcatgaaagaccattaattacaattatgatgaatgagaatattgcaaaagtactaagcgatcaccacagactaaaaattttagattttctttatcacaggaacctctcgactaaggatttatttgatttattaagaagagctaaatttagcattgccatgactactttgagacatcacataaccatattgaaaaaaaatggtttgattagtgtctataaaacacaagaggttaaaggaactttggtaaaatattataaggctaatgtaaagatgttgacttatgaaaactttccatttgtttcctttgtaagagataataaggaaattattgatctgctatatccaaaattctataaagtaattaagaaaatcatgataaatgaaaaaaattttatgacaactatttcatccgaatcaaaatctaaatgcagaatttgcaaaacttttcactatgctgaatttttgatttttatgattctgaatatgataataacgaaagttttacgaaagttaatgaaaagtaggaccaatggtgagacgtagttgatattaatgacaaaaatatagtatatctctgatattctctatttcaattcctcaccatatgctctcttgcggctttaatataggtaagaaatcggtagttattatttacaggcacaaaaaaggtctaaaggtggcatggtttacaatgtctatatgcctacaataggcttgatattacttaatcataaatgcgtttacaaacacaagtaaatatgtgactctagttcttaaccactttttgactatccgacataagaaaatttgaattcaatctgtgacgtcgaatcagtgtttataaacactaatagatatattttaaaataccaataagtccatattttatttatgtcgcctttacttcagctcaagaaagtgaacaaaacctttccaattcataggaatattttccaccttttttcttcatcaaatccaatcataaaagcaattgacaatgtatcttttgatttggggcagggcgaagtactggtgatagccggtgaatctggttctggaaaaactactctcgctaaactaataatgggttcattaatcccagacgacggtactatatcctttgaagggaatgacgttcactctctaaaaaaaaagaaggcgttttactcgatgatccaaatgatccatcaggatccttatagctcactaaacccccacatgaaaataaaagacatagtcatggagccattaaaaattcatgagaataaattaagtcgtaacgaaaaagatgagaaagtacggcttgcgctacgtagaacaagacttgaaccagttgaagagattttagagaaatatccaacgatgctttcaggcggtcaaagacaacgtgtttcaattgcaagagctattgtaaaaattccaaaattaataatagccgatgagcctgtttcgatgttagacatttctgttagagctgaaattttgtcattattaaatgagttaagaaagactctgaatatttctattatttatattacacacgatttagcaacatcacgattcattggtgataagattggaattatgtttgctggcagcatcgtcgaatatggagaaattgatgaagtgctacataatccgcttcatccatatacttggatgttacttgatgcagttaccttttcaaccaaggaatctaaattctataaaagcttcggtggaataaatttatctgaattacccttaaaggggtgtaaattttatgataggtgtaaattgtcttttatggattgtaccaatgatatagaacaatttgatattagtaaaagacatgctgtttcttgtttctattatagaaatctaaacctaaatgatactattaattaaaattcaatctatctatagtataatcatactatgtcactctacttataatttgaccttacttggatgattatactttaccacttgagatattccattctttggataaaccccaaatattaaatctgattttgctactgtagaatctttgagtgttaccattattatttgattgttgacagatctaagtaatagtattcttgatagtctgtcggtattttgggcatcaagatgggcgtctacttcatccattaaatagaatggagatggttttagcgattgtaatgctaggaggaatactattgccgccattgttttttcacctccagacaaggatgtggattccctggctggcttgttaggaaactgtaccattaataagataccgccggaaaaaatattatctggatcctccagttccaaatatgcattacctccggtaatatctgagaatgtttttctaatgtcatcatccaccttcttatatgcatcagtgaatagtttttctttttctttacctatttcttctataaagttcacaatagaatttctctcttcttcaagatggtttcttttatctgataaacctctgtatccttctattatttctaaataagtttcatctgctctaaaatttactttatctctgatattttcatactcttcctttaattcgcgatataagttgtctacatcaaaactttccagcaaggatttgtgacctaatctggcaagatcgttagtttgattcattttttgatattccagatctagaatgtcttttttcaaaaaaccaatatctttttctaattgattcacttctttatcaagcttcctttccagttcgtttaactttttgatctccatttcatactcttgtaattttgagtaagtagtgcttgttgcttgaattatttcatcttctttttccctgagagttcttagttctgattctgtatcttttatctctgatatggctttttctagaatcctatttctctcaatcttttctatcttgaattgttcatattcttgtatcgatttattatatgctcgagtggtattttctatatcattctttaccatcgaatttgttaatttcaattgatttagtctgttgtttataatatctagttcaccatcgattttccgtccgtcttcttcaattttcattatcttttgcatgtcgattctctcatccgtattttttatttcaacgtcaattctactattagtactagtaataattttgaacctccttttagaatagttaaaattgcgaaaaaggtcgtctaggtgcatactatgttcctcgtttatagtatatagtatacttaaatttttattattttctaccaaaagattttccaactcattgacgttttgtatgatattggacctttctaaagtaaatgtatctaattttccttccaagggtgttctctcattatttagaatatcaagttccgaaattcttattcttgttaactcttgtaattttcctatattgatccttagattttcaattgaatcagatagaagtaaatcctttgtaacatctgcaatctttgatccataatcaaattgcattaacgacaagtttgggaaaaaaatttctccactcgttgatacggctttaaaaccattaatggataataaatatgctgtcaatggattcttcgtaagaattatgtttccaaataaaaattctggtaggtattttactttgctcgagacaaaatctgaaagtactcctaaaatcgatggattgtcttcaatgtcttttaacttatctccattaagtaattctagtggaattatcttaagaaaatgtatccctttattttttgagaattctgcgagtgtaatcatacttttgatatcttttacaattacagctttcatccattcgtttccggaggctactacagctttttgatatttatcattccattttatcaaattaaatacgtatccgattacatctaaattcttaaagtcctttaatagggttgcaatcgcataatcctcagttaaactattcttcgctagttctattttctcttggtatttcatgatcacactttctgcattttctattactctttttgaaatatttgtttcggtggtaaccttgaaaaatttactgtcaattgtttctttctcatctttcatcttccctatttctatatcgatctcattaattctggcccttgagctgagaatagtactttgaatttcctgattttttgcaaggaaattgtaaatttgtgagtcattttctttcatcttttcggaataattcttgatgttctcttccaatctggctatggttatttcaatttttccttttatgggaattaatttatttatcctatctgttaagaaatttttgtgtgttatctcgcctgagtttatcttgttaatttcagctatttctttggctctctccgattgtttctttcttaactcattttgagtttcctcatctgttctgatcttggattcaatatctcttaatttattgtttaattcgatctctttttctctaaaggttttttgttcgatctcattggctctctccttttgatttaattgatcaaaataatgttctgcctcttttatagtagctctatttctttcatattcatatgctactgttgatagtcttttctcattttttgttctttcactgcttgccgaatccgccttaaccaaaaattgctttttctcttggctaaggttttcggcttgagcagttacttcttctagtttttttgaaacctcttgacttttaagttccttatttttttgttcctcactgaattctgatattttttcggttagattatttagacttccagacagttttatcgcttttagtcgattaatctctgattctatttgcaaatatctgtgttgatcatttctctcttcttctaactcatcaatcctgtttcttacttgatccattttagccattgctatctcaagtcttctatctgattcctcaagttgtttataggcctgatctttcttttcatcaaaatatgagagtcctacgatatcttcaattattctcctcctttcttctgaatttagctctgatattctagtaatcattccttgttggactatattcagcttattaggggacgcaactactatctctaatagttccaagatgttgtttcgcgatactctctttttgttcagatagtattgactttctccagtattgactccggacatttctcttgttatggtaacaagattatcatccacggggattcctctatcttcattgtcaaaagttacgctgactttaactattttgtgagaattatcatttgaactactgtcatgaaaaagcgattgaaatttgtctacacggagagcctttggactgttctctcctaacgcaaatatgattgcatcaagaatattgcttttgcccgacccatttggtccagttacagctattagacctttttgaaaatttagtgaaatgttctttgatccaaacgatttaaatccaaaaacatctaattttttaatatagaccaaaattgtattatatttggatgttttctttctttattatttctttttttatagaggctcatttttgtgtactattgttattgctttgtagcttttgaatagttattattttgacattttcaatgtgattagtgtgtttagatttatctggattcagtgcttctaaagtaaccttatcagatgtgctaactattttgaaaccatgttcgggtattaatgacattattttcctaaaatccttttcattttccacaataatttgaatagttccatcttggcttaatttagacctgtaagaatgaagtagattttttagtatcctttctttattgactgttttttcagaattatcacaaaatattgtgataatgaaattatcgacgaatttatcttttatgaaaggaagaatgttatccgggttgcctggaagaatctctaaattctcaacttgaagtcctgctaattttgcttgtgcctttattatttcttctttatcctttacaattcctatataatattcattcttattttgaagagcaatattaattaaataatcgcaattaccagtcgacacatccatgtcaattttctcatattttgttttagcatctaaaattagattatttattttgttcgatggatttccctcgtgaaaaaattgatatacattatcccatttttgtctaaaaacatctggaaagttttttctggatactatgtccttaaataatgaaccttctgaaaataaagataagaatctgtcagttctagaaaccgcctctaccaacggaaaatctagttcttcgtacaattttacaaccctgttccacgctaggagaggatccgaactaagataggttactgatagatcagctaatgatagaatttctgcaattaggttaattttttctacggaaaaatcttggtcctttatttcttttagcaattgattaatgttattatacgcattttcattaaagggataatctgttctccatattaatgcttcaactattttactttcgatcttatcttctttaccatttaacatttctggatgagtagtagcaaattcctgtgcatccactaaaggagactcatattttctaaaaaatctaatcagttcttcactatttaacatataataggcatcatgaattctttttctttttatttctactatggtgtttgctactgtggggactcttgaataccttaaatcgtaatgcgaggtgccttgcactggatcgtaatcatgtaacaatgcagaaactagcattatttcatagtcccttttggtaatagtgtagccatgaatttcctttggtaacatgtttaggctcatataggcgacctctagagaatgatgtagattatgatattcgctcgatccttctcctaagcctaacttatcatattctttttttagatattgggtcaataaatgcaatttagtcaatgattcctcattgatttctatgcttctagcttttaacaaaatggattcaattagataatctagagataaacttgaaagattttcattcgtgtattgtatttgacgctttttagcacctggaagtatttctttgattttaccatacactatcctaatgggtagacttttgtttaggtatgtatagaaagatgtcagaatatttccagaatttttcagaacaggtttttctttaaaaattatttcatcaattatttggggtatgtttttattaacacctgaaattatgtttgttactgtatttatctctgtttgcgagaaaatattaaatcttttatattctgtgttaattactagccattgcggaatcataatcctaaatattgcactcttgttatcaggcatttcgtttctcttcgcgggggaatccatctgattgaatttttttaatatcactactacgttgccttttcctcttttaaaagggagatctgcatcctttgtcacttccagccttacattcttatttattttccgcaactccaataatatcttccagtattttcctttatcgagccagtggggtacttcgttttccctatcccaaaaatctactaaactatgataagcatatccgtcttctaaatgatttgtttctggattgagagttgcatagtcatattctccaatgaatgggtctagtttacgacataaatgccaggtattccttatcactttcgtatttatatcaaactgtgaatgtgccataagaccccatatacaacccaacgcgctagttatagtgaatagtacgttggtccaatccctattccaatcaaattctttatctaaaaaaaaatctgatactagcgggatggcgaaaatacctgttgtgatcatcgaggcaaacgataatgtaatgaaaaagcaactcgcataatcataataggccaaattaaaagtccatttctgaggcgacttgcctacattcaaatcaattttccaccccaaatggaaattgggttctgattaatattccatttattaatatttaacttgaattatccatcattctatcttatgaatgttattttttcttaccatcgctattgatgctgtacattatgaattaatatgtacgtttgacggaataccgtaaaagttgggaagatgctttgagattttcaattgaactagtattcgaaattgagaggaatgctttgataaaaaattgtagaaaccatcattaggaaatattcatttgtttagctttatttactatatttcttataatgttcttcgatgcagaaagctgactttgaggattaaatattacttctaattcctctttgcttacattgttgataatttcttcttcttttattaaagcatcaaaaaaatgttcgtgtttttcaactgcattaaaggctactgattgaatatctctatatgctttgaatctcggaataccttttaataccaaaacttgcaggacaaattctgcaaatatttgacctttggtcaattctatgttatttactattttttccttgtttattttcagacctgctatgatctttatcattgtacttatcatttcatccaccaggattgatgacattggaatgataaaacgttcgttagccgaatttgataaatctctttcatgccataatgctatattttctaaagagacgttcagatttgatttaacgattctagccaatgaagatattctttcactctttattggatttttttttactggtactgcactacttcccatttgtccttttttaaatggttcttgaacttctccaatctccgtacgctgcaggtttctaatctcaatggctattttatctaatgttaaagctatgagtgtaataatgaataacatttctgaatatctctcccttggaaccagctgtgttgcagcttcggcggggaagaggtctagtttctttgcaactattttttggacttctaatgcattctctctcatcaaagatcctgttcctactactccgagggttttgcaaatgagaaatctttttttcccctcgttaattcttgttatatggtcaagtaattcatttgaccaaatagcaaatttgagtccaaaggaagtaatacttgcatgttgtccatgagttctacctactgcaggcaaatcttgatattctattgatttttttagtaattctttgattagctggtgcaattttgattccactatcgtaaatacgtcccgcatctgcattgaggtactactatcaaccacatcattactagtcaaaccataatggatccaaggttttgaactttctgaacatagctcgcttattgcttctactattgcagcagtatcatgatcgcttatactttctaattcttttactctttgtactgttattttattagatgaaacaacctcttctatatttttagaagcatctttcggaattatgcttaattcagcctgcgcacctgcaactgcagattcgaaaattaattcataatttagttttctatcttcttcaaaaatgtctttcatctctttcgttccatatcttccgctgtctataggtaaaataggcatcagtctaaagtcagatattgattatctaatttattatttaggatgattaatatttgacaaattaaaatatttatcataaagggaataatgtctggttcattagtaacaaaaaatggtaagcatttgattaataaaatttctgactatcaatttcagataaataaagaagattcacgtggaatgaatgttcctgtcacaatatttgcgaatgatttattgatatctaaaatggcccttgatcgaacactcgatcaagcagttaatgtcacaaccctgcctggggtaaaaaagcatgtagttgtacttcccgatggtcatgaaggatatggatttcctgtgggtggcgtggctgcatcagatttagaagagggtatcattagtcctggtggagtaggttatgatattaattgtggcgtcagactgattagaactaatcttgtagaggctgatattcgttctaaactcaaaaacctagttgattctctattttcctctattcccacaggagttggaagtgaaggggctattaagctgaccagctcagagctggatgatctactcatcgacggcgcaaaatggtctgtagagaatggctatggaatagataccgatcttgaatcttgtgaagaaaatggaaaaatgaaaggagcagatcctataaatatttcaactaacgccagaaaacgcggttcaatgcaactgggaagtttggggtcaggaaatcattttcttgagattcaaaaagtggacaagatatatgatgaagtagcggccaatacgatgggaattagaaaagaaggggaaatacaaattttaatacattgtggctcccgtggatttgggcatcaagtttgtagcgattacctgcgattatcagaacaagccatgaaaaaatataatctacatgttgtagatagagaattggcgtgtgtgcctaatacatcagtggaaggagagagttatagaaagtccatgttttcagcgctaaattttgcttgggcaaatagacaaatgcttactcactggacgagaaagacatttcaacgagttcttcaactaagcgagcaagatctaggcatggaattagtatacgatgtatctcataatattgcaaaggtggaacgtcatagaattgatggcgagggcactcgtgatttagtagtacataggaaaggcgcaacacgtgctttcccttccggaatggaacaactatccgctaaatttcgatcaataggacaaccggtaattattccggggtccatgggtactgcaagttgggttcttttgggctcacctaaatcaatggaccttagctttggatcaacggctcatggggccggaagaactatgtcgagatcagaagcaaaaagaacctatacattagatgatgtaaagaaaaagctagaatcacgcggtatatatgtaaaatctttaactaaaaatggattgatcgaagaatctccagattcctataaggatgtcgatatggttgccgacgtgtcacataaggtagggattgccacaaaagctgttagattagttcccatgggagttattaaaggttaaattggacgacgataaaaattcaagcatggatgattcagatcttgaattaattaaagcaagaaagatgaaaaagctgcaagagcaattagcctccaaagaaaaagacaagatcaatttggaactccagaataaaacaaataaaaataaaccagaaggaatcgattcagaaaggaatttcttattgcgctatctgtatgatagaggtgacgaagttttaaaacttgcagaaaagcaatttcctttacaaaccaaaattattataaagaggttaaatgaattgattcgatttggggagatttctaaaatatcgggtggagatatgctagccgtatatagatcattaggtttgaacattcgagttgatacccatatttccatatctgatcatggtaaaacgataagtttctctgataaattgaaacagtctaatgatgatgcagatctagattctgatggattactataattaccacctcgtttactttaacatatattttatttaaagaaaggaacgattagatttttttttgacgatttattaaatattattagctctatcctaaaatctcgttaaataacgcaggtataaaattaattataattagctaaaaaacaaacaaacaaaaatcaaatcaaaaaacaaactagaccaaattaaaactaaaactgataaaacaaactaaaactaaaactaaaactgataaaacaaactaaaactaaaactaaaaataaaaataaaaaagattaaggaactgatctgctgtagagttttccttctaatgctagtttgtacatttctgctacataggggtttcttgcaggagtttccgcgccaagttccaccaaacgtgcgtataccctaactacataggccaaagcacccatgaaagctactactacacccatgttaaacatccagtggttaggtactgaaaatatttcttcaacaaaccaaaagtgccacatttcattgataccaatagtgaacatggtagctaaataaccgataatggttatctttagaccagtattcattgaattgtttggtcctcttaaaactggtactctcctgtcatacattgcaacaaatccccaacctagtgggagtgcaataaagtgactgtataaccaccaatgagctggtgtaaatgcactgtctctgatagctgtttgatgtaatgatccgtcaacaaagttgtctacttctactgatgcagcaatagaccctagcataatgaccatcaaatatatcttttttagcctttggatttctacttcctttggaattaatgcaggcatttgtgccattttactatcactgtatcttcactgattaaatatataagatgtgaactaaaatatttggaaataattctagcaattaatataacattattaaattattagactattagtcaattaattaactaaattttacacattttattagttttatcaagcttatcatctttgattatcatgggtgataaacagatggcatttcctatgaaataatagggtcaactctttgaacagttagtgcatgattatctgtcaatgtatctgagataatttctgtgtctctaattaatatttcagaggtattgatatcaattttctcatttgtattattctccgaaatcttcttcttaattagtgataatggatcaataatttcatcaggattaatattaaatatagcagtgtaattgcttactttactcttatcttttgatagagttgaaaagtctgctttcaaatatactacctctttgtttaaatcgtccaaagtattcaccgtgtgaaggacatccacgttaattagattaccaatttcggattcgttcaagatagtattcacttgctgattatttagaaagttatttaccaataatccattatcaatactgatttctagttttatgatgccctctgtgaatttgttagataaagtagggatagatttagtcgcgtttttatcctggattggaagtagttttgcgcaattaatattagcaatattttctgagggaatatttaaaatattgaaattattcttgacttgctgatctattgcaatagctttccaaattatggtaattggatagcttttcttgttgaatattgtaatatccgaatcatattttccgggtctcaatggaccactgtcgtcactgattgtgccacaattaaatcttgcatagtagtttactgttttgtagtttcctagatcgttacttggttgactcgaggccaatcccatatttattgttccattcgaacctaaaaccatagattgaaggataaaaacgactaatgttacagtaaatatgcatcggatcatatatgaacgagattatttcgttgatataatttttttcttattaccttatcaataataattatatagtcaaaattccttctttattttatgaagtttctgctatcaataattttgattttttgtttgatgtctagtcctttgttaactttttttgttttttctaagaatgtatacggtgatggacttttcatggaagaattaaccgcatcatttggtgatcgaactgcagatctgctaataaaaatgaacccccctacagtaaccacagagacaattcaagatcaagcccaaaagcccaccgttcagtttaaactacttgattccaaaacaaaccaaactttcaaagaggttacctattttattacaattgaaaaggacgggaaaactttactgtctgactggttctttaattctggtggcgacttattaatacagatgcaaccacgaaatcaaagtcaaatatcggtatatggcgaacttgatcctatacttgaagcctataccagtagagaggggtccccagtagtggctgctggaccaatatttttagacgggggtttatatcactttatcgtaagaattgtaaccgtggactattctcgcacaattttgccagatgatcaacaacctgtatttgatggttggcttagtattggagcagcaaagaatgcaaacttgactgtagatggtaaaactcttccaacgaaagttctttcttattatgatgaaatagggaatataacatacaatcaagcatctaattccatcaactttacaatgccgtttaattatgaccctaagagactagatgatcctaaaaacaccgtatttattcatcaggagatagaagttccaaaacctagtgttctatcctctgacggtgcatatcagggctataccaatggaaaggatgttacaaatgttttaatggtcgatgggaataatccgacaaaggatatcatacatttcatgcttgctaaaccaatggtgcaacaaatttccgacgaatacttgaaaaatataaataaaacatctacagacggactcatgaccttctcactgattccatctaaaaatggatccatggcaatgggcggtggtggtggtagtggagccatgaatcacaccatgccgatgacaatgcaataagagttttgttttgaatttaatacaaaaggtggcaagaaaaagattgactaacaatctgcaaattttattttatttattgatctttcaatatatagattcaagataattagtccactcagtactataacaatttatattatgaatttaattaagaaataaatttgggtaatcgattctcttttcttccttttttgcttgtattatttccacttaccttgatttttactctttttttagtactttttttctcctttgatcttgggttggttgttgcaccatctggaaatgaggaacctaaattcgggaattatgtaggattggcacaaggcgtgactttagataattttctcttgtccgtcaattctcaaacagttggaggaatggatgacgatgagggattaccatcgatcaacaattctaataccttttatacaaaaggattattgtccactgtagtattccatgattatagcgaaataaaccaaaatttatccgaacctgttcctcctcctcctcctcctccatctctgaatcaaacttctgaatccactatactctatagttttccaaaactggtctctggaacttggtctttgaatgtatcaagaggtttagttacagattttcaagccaattttaaattgcttactgtaaatggtatcgagaaacattttatagaaataatcaattttcaaaatagcaacggttcttctattacttttaatcaattttcaaatactccaatatatggatttgctgatataaaaattgatgatgagctattccaaagtaagtttcccttgacaattcaaatttttaatatcaacactattgtcttgactatcagagatgaaacaataggcaatattttctataacaatgatttgttgggcattactgattcctttaagaatttcaagggtgatgaacttttgatttttgaagaggataattaaaagtaacaatagtttcaaaattattatattggttgttctagtctttgtagtcaattatttaatataacagaaagtacatatagtagaatatggtcgaaaaaagaaatagtgaaagaatgaaagatgaagatgttgtaaatgctctatccagcgaaacccaagaaatttctgataacgatttagaagaatcaaaacctattcctactattattgatgatttagatatacaagatattccaggtattggaccaaccactgcaaaaaaattacgtgatgccggtgtacttactgtgatggacctcgccgttacaagttcagaagaactttctgtggagatcaactcttcaaaagaaagtgcagccgcgttcattattgctgctcaacaacttttgcgagattctaatcttttagacaaggaatttgttactgcagatgtcgcattagaaaaaagaaaatcattgttgcgatgtacaactggttcaaatgctttggataaactacttttggggggtatagagacccaagctgttactgaattttatggtgagtttggttctggcaagtctcaaatttgtcatactctgtgtgtgacggctagtcgaccagttgaaaatggtggatttggaagcggttcaatatatatcgatacagaaggtactttcagacctgaaagagtagatcaaatagctgtgtctagaggacttgatccaactactgtcttaaaaagtatcgcagtttgtaaggtttacaatagctctcatcttgaattgatcataaaagatcttggaaaatatatcaatgattttaaagccagacttgttatcatagacagtattatttctttgcatagggcagaatttgcaggaagaggcacactagccgatagacagcagcgactcaattccatgttgcacaaaatcattagacttgcagagatttataatatttctgtggttataacaaatcaggttcagtcttcacccgataccttttttggagatcctacaaaagctgcaggcggaaatgtattaggtcatgcctcaacctataggatttatctcagaaagtcaggtgaaaatcgaaccgctaagatgatcgactctccctatcatccatattctgacactaaatttactgtaactgagaaaggtgtagatgatatggaagaagaaacaagttcaaagagaggaaaattaaaggaataaatctaatctttatttttttattgtcgtgttatcgttatttgaagacgtagtagtatcactctttgtgtcttctttttcttctttgctattctgaccttcttttggggtattatgaactaaaataataataggtattgctatccgatcagccacaatattaagaccgttctatttattataattattaaaaaattctttataatagaaatagtggtcattttgagttcaggacgataagaaacttgtcaaattaagattatgatagaaccatgagaaattatgatgagtcgtttgaatattcattattttatcctcgttgagaggatttgttatccaaatgtaaatgcataagattgaaatccttttcctttaacatctattattaaagaataatagtcatcactatatgattgatgatttactatgttatacaacctggggtaatcaattacgaattgagaatcattttctgtatctgcaccactggaataatttgataataaggaattattctcatgaactatcccctgaccactacctcctgctaccaagtttacagactttgcagagtagagtataccaatacgtcctgagtcgctttgtaattcaacattgtcatgattggttttccattttccttcgagatatattgtattaggtttgattgatccattcaacgatggtattgtataggttatagtttgtccaagacgaactccttcggaatttcctattgctgattttgacccttgatttccaaaatacaattctggtgttttaatttttgaaaaatcaacaggctgtttaataaaattactaatattattggtagagactaatcgagatatgtactcatagagaaaggttgtattttgatccgtattttctatttctttgttaccatttctttcaactaagagtgattgaattaccttctctgtttgattatactctccctcaccaattttatcatatactatatacccttgagaatcgataagatacattcttggccaataattattctcataggcattccaaattttacggtcattatcttgtattacaggatattttataccgtatttttgtaatgaagtatttacataatcaatatttttttcaaattcaaattctggtgtatgaactccaactattaccagtcctttatctgaatactttgcattccattctataatatgtggaacagttcttagaacattaatacaactataagtccaaaaattgacaagaactacttttcctttcaaacctgccattgttaatggctgaccatcattaatattgatgatatttacgccttcatcaggtttttcaaattctggtgcaattttatattgagatttattgcctgacacgttcttttcatcaatatatggtattaatgacgtatgctttggaaaaattgttctatccgagttagtatctgcgttaacaggatacagaaatggggaatatgttaaataactaatagttaaagtagatgctattattaccgttattaagataatgaacttttgtttaaatttaatcacttttcccaattcattttatattggtggacttttcccaacggaattggactcgtttgcttctgtctctcaaatatagagatacttgctattgacaagcatatgaacgtggatacaaattctataaatattaaaaaaaatttttgtataacaattaaaggtattttatttcctccataatttttcatgtataatgacccattcatctaatatttaagatagatgagttctgtaatcaagaattatccattaaatagtacaccgaatctggatgaattcattggaaatatgcttgtgcaatattttgatgaacatagagaagccgtggacgactaaactttccaatacaaaaacaataatcgtcacaaacttctaatctattctgatttgtattagggttaacatgcttattgacaaaaaattatgaagtatttatcctatatacctattcaagcacttagctaccttggtgtttatcaacagaagcctgtcataatgagcaattatgcattgtaaaagatatctataaaacatagagtttttaaaaattgtccattcataagcattattgcccgtatatcatccattcttaaacttcactagcagtataaggctacccgaatatggatatgttggaattacagatatagagaaaaaaataatcaatacaagatattttcaacgcctccgaagaataaaacaaagttccaatctctttatggcttttccaggggcgtctcattcaagatttgaacactctttgggtgccatgcatattgctggcgaggcttccacccatatcatcttgaattccaataacaagatcgattctacatctataattgacttgatggattccattaactgcaaaattgaaatcaaaaaacaaattcaaatgacaagactggcagccttattacatgacataggacatgctccattttctcatacctttgaagaatttctaaaactagtcaacccgtctttagattggaaacatgaatacttgagtttggaaataatatacaagaaatttaccaatttacttaaagaatcatctgaaaacaaaatcgagtcttatgaaataatggcattattatgcgatttatcacctaattttagaataatcgaaaatacaaaaaggattctagaaggcataggcgtcagcgaagaggttattgccaggatggatacttttttggagtcaaattggtatttgaatcatcttataaaagaagatcctgtacaatgttgacagatttaactacctgatattggattctaataggactggagcaaaagagtatggttttgtagatgtaggaagaattgttcaaaatttatacttcttaagagaagatagaattgtaactgtttcaacccaagcaagagaggcagcaatgagattctttgaagcctatgcccaaatgcacaggtcaatttatttgcataaaatatcccaaggtgctgatgtccatttgtcttacataatgaaggaagctgcaaaagaatctaactctgcctttcagaaactatctaatcccgagatggaatctatattagaattatctgatgatgtcttgatacatgaattaacaaaagtagagaatgaaaaaacaaggatacttgtagatgattacctgaacagaaatattttatcacttgttcacgaatttgatctgagcgataataacaaaattacaaggattatggattcaaaaggatcaaagggattacaagatgaaattagaaaggaagcagggttgcccgatgatggggtagtattggttataaatattacacgtaagaaggtaacaaaaccacctgttgatgagactacattgaaaaggctaatgttttataatactaaatctaaaaaattggaaccattggatctggattttatcagacaattttaccctaacaagaagtatagaatatttaccgaaaaaggatacaaggaaaaaattaaaagtattatttcggcgtgggtagatacaaacttttgagatttttatttatgatttaaccgacagtttgggcaactaaagaaatccgaaaagtccctattggactatctgcctataaactcggctaattttattgaggattaggcagcagaataatggtaaagaaatgaaatttaaaatgaattgattaaaagcaatgaataattactattaatcaaaactaaaatctattccgctgtctctaatattatcttctacttgatccattatactccccccgtcgttatcgtcgttatcgtcatcactgttactattgtcattactctcctcctcaacttcctcctcctcatcattcctgttgctgtcatcgtcattactctcctcctcaacttcctcctcctcatcatttgtggtaacaacatctgtatcatcttcagttattggggggaccgctgtagtgtcagtaactgcattgacctgtcctggactgcttcctgctatcttacaacagattggaccatttcctgtatcttggttaaattgttgaatttgtgcaaaaggttgctgtaatccacctgaaacctgactcatattaccaccattagctgtcgaattggaagattctaacatcatgttatagcttgataactgtgcttgtgtaaagttagtagcagtgatgtttaccgagtaataggcttgtaatgtttgaggaccacctaaacataagattttagaggttatcttgttatttccttcattgatgtttgtataattgcttgatactgtgtattgccagttagaatagtcgttggctccttgagcacctgtgggttgaacattctgatatggctttatattatttatgataacagaaacatcacaatctgatgttgcattatcctttgaaataccgtgaataacaagtgattggtttgaatttaatggaactagatctcctttatctggagacattatctttactccgcctgtaagctttgtaatatttgataccgtgtcagaagaaacaatgggaacagaggtgtttgtagtgcttaccgaagtattttgctgtgctaatacttgcacgtttgcattagaattgatgttagatagtaataacagtattaatagtcctgaaaaaataatagcaagcctttttatcatgattaaatttgttacttatatatatattaaagtttgaatagatttttctatatgataaaactacaaaatgctattgatacgtgttcttatgaaagtgagttttcccttcttcctatctctcaagtaatctgttctttttttaacagaataaaccataaactttaacaattccgaaataacattatcgacgtggaagaaaatactgacagaaatcaaaagactctgcttacattctcaaacatccaatacttggttgagggtttagatgtattactccatacaaatctagatggtgataaaagaataaaagtaataaaattaagagacgatcttaacgattacatcaataatttcttcaatgaatattcttagaacgttgtttaattcattcattcttaaaataatgaaaaagagaaaatttgagaatatgagataatggtatagtattttgaaaataatactttctggaacacctggtgttggtaaacacaccatcgctactatgctctcctctttgtttaataaagtaacaattgttgatataaataagataattttatccgaagatcttttgattccttctcaaataagaggaaatcatgatgtagatattcaaaagtcattgaattttttgactttgttgctttctaagaaagaatatcaggatagtatcatcgttggacatcttgcaccttatgtaatagatccgttgttagtagatcttgcagtaatattgagaagatctccatacgagttaagaaaaatatatgaagaaagatcatattcacaaagtaaaattagtgacaatatagttgctgagattctgggcataatatcttatgatgcattaagaaactttgaattttctaaactttctgaattggagattgcaactagtgttttaccgtccttatctgctcaaaagattgtcaatatgtatatggataagaagcaaagatctttcggaaacatcgattggttgccacttattcaaaatgatccgaatatgttgaaatttttgaaataaatctaggttgaactaacttcatatatatataccttaagacattatcctcttggattatggctgctttaatttcaagaaaatttgctgaagaaagtgtacaatttttaggaaagaaagtttcaattgagacttccgacaataaaacttattctggtattttaactggtttaaatgaaaaatttgatttaatattggaccatgtagactctcaacaaatccaaaaactaatgataaacggtttattcgtaaaagaggtaaagcttctagagaggccatttgatttgaaagctctttctgaaagattgtcaagggtattccctggattagttaagattcgagaggatgtaggtgcaatcattgtgatggataaaattaaagtgaccgagtctggagtcgaagaaggatctggattatctgcatcacgtgtaaaagctatttacgatgaattccttagggagtcaaagaattaatcttggtatttgaggtgaaatgtactgatttagctgctcggatcggtaaattaaccactcctcatggttcttttgaaactccatcgtttatacctgtaattcatccagtcaaacaacaaatcagcccaagttttttaaaaagccttgggtttgaatgtatcataacaaatgcctatatagcattcaaattttatggcgagaaggccgaaaaacagggaattcataaaatagttaattttgatgggcctatcatgacagattcaggtggttaccaagtgctagaatatggtaaagtcaatgtaaccccctcgataatggcccaatttgaacttgatattggtagtgatattccagttccattagataagccaacaggctatggtttgccttatcatacggccaaatcctatgtagatgaaaccctttcaaatatagatgaaacaatcgatgtcataagaagaaatagaactgatcagaatgattacagtagtaacaatgatgatattttatcatcaaaaggtgaaatatggaccggaacaatccagggagctgagcattttgatcttgtacgatattctgcctccatgttagataaaaagggcttttcattttttgcaattggtagcccagtggaactgatggaagcttacgagttttctacactcgctcgacttatagaagctactagattaaccataccaaacaagcctatccatttatttggtgcaggtcatccattaacaatacctcttgctgttgccttaggttgtgatacatttgattccgcatcgtatattttatatgcaaaagctaatcgttatatgagttcttcagggacgctgaggttagaagatctttcatatttgccgtgctgctgtcctgtttgctcatattattcagttaaagaattgatcgatgaaacccctcaaaccagaattattaatcttgctaaacataacttgtacgttctaaaacaggagatgtctgcagtaaggcaatcaatttacgacggtaggctttgggaatatatactgcaaaaagcaagatctcatcccaaattaatggatgcgattcatgcaattaaaaattttgaatatattcaacaaaatactcctgtcttcaagcaaaaagcaatctatttgtttgaaccaatagatcagtttagaccagagctaaaaaattatcgacgtatgctgattgataactacaaatcacccaataataatgtcctgcttttatatccagatcagggtataagaccattctattcctcctctatattgcgaaaactttccagtgcatttcccgatgcatcaatttgtctttataatgcttttttcggcttgattccagttgaaatatcggatatttatcctacatctcataatatctttacaaaacattttgacgaatatgatcctaaaagttataccgaattcctaaaattattaaactccttcttaaaaaataatgcttttaaatcaattcatataattgctaataagttcattaaaaaattgctccctattattgaactacctaaggaaacggaggtagtaattgaagattttattggttataaattagactaaggtgtataaagttagaatgatttctatttctatttttatattatgattatctgattggataaaaaaagttaaaaattaaaatttagcgcctacactatctttaatttctttagataattctgtatatccatttttatctattatcactgcatttatactgtctcctgtacctgcatttcttctaattgctgcagcaatggcttgaattgctactttataagcttcatttacgctcattccttctttaaattctgattctaaatatccgtatgcaacaggggacccactacccgttgaaataaagctttctgtagtcatagaaccaaataaatctatattataaatttgtcctttttgctgacgaaaatcaaatcctcccatgataatttgaacataaaagggaaaatatctttgattaaatagaatgttggaacataatctagcagcagaactgactggaatgggctcttttttagataatctgtatatatttgcgttatatctcattgtatcaactagattttgggcatctgcaacaccgcctgcaattgtcatacctaaatgattatcaactttttgtattttcattacatgcctatctgcaataaataatcctgcacttgctcttgtatctgcagctaatactacaccatcactacatgtaagagcacaagtagttgttccttttttaatttgatctaaaatttgctgaggatatcgatcatcattaacatgcatttatatcaaatgataaaagactacatttaagcattgttaattcccaattaattataaaataattattattatagtcgttttgttattatatattatagttggcacaaactctatacgataagatctgggataatcacgtagtatattctgatgaaaatagtgatttgtcgcttttatacattgatagacattatgtgcatgaagtaacctcaccccaagcttttgatggtcttaggatcaacaaaagaagtgttagaagaccagatcttacctttgctactgtagatcataacgttcccaccaccaataggtccttgcccattgtggatcaaatctcatcattacagataaaaacattggaaaataattgtaaagaatttggaataagactttttgatattcatgataagtatcaagggatagttcatgtaattggcccagaattgggattgacacttcctggtagtacgattgtttgtggtgatagccatacatctactcacggggcatttggatctctggcttttggtataggtaccagtgaggtagaacacgtattggcaactcagtgtctatggatgaaaaagtcaaaaaattttgaaatagttttgaatggtggtttgaagcaaaagcatccaatatcatctaaagatgtcatattaaacattattagaaagataggtacatctggcggttcaggatcggtgattgaatataaaggaaactatatttcatccctctcaatggaaaaacgcatgactatttgtaatatgtctatcgaagcaggtgctcgagctggtcttgttgctccagatgatgttacttttgaatatttaaggggaagagtcttttctcccaaaaatgaattatttgataaacaagtagacaattggaaggatctcagatcggataacggagcacaatacgacaagactttctctattgatatcgataatcttgctcctcaagttacttggggcactaatccagctatgactattgatgtggactctgcaattccatctcctgatgaatattctaaaggaaatgatgatgaaaaaaaatcagctattaaagccctcgaatacatgaatttgaaaccgggtttaccaattactgatattacagtggatcgagttttcatcggttcttgtacaaatgcaagattagaagatttaattgaagcttccaatgcagtaaaaggaaaaaaggtatcttctaatgttaaagccatggtcgttcccggatcacagcaggtaaaaattgctgccgaaaagttgggattagataagatttttatcaatgctggttttgaatggagagagcctggttgcagtatgtgtttaggtatgaatcctgacatacttcaagcaggtgaaaggtgtgctagcacttcaaatagaaatttcgaaggacgccaaggtacaggaggacgtactcaccttgtaagtcctttaatggctgcagccgccgcaatagccggaaaatttgttgatgttagagaatggatttaagtttgatttattacagataaaaattacaggattattatggaaccgtttaaaaatctgacaagcaaggtagttccgcttgatattgcgaatattgatacagatcagatcattccaaagcagttcctaaaacttttgggaaaaactggatacggtgaatatttattttttaattggcgttatgataatcaaggtacaccattaaaggattttgtattgaacttgcctctatatagtggaagacagattctcttaacccgtgaaaattttggtattggaagctcaagagagcatgcggtatgggccatcaaggattatggatttaaagtaattcttggggtatcttttgcagatattttttacaataattgttttaaaaatggtgttttggtcatcaagatggacaaaaatataatcgaagatttctttaccgacaagataaacgaaaactttgaaattgatttgatacgacaacaagtgaggataaattctaaagccttcggttttgatatcgatcctacattaaagagttacttggtaaatggattagatgaaatttccaaaactctagaactagcaagtcatatcaagaaatatgaggataaaaataaagtttctgtggaatctaaaagtatgatataaacattaagataaaatactatagaaaaaaaaatagttgattttactaggggtaaatctaattaaatttattactgtaacgattgaagagtttcttataagatatataactactattttttaagatatgaaaataattacatcaaaattgactctgttaattatactgtcgacaattattgttgttggtaatttgacgatttcacaaaccagtatggctgataatattgataaaagttttacatcttcatcttcatcttcatcttcacaccctatttctgtacaaaatcttgatactacagccgattctaatcaatatcatgactcttttgtttggtcccatccaagtacctctaaaatgactgatgttttgactgctagttttacaaatatccttgatacacaaatttacaccggtttagacaaggttacaaactagtaaaacatctttttttagattgatagcagatgaacgttcatgagcatctgatcaaaaatcaatacataattgtcaaattccttttgctcagctaaaagagaaaaaatatagatattattgttaacagtcaaaaaaacttgtttagttttgaacaaaagacctgcattttcaaagctgtatattatactttcagcaggtttgtttataccctcaatatgtatggtagatatgttgtcaaacctaaatccctcattctgaatctcaagtttttgaactatatcttgtgtattgatgctttcatttattgtaaggtcattttttggtctcaaaatattcacgacaatgttttcttgaaagagatcttcagtgttttcttttggtgatagaaatactattatatcattggtttgattttcgtcattctttttatcttcaataatctcccaatctgtgggatatgttatgcttagagtgctttcattggttgtgtaatttgaccaagtagattcttgagcgaatactttattcacagtaaaaaaaggaaggttctgcatagtgtcggttaggccattatgaccaaaccaactagaaaaaaacaataagagtaatacacagggtaatgcaaaaataattaagttgactttcctgatagacatactacattctattaccatattataattagtattttttacatttctacttattattatattactctttaatcaataggttcatatgataatctacctatgttctaaattatttgggtattttcaggtatgatttgtataaaagtcctaatgtaggtatatttgcaaaatctaacgataaaatagtattacttccacatggttatgcagagacgaagttaaagaaaataacggaaattttagaagtggatccaatttttgtttctatagcaggaaatagaataattggtcctatggtggtcctaaacaataatggaatgctactaccatccacagcatcagaggatgaggtgatacatctaaaacaagtaactggattgaatgtatccaagctagattcaaaattgacggcaataggcaatctaatatccactaatgataaaggagcaatagtatctccattgtttaagaatgagtttgataaacagatagctgatgttttaggggtggaaccttacaccatgtccattgctgatttcagccaaacaggttcgatgattgtatcgacaaatgatggtggtgcggtacatccaaaggccacagagaaagaggttgaaattatttcatcagtcttaaaggtagaggtagagcctttaactatcaatggtggcattccatatctttcatcgggcattgtttggaacactcggtctttacttgtaggtaacctaactaccggaccagaattaataatgttgagtagggcatttaaaatgtagatccttattactcgactggtatcttctgaggatgatgattttatattatagatgacccggtcttgaagactactttgggggtctttcgattgattaattgataaaatgtacttttaattaaaataaaatactataaaataaaccataatattttcaaaatcaggtgaccttgatcctatacatcaaattttcatacaattaaaagtaatatttatttcgtagtttttgaagataatgagtgggataggatatccaagtcatatctataaatttgattaactactgaatttctttatacctttaaggatattcttggatgtttttttaatgccttttaattcctttaaaacttgcctttcgtaatatgaaagtttttctttttctttactgtctaattcttttaaaattggacttgatgtattgatactgtccttttttgtagaatcaattacatctttattttcatttttgattttactattttctacattttttttattgttttttgtagaatcaattacatctttattttcatttttgattttactattttctacattttttttattattattattaattaccatatttgttctataatctactctcttaataagtatcttgattattttagtttttattgattttatggcttttattccaaacacatatcatttgaaaaagaaactagaattacaatacaaagcaagattcatcaaagtcattgtaggatcgccttcctacaaaatgaagtctaatagagtcatacctgtctatactgagaataattgaaggatttgtagtatgtcaatcaggctttctaatggccggatttatttaatctaaatatttcaatggacctcatatgtaaaatatcgatatcgatatagactatatacaatatgactataagaaatacaaactatgtttgtacatgaatccgcaaatgtttatggactgtggacttgataaattaagagagttaaaaaatgattacaaatggctttattccaattatgaagtttttagaagagattacaagaatcaattcatagcagtaaaagatgaagagcatttagacaatgatattaatcttgagagattattacaaagattgaaacagaacaaattcgatgggccaattgcaattgagtatatctatggttaattcctttactttttcttagaagtatgaaactggttagccaatatacaatattttatcacttttgaattactatgctaataagatatatctttttttctaaataaatatcggagaataaagatagacaaagacatcagaatcaattaataatgcaaatctggatatgtctaaaggacattttaatacagcaaaatttttcttctttattgatatcttttaaaaccatatacaaatttatttttcaattcgtctaattacaaacttgtgatctgtgcttttggttaatactagagtaatagttatcgctgtatactacatcttctcgtggaattatgatctcctttactgatactataactggtgacaaatcaataatatattttctattacagttaatattataaacagatctgtattcgaattttcctgttttttcaaatgttatctcgtgtccatgaatgtcaatgtaactttcattaaggatttcggatatttttaaatttaatccgtcagtaattttttttttcatctttatattgtctgatctaattctactcgccggcattattatcgtgtttcaatatattatcattagataacatagattgtaattattttcatttcgatttacttaaatataacttcagattgaaaactgatactcaggttgttctatcctgtctgaaaagtcgatgaatcaataatgtctacgttattacgttatactacattctagtacttatgcctaaaatgactaaagaatcttcgttgctttttatgtctcagatctttatggaatgataatttcttatattttcaaacattcgttattgtattaacaaatttaattccaaatttattcgaatgtatgtgatgatattgctggtccatatgactcagagtttggatgaatcgtgaaagaaatctgtggttaataaggataattactttaattgagttctgaaccacatttaaagcatttaaggtttccaattatatattctcccattctaaaaccgcattttatacaatcaatggtatgtcttccatagtcttccttgtcttcatgtgaattctctaactcctctaatctaatatattgaaacaacaaatttggaatgacaataattttcattctgaaattgttacaattgaatgtcttttaatatttgtcaatatattttaaatgattctatatagttacagaatagtaatcaactactctactttggtaaaggtgattatatgctaaattgactatgtattaacgatgttagagtatctattttaacctcctctttgaatcgacccatcaccttcaccttcaatctcttttcttattatggaccgctattatctcatggtcctcacaataagaagtgtactatttctttatctattttaccagcaacttgtaatatcatctcttccttcaattcctcctcattccgtataaattacaaaataccagatctttgttaatgtgcatcaaattattactgttaatacacatgcaagagaggtttcaaaggcttgcattatcatgtcattataaagttcacaatcatgaaacaagcggtattgatttctttctttctttcttatacgattattaccctattgattatagccatagtaacatcatatacataatggatatagtctattgcgatcattatattaataatgaaaataaaataatgggcatttgacttttcgtgcacaataatcagttgaatttatgtatccaataataaaggacgaacacgtcatatcattcgtttagaagcttttagaagtatatgttctatatataataatgtcaaatacaataaatacatcctgaaatatgttaaagtgaaacatgacttctcataatcaatccggtgcttatttattttatgagatagcaaatcatcggtgataatgaattgcaggcaatggaaggcagcaatattaataataaaaataatgaatccggtatcctaatagttgttgaaggaatagatggatcaggcaaatccacacaaatccatttagttgacagatggttacgctccaagggatatgatgttttttttactgaatggaattcgtcagagactgttaaggaaatcacgtcgaaaggaaaaaaaaaggcaagattaacaccaatgactttttcactattgcattctacagattttgcagacagatatgaaaagaatatctatcctttactcagagcgggctatattgttctagcggacagatatatctacactgctttggcgagagatactgtaagaggatgcgatcaatcatgggtacgaaatatgtacaactatgcccgaaaacctgacttggttttttattttagagtacctattgagattgctgtgactaggatcatttcagggagacctaaactgaagcactacgaggctggaatggatctaggattaagcaaggatgagtatgaaagttataaaatatttcaaggtaggatagttgatgagtatgaatcaatggtgagtgatgaaaatttcacagtaatagatggaacacttgatatagaaaaacaacaaaatactgtaagaagaaacgtcctaaggatcttgaagttgaaaaaccagattcggggaaatattgctagattgtcacaattagaaacgaacactgatgaataagatgatttcaagaaaattaactaagaataaagattattctactaccaagaaggaaagtaataataaaattaaattcattaaccattccggaatcaaatatctcaaagatatcgagataaatgggtcattcatagtaatagaaggcccagatgcttcaggtagaaagtacccaaattcagaaaataaccgaaaaattagaagctgatggacatgcagttgttaacgccggcctgaaacggtctgacctaatttcaaagggaataattgaagcaaaaagaaattttcaggtaggaagaagaactatggctctatattatgcagccgatttcgcagatcagttggaaaataagatagttcctgcgctaaaggccggttttatcgtaatttctgatcgatatatatatactctaatagcaaggagttcagttagaggaataaataaaaattggttgcaccaattacatggctttgctatcaaacccgatcttattttctatctaaatgtggatccatttaatttgattcatagggtattcaaaaaaaacaaatcacttgattattatgaatcaggatcagatctgggtatatctgcagacatatttgattccttcattaaatatcagtacttattaaagaaagaattcactctgatgcaaaaaaaatatggtctaatagatgttgatggtaataagagtattgaagatatttaccataatattcaaacaaaaatcagtgaatatctcgaccaaactaaaaaaaatgaaacattatttagatagacaatttgtatttttatttgagcgcttcattgatgtattacaactagagattttatttgatatatagaatatattgaccattaggacaatcattaaatctgttacctcaatacaataaacatggtgagcttgaggacaaaactatatactgagggaggaaaattatgcatgggttgttttcatcaaaggcgtattcatagctataatatgagtcaacaaaataatcgtcttctgtgtaatcatcacacttgtagttgtacccaattcatagaatggaattgataatctgttgtcataatttttgagattaaagtgataaagaaaatattatgatgctgtgactgggaatcgttctttatttacaattattactatctatcctattttaaaacgcatttcacatccaaattcgttggtttattataatcaacaaattcattaaattttttctttcttaccttcataatattttctattatatcggagattagagaattatttgatagatgttgttgattcagataatcaatggtaacatcatagtcatggatttcgccaagcattccttgaatcttttcaagctgtcgtaggattctattatgattttctcccagttgctcgttggagccttcatctccagtggacctctcaccagctctctcataatctctttttgtgacaagttctattagatagcgcaacttttttgtgtcttttctgagttcatgtaacaccaatattctgtcttcattattaataacgatcggaagctttctttctatcttggtctttagttttcttaccatctttagcagtctttttcttgacttgcctgtaaagctcctattaattttttttctatcgtaaaaatttggaataatttgtcttcttaaatctaaagcaattatgcgtgcttgtttaaggtatttctgcttgtcattttcataatgatttttaaattcttctaatttatcctgcggcattttaccttcatttgctaacatttttagaattatgtcgacatctcgtatcttgctattgattctaaatagctttttagctgaacttgcaaatttctttattttttttttgtttcgtatttgtttgggacttgactggtatgctgcttctagtcttcgaagtgatgtacgcatatgatggatattatcttcatttggattttctacatatttgtctaacttagcaagaactttttcataattctcataacagttattagcatgggtgtctgaatcatatcgaacatggaaacactgtaacatacaattagatatcgttattgtaatattaagtgttataaagctctgatggattctttattgctagtttatttaaattataggtagttgatttttccgccctcagtaaatgagaatcatgaaataaaattaatgttgtatttatttttaaataataaaataatcttacacatttatttgatgagattaaaaggctaccgttttgtttaatttgtaattgagcattttcaaattatataaccctacaaattattactttccattggatcctttggccgccatatattcacaatttctgacgtagcaatatcgtgcaaactgaatatatctcgatttttcaaaattagattaatttgaactagtgtgcacgttggtaaaatcataatcttgtttgtaataaggctcactaattcttctagtgctggattgtgaccaattattagaactctgtctttagttttgaatgcggtagatattgcagatatgtaattgtcaatatcacttccatacagtgaggaatcgacttcaataagattctcatacccggcatgtttacatacatatttagtagtttcaatagctctaagggccgaggaggttatgatcaaattgggcaaaatagccatttcctttaaatattttcccatcttaatagcctcagatttacctctcttgttgagtggtctatcatagtcttccaattttttattcttccaacttgattttgcatgtcggagtattaacaaaatcttgttaaatttcttatctttcatatcatacatgaaaaattaaagataacatgttaaaaaggtacttgcaaatggatcaagaatcttattcagaaatatgaatatttccataacatcttttcctattcgtgctaattcataattttttgtttatttaagattaattatagttattatttttattacctacatattattcaaaaaatcgatcaactaaaaaacaatgatatacggagaagataaattgaaaagcaaagaaaaaaattggttcatattcaaaatattattacagaattatttgttgttgatgatagaatacggaggggatgtaaacagtttataataaatagctaatcagtatcacctagaaacaaaaaacatgaccgttgatatcgttcaatccctaattctaggaatagtacaaggaatcaccgaatggctaccaatatccagttcaggccatctagccctaactcaactattacttaatattcatgtacctatcttctttgatttaattcttcatataggaactctggcaggtctaataggattttatcgaactgatttattaatgatattcaggtctattttttattctcgttccatgtctttgcaagatgtcaaagactatcgcaatctactcatgctcataataattggtacaattccaacggcagttatcgcatttgcgttaaagtctttgtttgaattttctttttatgatttctttttgttatctataggattcttcataagtggaatattcatttatatcactaaatttttcaagaaaggtaccaaaggcatcaatagacttgacgctgttttaatcgggatagcacagggattttctgtgttctctagcatatctaggagtggggtcacaatttccttaggtatgatgcgacaaattaaccattcccaactggtaaagttttcattcctactatccattcctgcaattattggaggcttggtatttgattttctattgatggatgacactcagatgtccagaataggtgaaattcatatttcttcttacgtaatgggatttgtatcatcggcaatagttggatatttaacaatcaaattattgatagatattgtcaatagaggaaaactatactattttgcatattactgcttagcattggctgcgatcttattagtatattctatcttatttgcatgaaatattaaaagtaaatgcaagataccataatttagtagtcatataattagataaatatatctctattagatatcacttcatctgtttagattcatactatcgttagacgaacttatttcaaaaagatattgcgatcttttgtgaacataaatccaaactagtaactttagatgaaagtacaattggtaacgatatatcaaacgattaagatggttgatttgttaaaactcttaccctgagttgtaaaagtatttccaaaaatatgatggtctaagaacaatccactcatgcctaacgttgattagtatactatattgaacatgtagataaataattaatatgtttcataattagatagtatatggaagaaagacaatttctccatagcttatgcgctattgcacttcaagtagatatttctatagaatttgctggcatagttgatccaaatggcaaattgttagtaggaaagtcaaaaagcatacctcgcaattttcctagcagtaaaagatgtaaaaatactgtttatgcaagaagttttaacgatcatcctagaccattttttaaggacaattcgttatcaacaaataatataaaaaatataacgtctctgcaatccagcagtctgattgataatcactcattatttaggctaattcacctaaacgataatgtttttctcgcatacatcccaataaacgaaatgagcgataggttcctttacatttactttagaactaacgactatttagagaatgttctacaaaaacttgattctgaatttatatgatgggtttatttacaattagtaattccagaatctcataattatatggatattcaattatatgtcttgcaacttttgaaaaccgaatatttaccaatttacaaaaaagggtagaatgttaatatcttcttctaaacaatagtatatttaatttgctgcatacaacgactatatctgttctcttttctaagaagttcaagaatttttcctgccctattattggtcctccttagataatcaaatactagagtgcaagatatttttcccacaatttttactatcgagttgtacactctctttataatctcatccttcacctttgatcttttatttaattgctctatggtagctttggaatcacttctgatgacgattacttttcttttccctcttttctttagtttcgttgcgaatgctttgaggttgtctgaaattgcaaaatatactgccaacatttccattctctggacaccgtatttttcattttttttatatggttttaaagttcttactttgcttttgttttgaaaatgattatgccaggaaatatatccagatggtgatccgtctacatcaattgcgatttgtatgttgcgcaatccattttgttatgaactatgtcagaatataaccattatctatatagttaccataaaaatattatgtttaattaatcattattcaagaccattctattagtatatcagctaaatttaaccgacctgaaaatttgcatatggtaacaaatcattgaaaattttggaccgcatatgtaaacaacatgcatccataaaccacagctttaatcatatatcgttactgtgtagtagttgcagatggaaaaaggtaattccataatgcaatagtttgacttaagattaatcacaattttctgtatagattcatttctgcatatattagtagattctgtttttttgaagaattgtgacatttataaataatcctggctgtagagtcgaacaaattaatcaggtctatagctttatatttagagcttccaagaaaatcctatcttttttcttgtcagctataattatactactttaaactattctatatagtatatgaataatatatagacaattgattaataattatatagttatacaaatatgatgactaatttaactaactataggatactaggtatatcacttttagccgtatcgctattagttccagtctatgtgaattcagtaaatgcacagcaagttacgattaatggagccggagcaacttttccgtttcctttaatagatacttggagagtggaatatcaaaaagtaaatcctgatgtaagtattaattatgcttctatcggaagtgggggaggagttaaacagtttctagaaaaaacagttgactttggtgcaaccgacgctccactaactccaaccgaatttcaacaagcaggaaatcctgttcatattccagaaacaatagggtctgttgttcttgcatataatctaccagaaataacaacacctcttaaactaacagggcccgttatagctgatatatttctaggaaagattgctaaatgggatgatccgaagattaaagaacttaatccagacatagctttaccatcagaggatataatttcagttcaccgctctgatggctccggtacaacttttgtttttacagactatttatctaaagtaagcagcgaatggcttgacagaataggcgttggaaaatctgtacaatggccttctggtataggatcaccaggaaatgaaggtgtagcagcatcaattcaaggatcaccttactccataggatatatcgaattagcctatgcaataacaacacagatgaattatgcgtcaatacaaaacaaggaaggtaacttcataactccatcatttaattcaactatggccgcagtagaagcagccgcaggaacattgccttcaggctcacaaccctggaataatgtaacattaacagatccatctggaccaaattcctatccaatctctagtttctcatatcttttgctctatcaagacatgagtactaatccaaacatgaatgaacaaaaagctgcagcacttgtcgaatttattgaatgggctataacggaaggacagcaattctccgaaccattgggatatgttccactacctcaatctgtaattgacatcaacgaagaaacattgggatcactaacttttaatggaaatccattactcactaactaatttttatttttttctatatagaatatatgttctatattaattatatatgtaaaatatattattaaatagtttttactttattggtatactttgcctctaaaagattctaaagatacgcatgccgagctggtaaagaagctggatctacaatccaaaaaatcaatttttggagacaagttttttaaagctcttgcaattggggcatctctttatacgctgttaatggttgctctcgtgttatttgccttagctgatggctctatacctatttttcttaaagaaggcattaattttgtgattggaactaactggaatgctgttgaggggagggaatcatttggtgccttgccttatataataggaacactggttagctcagcaattgcaatggtcatagctgttcccattagcataggaatagccatatttattactgaaatgattccaaaaaaacttggtactgttttatcttttgtagttgaattattggcagctgttcctagtatcatttatggtctgtgggcgttatttgtgttcagattctggataagagattttatagaagaacctcttcataactcatttggagattatatatcaatttttgcaagagctccttttggactggatgtctttacagctggaattgtacttgcgataatgattatccctattatatcagctgtatcaagggaagtcattaaggctattcctcattcgcagaaagaagctgcatatgcattaggtgcaacacgatgggagatggttaaaacagctattctgccttcctcaagaactggtataatgggcgcatcctttttgggattaggaagagctatcggagaaactatgctagtgaccttaattattggaaatgcaattggaatggccgctattcctacttctttgttctctcaaagtcagaccctctctagtattatcgcaaatgagtttaatgaagcatcaaatgatcttcatctttcagcattaattggccttggcttggttctttttgtaattactatcttcataaacgtccttgccattttcataatttcaagggtttcaaaatcctattctaatatgagggaataatatgagcaaagataataagaatccaaatcaaaatccaaatccaaacgagaataagaattacaaatcaatagttcaagagtatgtcaaaaaaaattcttcaaaaagaaagataataaataatttggttactattttgttatgtagttttgtaataattgctattatccctttaggctctattttaatagaagtatttaaaaatggtgcaggggctctgagcctcagttttctatttgatcccccgggttctatgggttcaggcgatggaggtatagggcctgctattcaaggaactctgttggttgtaggatttgctactttaattggagctcctgttggcgttttggcaggagtattcctgtctgaatattctagttcaagcagattgtttgcatatttccttagactttttaatgatgtattgactggtattccttccatcgtaataggaattgcaggatatattacactcgtgcttaccttgggctcattttcaatcttggcaggagcctttgttttatctgtaataatgattcctattattgcaagggtttctgaagagacattaaaactagttccaaacactttaagagaagcagcctatggtttgggccttcccaagtggaaggtagtatggcatatagtaattaaaggatctaagagcggtatactaactggcattgttctggcgatatccagaatagcgggcgaaactgcaccattaattatgactattctagggacgagcctattctttagtggctttaattcacctgtagatgcgttgcctctgagaatttggagattagcttcgcaaccgtatccatcagctcacgaacaaggttggggtgccgcattattgcttatattgctagtattatcactaagcattgctctaaggatgtttgctcaaaaaaggagtattacgtttaaatcgactacttgataatttatctaccttatctatataatactatatatttcatatagaaaagaaatattatgaatttgtggtataattaagtatctcgtggacgaattgaacaacttcttaaaaccttctataaataaagagattgattctataacaacttaccctaaaacccgacccgagaatgatgttaataatgtttctacctatgatagttctacatctagggataattctactttagatttgaaaatagaaaatcctaaactatcagtccaatctttgaaagcttggtttagtggtaaactagctttaaaggatattaatcttgatgttaaggaaaactgtgtcaccgcattgattggtccatctggatgcggtaaaacaaccctgctaagatgcattaataggatgcatgatttaactcctaatgctactgcggacggtaaaattcttttagacgatattaatatttacgacaaacaatcagatcctgtccttataaggagacgaatgggtatggtctttcaaaaaccaaatccatttcctactatgagtatatatgataacgtagccgctggtttgaaactcaatggtattaaggataaaaatttgataaaggatatagtccatgatagcttgcgtggagctgcattatgggaagaagtaaaaaatgaccttgataaaccaggaataagtttgtctggtggtcaacaacaaagactatgtattgcaagagctcttgcaatgcagcctgaaattctattaatggatgagcctacttctgccttagaccctattgcatctgcaaaaattgaagagttgataaatgatcttaagaagaatttgactgtgataattgtaactcataatatgcaacaagcggccagagtttcggattatactgcatttatgtatttaggagatttaatcgaattcggtccaaccgatcaaatatttaagtatcctaaaaaagaattaactgaaagatatatttccggaaaattcggataggcttattattaagttttttaacttttaatcaaagtggtacgattacttgatttagggctaactaaggttagcagcattgtttttgatatggctagtttagctgaaaatacagtgtccaaggctattacatcctataaggatgatgatccctccacaaaaaaacaaatatttgagtcatctgcaaaattgaggtttcttcaagatgaggtatcagaattatgtatagaattaattgctcgatttcagcctgtagcaacagacttgagatacataaaatcttgcatggagctatcttacgttttttcaagattcggtaggtatgcttatgatattattacagtattagaaattctaggaccattagaattgtgcgataaatcttcagtaattcgcatgtcaaaacttgttttagatatgatgggtcttgggacatctgcattacgattgcgagacaattctattttatctaaaatttatgaaatggaggaaatggttgatatgttgtaccgaaaaaacacgcgcgaatcatctcaaattgtcacagcaaacaattattcagatatccgatgcaatatctccaccgctttaatactaaaatatttggaacgcatttctgatcatgcatgctatattgcagattcagttaattatatcgaaactggtatggctagtccaagaagatagttaacgtgtctttttggcgattctttttctctcatcaatcataatcgtggattcatcttcttcatatcccagactttactcatatttctctgccggaaaagcatggatcatatacttattacgctatattagtacaaaatcaaagaccttggattttttgctcattgtgaatttaattattattaaataaatttaactatattgatgctttgaatatattgaataggttgaataaaaacaataagaagtgtataatatgtggatgctctggtcattctctttttggctgtttttctcattggaccggtcataaaaaaaataacggcatgtgtaataatctctaaaatctctatctctaatctcttatttcaattcataaagcgctatcactagttttaataaaattttttcattagttgtttcagccaatggtataaaatgtttttgagtttcttccttaattctagctattttgtccttcctccttgaatttttcaaagatcgaagctcatctagtcgttcagctagtatgatattctttaccatgttgtccgcttgctttatttttccaaactgtttttctacttttaattcttcatttttataagattctgaattgaaatatttactaaaaaatgatactattgtaaatgttttttcacttatttcttgttttatgtagtcattcgtctcattggatattccttgtttattagaaatatcatgaagtagtgccgaacaaaccagatctgaactattcgagttcatctcttcgtttagaattaatgctacccttagtgagtgattaatttgaggttcaattttatcatattgatattttctagtcataccgctgtaaatcctcaatgctaatccgaaggctttcgaaattttttctacttcgttcattgaatcctcaaatggttttaataatttggtaaatcctgttttaatgaaattatttttattatcattatccttagacatatctagtaatttgacctaagactttttggcatttcatccattaatgtacttttcatctgattcttaaactaccttgataaaagttcataccctggataacagatatatacattcataagtttataacattttatcagtttattgaatatatttacatggttaacgatgattcaagcaataataatgttgtaaatatctcagtccaatataacgatattaaggtgcaatttagtggagagcctgagaatgttcttttgtctaccatttcttttcttaccaaaaatattccagaaatacgcttagctcagaaaatttccttaaattattctgtatccgaattaatcgagatgtattcatcaatcatcaaaattacccccgagggacccaagatattacctaacctggcagaaattcataataaaaaattttcagataaggaaatagttatgctatttttattagggtcaaaaatagcattcgaattgggcaaaatttctgaaaaatcgtctcctgtatccgaaatccaatctacaacaaacctgaatccaaaatctatcagttcaagattgtctgaattagttaaagttggatatgttataaaaagtgtaaataaggaaaaccaagcagaatcagtagtgtatgggattaccactattggaattaaatggttaaatgatattatggcaaaaaaattactctaaaatagttacttttcaaacaatggtttcttctgaatatatctgtagtttcttagagttcctacacgggttaatatcccttctcttaccatgtcacttaaagaatgtgatactgctgttttatcataattatatccaattcttgacaactcttgatgaacctctataagtaatctctcactttcaaaaaatttctcataaaagatcttttccatcaaacttctacacgtatttccgttcttagcaagttcctttaatgaaacattgtttcttttttgattaatattttgcaaattactatctccattaattttagattttaatgaatcaatttccatctttagtttttcaatttcactatcggtatttgtacctgagagagaggcgatatctattccagtaaggacattctctactacattcttaactttatcctctacacatgtaatttccacttcccattctttatatttcaattttatctttgtatccaaagataatttcgataccgcttcactcatctttgatgtttgtatatacttcctgtctgataaagatgttgttgaacaacatgcacatcatgaacaacacttattaatatcctattgttgttgaacaacatgcacaatcaattaaatcttcatgatctggaatcaaatatagagaatatgaaaaaatctttaataaataactttagcaattcctacttctgtaaagactatagaaatttaattgaaaataaaaaactggtctttgtagacgatgaggagggcgtacccatacaaaattggggaattcactctgaaagatacgcaaacctgaaaataaatgaagttgaattagtggagaaggaaaaattagtttttggaattgattctagctgtattaagattgcagaagttgaggacggtggtttatatgctgtaaagggatccatttgtatatctttcaagggcaaacctgctgctcatttgaaaataggccctttaattttttaccttaatgaagaagctctcaagaatcttcgagttgagcacaatgtatccaaactaatactctttaatgatgattatgcaaaaaaatttttgagagtaaacatagaaagatatattcagttttggctatcaaaattagtttcagactctataatactgattgacggttcattgaaatcttcaatatttgaaaatcatttttacgatatttcgaaaattatagaaaattctgttatcaataaaaattcattaattggaataagtaaaaactccaaaataaaggtactaaagtatttatcatatcctttgataaaatccaaagtttcttcttttgtcgaaataaacctaattattcgaagcttgatatcccggatacatggagaccatctactagtaaagttgtctagtaatcaatactccaacatattgagggctgatgtagtatcatataacaacgataccagtggaaccttaggaacattactatataatgaattaatttattttggttatccaagcactctccaactttcacatcatgtctctgttttttcaaatacagacttggcaagtatgaagagttttataaaatctagctattctgttagagaaatttcacatgataatgctagatcttctgttttgggaaccgcctggagatgaaaatcctatcaaaaacaggcgatgaaattctgttactggcggtaacaaatgattttgcaaataagggtgactactttgttatcgaagattttaacaataataagaaattgcttgttcaattctacgacgaagaatatttttcatcatcgtcccttatagaagagataataaaggatgaggtgatttctaaatttagtactgaaaacatatttgatcccttggagattaccaacctgtctcaaacaataagggatgttaggatcttcaaaactaaaataagagcttctattgataatgacaatcaaatatccaccgatgtagattgggtaccatcgagagtaaactccaagatcgtcaaaattggttcaaacgaaataaaggctttattgaagaaaaacatgaggtatccaatttccttaggtagatgtggatctgacaatcaaaactttgaaatttttgctgaagatctagatggtaaattaaacataatcacaggcaaaaaagaaacgggtaaatctcatctttccaaaatattgatcaactctctcatacaatatggtgcctatgtaatagtatttgatctaaataatgagtatagtgggctgtcctataatattgatggaacaccctcatctatcagtgataagcttcttttattagatcccggaaaagaattgaaattcaatttaacatattttggtaaaccttctatttctaatatgttaaaaaatgcattagatatgccttctgcttcattaagagaattttttagaatatgggattctctagagaataaaaagatacttagtttgttggagcttggtaaagcttttggaacttggactattaatgaattggtgagggatgcacttttatcccgattccatatgattaattcctctcgtctgtttacgtccaatagtgtatacgaaagagggtttcaatttgaggatgtaataaaaacaaaaccaagaggagctgctatgatagttaatatgagcaagatttctcctgtagtcagacggatgattgttgagctggtgatgaataaattaattgaattattagaaaaatctctaattccacctatttttatatttgctgaagaagctcaactatacattcgtgatacatattgggaagatctgataaccaggatgaggcattttggaatttattctacatttattacaaatcaaccagatgctataaatgatactatatatagacaggttgataatatttttttatttaattttacaaacgattcagatctagaaaaaatttcaaaggtatcgttagtagactcctcaactatcaagtccttagttaagacactttcacatagaaattgtttggcaatcggaaaggctgtgtcaaatttgccaatggtaattaaaataaatcccgtagacgtgttaactttgggagaaacaaaaaaatttttcaaatgagtggattgccttcaatcgataatatgaattcgttttcagagattctctcaaaatgatactcgatagaattgagcattctaatcacttccaaatttgttaatagatgagtcgttattcttgatattttgcacctggattttccgttaacaaagcttaatggcaggactagcatatctgctaaatgttgatcaatacatgcgtgaaattcataatcatctataaatttctttgcgactctacttcctattatttctgctttgacgcctttttcaccgatagaatcagcccccaaatatatacctgattcggaagtgctgtatactagaatcgaagatcctggactctctgcattttctaagatagacttatgtttagagtatctgatgccttttttctccaatgttgctattgcactcccaatttgtctctctggaatgtgttttggcaaccttcctgcaatgcttattatactcggttcaacttctttgaaattacaaaactctataggatgaagatgggtggcttttcttattctaatttcaacaagcccttgtcctctgggatagaatcctctttttaggacatttaggtcgaatatgatcccaattttggaatatgcctctcttaatacatatttaatataatctatggttggactatatttcacatcggttccgcctgataatctgattaccaagtctttttcagaaattgctattgctggaattaatgtctgcaatagtagtggtatactacctgcagttccaatgtctgctactatcgtgtcatttgcaggtttatcatattcatttaacctattatctttagatgcgtcaaacccgatccattccgatcccaaacttacattttcggtatgtatgttaaatattcttgaaagtaactgaattgttaagacatgttgatgctttaaacctggatcccttctacttgatcttatatttattacttttactggggtgccgattattgttgaaatagtaattgcacttctaagaatctgtccacctccttcgccgattgaaccatctactaataacatttacaactattcctcaaaatatgatcagtgtgattaatgacgatattctgtggtagcatgtgattttgataagttgtataattcctttatcctgtctgttccacctatttcattgattagttttatcgtgggcttgggtaccagctcttgccaattcttgtcacttgccatcctgtaccttacttctgtggcagacagacattctctattaatcaaacctggatttattatttcaatttctctttccttgtatagcatactagtaaagagatcgtttgtaaaaacagtactatatctaggaactaatagatccatattatgtgtccataataagtgtaccccgacatccggaactgggatgggaataattttatcacgtttttctatgatctcagtgattatattttctctaattatttctattctttctccagctgtgaaaggatttcttaattcaaaacttttgtctgagcttcccacagctactatcaactcatctaccctatcgctgcaccatttaagcgaatataaatgccctttatggaatggttgaaatctcccaatatacagtcctcttttcaataatttttttatattgtttttgattaaaaatatatctaaattacttgtattcttttagaagttcgtgttattatatatattaaaaaagttattataatttatctgctaaaagagtctagtattgtcgtatagtagatttggacgcgaagcagaatatgcagcaggatcgtgtcttaataactatggttgggccgtatttttttcaaagggcagtagaggaccagctgacataatagcgagtcgggacaatacccttttgttaatccaagtaaaatctagcacaaagataccaaagattcgtggagccgaagtacataatctcatacaaatgtctgaaaaaataagtaacagctatccattactttcgttggttcaccctcatttagagtgtaatgtgaacaataatacaattctgtttggaaactatttgattaatttcttcattttacctcgatgggatagcgtcgattttctaaaataaaatgtttaacgctcaatttttgattaacaaatcagtgtatgtgcgaacctacatcattctctactaaagcttttccaaaactcttttaccattttttcattcatcctgatagaatttactgtaaactccttccaaaattcaattagattagagatataattttgccatggattttcgagttgacttggatctgtttgaacttgagtcggttccgcttttattctcaatgccttgtcataatctttaatcttttctccttgaaactgaggcactaattcagtctgaaaatctgttacattgctggaaaccaatttcattatctcttcattattaatctctttattggttccgaaaatgactgtttcttcgcccaatggaaaattatataatttcattttgtcatattcaaatattacggactccaaatttcccaggtccgtaaacctttttccagcttccagtatatgaggcgtttgaataatacttagtttaacgtcattctcatcaattttgttatctgggctaaaacttatatcttgattaccattctttatttttccaataaattttattcttgaatcacgctgtaatattacattagattcttgtctcacgctcatcgctttattttttttacaattacgactatatttagattcttttattgaaggaattattgttagatcgtattgaaggaattatcatttcatattaattcctcgatttttcttgctaatattatatcatttttgcttatactatttatatcatgagttgttaggtcaatatgaacactattatatgatattgtgatgtcgggatgatgattcattttttcagatattattgcaatcctcgtaataaaactaaaagattcaataaagtctttaaatttaaagttcttacttagtttattttctactttctcccatccaactaaatcctttatttccttttccaagctttccatgaaactttatgaatccaaaaattattaaacattgttaaatccagaaccctggtacttttaatttagaattaatagagtaaatagatttgtaataggttgatttctggaatgaggtgtcttaatactatttgttgaggccaaggtaaggataaggacaacagtaacataatttttcagttcttttagtgtgtagagtctactaattctaaccgttgataactaatttaatattaaacttccttatacttttgtataattatggtaaggatttcgattgtccaaatgaagtcgtcaacagacaaaaaagaaaatctggcattctctttggaacagattgagcaatctgcaaaaagagatgcaaagattatttgcttcccagaattccagatgtcattttctccaccatcacaatctagcaaagaattgttttcgatttctgaatcccttgagggtaattttgttaagcaattaaagaaaagtgccagagaaaacaatatctttgttgttggttctatttatgagcatacaaatctagtattaaccaatatgaaacaaggtcaggatagtaaaattaacaaaaactcttatcgtgtttatgatacagtggtattaataaatggtcaaggtaaattaatctcttattatagaaagctgcatctttacgatgcacttggttttaaggaatccaccaaattattggctggaagtaaactattttctcctgttatttctcctttgggtaaacttggaactttggtttgttatgatttgagatttcctgagctgtctcgaatccttgccattaaaggctctaatgcattgatagctccatcaggttgggtgcagggaacaatgaaagaagatcattggttaataatgtgtaaagctagggccatagaaaacggagtttttctgattgctcctaaccaaattggcaatattttctgtggtcgaagtttaattgttgatccttttggtattgttgttatggatatgggtaatactgaaggatttgagattctagatttggatctatctaggattgacgtggttagaaagaatcttccgttgttaaagaataggagaaaggatttgtaccacatacactagatagtaattgaatttgaccgtatcgatgactttctgtattaggattcatggcatcaagcgttactgaactttatcagaatatttttctctattttcagttgcttactataaatgtgagtaaaatcgataatgttacctatagaaggttattgtaaggcgcgtatccgattagtactcatagaatattcaaataatcaaaacagaatcaaccatattgagattttatgcattcactttacatttttattatgctaaagccctttctaagatatatgggtgaaaaggtctatgtacttggtgctggcagtacaaagtatggcaaattacatgagagtattattgagatagccttaaatgcttcaagagatgccattgaatcagccggtataactccaagagacgtgaaagctggatatatttcaaacgtctttggtgtggctgataaacaagtgcatatggctcctgtaattatgagtaatcttgggatccctgatgtaccaggacttactatcgaatctgcttgtggttctggctctgtaatgtttagagaagcatttgcaaatgtatctgctggattttatgattgtgttttagcactaggagttgaaaaagtaactcataccagtacagttgaaagcacaaccctcttttcctactgctctgattttttttatgagggaggtaacggagcatcatttcctggtctttttggttctatggctagggcctatttggctacttataaagcgacagaagaggatctggcccgagttgctgtaaaaaatcatgaaaatggtcttcttaatcctaaggcccatgttaggaagaaaattactgtagaagatgtattaaaatctcctgtagtcgcatctccactgaaattatatgattgttgtcccttttctgatggcgcctcagcagtcatattgtgtaatgaggaattcgcaaaaaaaagtggaaatccatatatggaagtagtgggctcaggcaggggtgcatcgcctgcttcagtccaatctagaaaagatattaccactattccaagtaccgttgaagcatcccgtcaagcctataaaatggcaaatctatcgccaaaagatattgattttgttgaggtacatgattgttttaccatagccgaattaatagacatcgaagatctaggattctttcccaagggatctgctgctcaggctgttagagaaggacgtaccagattaaatagtgatattactgttaacccgtccggaggattaaaatctaaaggtcatccaataggagcaactggtgttggccaagttgtagaagtgtttgaacagtttactaataaagcgggagaacgcacggttaaagatgcagaaatagctatgactcataactttggtgctaccggggctagcgcagccgtacatatatttaagaaaataaaatagacggtgatactgcaattgaccgaatcaaaaccaatgaatcaaagctcacgagaacggttcatcaaatctgcaaaaaatgggaacatacttcttaataagtgcaataaatgcaataatattatattagaaaccgtatattattgtgatagatgtttttctagctcttttaaaccaatatcatatagcggtaagggcacagttgtaacctttacaattcaagcagtcgcaccagaaggatttgaagatgccaattcgtatgcttgggttatttttaaattagatgatggtgacataaatgtttccgggtttctacctggaatatcttccccctctgatttgccattgggttctagaattaaagtgattgatttccacgaaaagcatggtttaatattgcaaaaatattagtaggttaatgtcgtagcatctagctaaatttaatcttcctttttgtttacagagtttaacatttgtttttaacaaatgtattgattactcattgctagatggaaaaaagtagcttttattatgatgttaacagcgccatatcagtgataaatacgcaaatttcccaactcaaaataatggatacaaaattttctaatattgatgctaattttagctctaaaataactcaaaatataaaatcaggaaacaacgcacgtgcaaacatcatagcaaatgagttatctgctatgagaagacttagaaagaacactcacaatgcaaccacggcattagaggtagttgcaatccgattcactacgataaccgaattctcaaccgttatggatactattaatccgacagtagaaatgcttcaagatatacagaaagatctttcaaaggctgttccgtctgcaaccgatgtgttgaatgacattcatacgctaactggtgatgtattaattaattctaatatcgacactgatgctggtaaaataagctctgtgatcgataaagatgccttggccatattaagtgatgttcaaaatagtttggaagacgaagcaaaagaaaaactacctgaagttccggtttctgtaatttcaaaaagaccgagtattaatttaaaggacgatatactcaatagtggacaagtgttattagaaaactaggttttaatcaaaccaaagcctctaatccttatcctgattgatagttttatttatatactaataatcagactgctctttgtagttgaggtatacatatctgcccccatccgaaactaaacgtggagttttggaatccacatccaaacgagtaagaatgattttttcagtaatggcaagtcccaatagaattgatattttgcgtattcttaataataaaggacctctaacctactctgaattaaaatctctggcaggatttaaatcaaagaaagaatctggaaaatttgcatatcatctgagaaaactactgagacaatccttggtgggtctgaataagggagaaaggaggtataccattactaatctaggtaaattggtattaaacttggctagacagatagaagaaaagtctatagttgaaagtggaaagatgtatgttagaactagtcaacagaccattgaagaatttaatcctcataaaataattcaatgcttggttagagaagcaaatatgtctttagaacaagctacaaaaattaccgaagaggttgaaaataaaatatataaactctcaacctcttacttgacatctagactaataagagattgcgtaaataatgtattactagagcatggcttagaggaacaaatgaataagttaattcgaatcggaattcccatttttgacttaagtaaaaaattcctccataatgataatttattaaaaaatggcataaatgacctgattacagatgtttcggaaaaagtcttttcagattattttgcaaataattttcaaaaagatattatggatatgcattatagtggtgaggttcatttagatgcattaggtcattggggcataggcgctgatactgtttttattgatattgaacaagtaaacaagaacttgaatctcaaaggccattttctttttttgcctagaactacacatactcacaaattaaatatcactctgcctatcttggtctcattacttcaaagggaagtatcccgagagatagttatagaaaacatcgataaaatttttggtaattatacgattgataaaatatctgaatatttttcactctcattgatttcatcctctgtttcaatgcaatttgccagatctccatttataacacttgttttaagtggaaaggaaaatagcgaacgtttactccaaatgctaagtggatatttgtcatatatagaacaagtatctctacccaattttggactttttataacttttgcaaattccttatctgatgacttattgtccattcttacaaagatcataaagttaggtggtagaatatctctttcacaaaaatcagctcgtagtagcagaggtattcataagataaatcaagatatggggctgccaatcgtcgcactacattcactttctataaatctgccacgtttagcttatcagtcaaataaagatgaaacctattttaggactaaattagccttactaatgagaccatccataaatactttattactaaagaaggagatattattagaaaatattcggcaagatatattgcctactctatccaatacgataggctttccacaattgggtactacttccataattattaacttgactgggttagatgaatctattcatgatatattgggattttccaaagatatgggatttgatattgtaaagaaagtggttaaaacggctaacgacgtactacttgattttgggcaagataatacagacaaatttggtgtttccatcataaatgattctagttcaacaagatttgttgaccttgattccgagaaatttggtaaattgacccacgatttcaaatcatattcacaaggactagttattaccaaaaaaatgcttgatgaggaagattcattatctaaaaatataattgaattggataatcttatgactggaggtttgtacataaaactactcactggtgatgtttctcctcaggaaatggtgaaattgttacataaagctattcatattattccctgctttgatatatttgaggagaatcgcatatgttctatatgcggaactcgagtggttagtagtgatgtttgttcagtatgtggatctcgaaatattggtacatctaattaatatcaatatattcgtacatgtcccataaactacaccattgtagaatccttagccatttttatatatctgttagattgttcataattaattattctaggtccattataacatgaaaacctattatatctgctatactttcagcctagatgtaatcttatttgaaactcgctaatttgtaaaataagctatcgaaattaatataaacgatctataaataatatataaatgttatatggctgaaactgatcttcatgattcaaaaaataaaaccattgtacatataaaaaaaagaaatagtacaatagtgaattttgagcaatcaaaaatatcgaatgcaatttacaaagcattggttgcagctggtaaacccgataataaattggctgaactacttgcatcaaaattggtaaataaaattattaaaaatggatacttggagtccattcataaagatcatgttttgagtgtggaagatgttcaagatatggtcgaatcaattttaattgaagaaggtttggctgagaccgctaaagcttacatcctatatcgtcatgaaaggagaaaattaagggaaatgaaaatgaagatcctaaataaaaaagatcttgatgaagtagataaaaccctggatgtcaattctctgcgtgttttatcttcaagatatttattgagggataataatggtgaaattgtcgaaggtcccaagcagttatttgaacgagtcgcaatattggttgctatatcggatattattcatgactctcgggtatatgattttcatgatagtcatacacagactttatctgaagcagaattatattataagaaattagatgatttcgatagcaagttaaaaattggaggttattatttcaataaatatcattttgaagcattaatcagatcatatcttgatgaggcaaaactgggaagaatgagaattagttttaaagatcttttacgattgattgcagaaggaaaaatgagcaattatggcaacaaaataacagaatattataatttgatggtttcgaacgagtttcttcctaataccccaactcttatgaatgctggtgcgaggttgggtcaactatctgcctgttttgttcttgatatgcctgatgatatgtattccataatgaaatcatccactgatgccgctatgatttttaaatctggaggaggcgtgggaataaattattctgatttaagacctgaaggggatatcgttgcatctactagtggtgttgcatcaggaccaacatcttttatgcaaattatcgattccattacagacgtagttaagcagggtggaaaaaggcgtggtgcaaatatgggtattttggaatcttggcatcctgatattgaaaaattcattacaatgaaaactaaaccggggacgtatgaaaattttaacgtaagtgtaggaatatggtcggatttttggaaatcattagtaaataaagaggaccataaatataccttgaaaaatccacgaactaaggctaatgtgaaaaatattgattctcatcaattaatggagttaatagctttgagtgcatggaaaagtgctgaacctggtgttatcttttttgataatataaataaatacaatccttgtatcaatgctaaaggggggccacttagagcaactaatccatgtggtgaacagtcattgtatccatgcgagtcctgtaatctcggatctattaatttatccaaatttgtaaaacgaaaagcagatggaatgtatgaatttgattggcccaaatatgaacaatccatcagaactgctacacgatttttggataatattatagacgttaataaatatcctgtagaggaaattgatatcaatacaaaactaactaggcgaataggattggggattatgggtatagctgacttgttgtttatgttacagatcccatatgactcaaaggaagggtatgaattcatgggtaaactggctgaaacattgtcatactttagtatggatgaaagtgtcgtcatttcaaaatctcgtggtgcattcccgttatttgatcagaccgagtataaaaatggggatattccactgtcgggttattatgagatccctaaggattcacattattatgattgggactctttaattggaaaaattaaaaattatggaatcaggaattcatggactactactatcgcgcctactggcactttatcgatgatttcggatgtatctaatggtgttgagcctgtgtttgccttggtgtttgaaaaacgtgttactgttggtaggttcttttatacaaataagatttttgagaatattttgaaagaacatggattatacaccgacgaaattttgataaaaattgcaaataattatggatccgtacggggattaaatgaaatacctgaatggatgcaaaagctatttgttacagccatagatattcactggaccgatcatgttatggctcaagctgtgtggcaaaaatggattagtaatgcgattgcaaaaacaatcaatatgcctggagatgttacagttgaagatgtaaagtgtgcatatctacttgcccatgaatttggattaaaaggggtgactatctatcgagatggctctaggaatgaacaagttttacacataactggtaatgatcgtgaaaaaagattccaagttaaaccaagtaagtatttgcatgattacattttagcaaacatacatgaaccttatgttcttgatcaggtaaatccaatttttaaggattctgaatcgagtgatcaaaataccgttgcaactaatataatcgataatccactagaacccaatagttttgaatccgatattgtatcgattaatactaaacctgatctgtactctctttctagaacagagaacgataaagaagcttgcccggtttgtaaaaattacttaattattacagaaggatgtaacatgtgcattgaatgtggatttagtagctgtggctcaggataattttttttatccttgctatctactgaatgatagcatattttagcagtattaattacatggttattcatgattaaaaatagattttttaatcgcaacatagtgtccattcgtgattttaatatggatgattttacttatctctttaatattactgataaaatacaaacattgagatctagagagcgtggggaaatcgcaaaaggcttaattcttgggtatatcttttatgagtacaggtactagaacccgattaagtttcgaatctgccatgtcatctattggaggcagatctttgggaatatctgacgtggattcttcttctatcatgaaaggagaaagttatgccgataccattaagactatctccttatactccgatatcattttaatacgtcatccttctgatggttcgagtagatatgcttgtgaaatatcagagaaacctgtgataaatggaggtagtggtagcgaagaacatcccactcaagctatgttggacatttataccatattcaaagaaaaaaaaagaatcgatggtctatctattggaataataggagatctaaagtatggccgcacagtatattctctaatctatgcactatctaattataaagtcgaaattcatcttgtttctccctccatactaaaagttcgaagcgaatcgatatacgatatctcaactaaggtaaaaatgtatcatcacattgaattatccgatgacttgttagaaaaattagatgtgatatatgtaacacgtattcaaagagaacgatttccggatcttcaagaatataaaaaaattcaaggattgtatactattgatgaaaatactttgaagaagtcaaaacctgatatttctattttgcatccattacctagagttgatgaaatttcttcatcaattgataatactgtaaatgccctttattttaagcaagccgcttatggaaaagagttaagggcagctttgttatccgcactcctgcatgaagaacctttctgatccaaaaagttatttccaactattattttaatatgataatactctcttgtattaaagtatcaatctcaaacaaaagaatccattacctctttcatatatttccaactataggtttcgtttatcgagtttaatgacactcgacttctaatgatcattttacagtaactactaaggtaattcatacatgaggctagctttaactttatcacattttatgaaatcaaatttacattaatctttgataatggatgtccaaaaatttttcaaccgagcaatttttaagagatattttccctaattggagaaatgttgtaaatagtttgctattgagtgatctctttcaaaaacactcttgaatctagcttagaaaattcttgtaaattaatatttgctccatcctttatcattcttcttaaatattttccggcttcttctgattcccaccaattttcttcatataattcttcaattttttttctaactttgtagccctcacagcagctaataaataacttggtacatgtattattgattctggctttataaggtgaagcatccagtactgccctagcatttctatatttgtatattttttgatcatcgatgagtaaattttattagtattttcgatggatgaaccctttattcatccaaatatccatttttgttaatgagtttgcagaatagaaagtcacgaaaaataatttcataatattatttagttcaattattttatccaactctcctctatttgatatctttatatttttttaagtatttcttatctctatcttatttctagttagtctttccaaaaagatcgagaatatctcgttaattcccattggaatatgatattttcttcgtattcattcttaaatcccttagagtcttgataacagctgaaataggatttacatttgcaaattcatctgagatatctttaaaaaccctgttcctaaaatagtaaaaatcataatactctggatttctatcagaaattttattagatagaatgacaagcctttcgttaaatagtttacttgttgcatttgctaaaccttgtacaaattcttttaacttgttgtatgatactccttcactttctaaatactaatacagaagattcgttcctccatcatatttgtatatgtgcctaattctgttgaacctcttttctataactggttttaatacttctgttttctcaataaaacaatcaaaaatattctttctatgattatgatttgtttctatcgcgctaaattgtctcaagttgctccagtttatataattatcttcaattctctatctcttgtacactaattttgtatttctgagctcatgtaattcacgctctaaacctttagtcttatcttccgcaagactttctaagaatgacaaaaacaattctctaggtgtatcaaacaatttcaaaaataatcggcaaccttgaatcttcaattttgatgtttcttgaattatggcgggattgtactttagacctgcaaattggtaatatggttctgattttggattatatgagcgttttctaatatgttccttatattatctattttcatgaattgattataaaaattaggttagagtgaccttatttatatttgcatatttaatccatttcataaatttcaaaataggtttccatgctaaccttttgcaattcaatgaatgatggcagacgtagttgactaactcgatataaataggcctctgtataccaatacatataatttaactagtatcaaataaatgatgcaaatgcaagatgaacgatctagttgtaatggcaggattctgatatctaccttctctgatgagcaatctttaatcaatttatctaaaacactaatagtggagaagaaattatgtgcatgcgtaaattatacaaaaataaattctttgtatgtttgggaatctgaattaaaacaagaagaagaatttattgctttttttaaaactacctcaagttgtatcccaacattgaaggctgaaattctagcacaacatccctataaattacctgaaattgtcattattaagatggacgatgtttcatcagaatatctttcatggattattaataatacacacaagaatactcctaatctctaatttggattgatatcatatacataatttcttctacatcttaacattcataatctaatgaataaatgatattttgtggacttccattaaatattaatattgaaagccttttttcaatttaacgtataatacctaaattgtgttgtgttatatgattacaagtcttacttcaatttattcggtaccgcaataatgcaattattccacctagtgatgacacccttaatccaatatcggtagttgaatcagttgcaaaaatttttgcgttattgtattccatatcatttagcagttttatgaattcgtcttcttttatctctgaaaaaactttgtcagaataaaccaacgcatcaatggcatttaatgaatgagcgtactttatctctttgattcccattgcatattttttttctccgttgtttatttgctgcattactctatctagaatcatagaaaccatagcaattttgctactggacataagatccttcatggcttctgatcttaaaaatacataaatcccatcttcaccagctgtttcaatcccatccgctatcacaaaatttttgttttgataggattcattttttccccttaggtagttaaggaatcttctctttgtttctcctggaccaaatattaccattttaattccttgttcttccaaataaatatctaaggcagttcttatgttctcaaaatagattttattatttgactcatttctttgatcagtaacgtatcttttgccactctttccggaatatatgttaggtgttatttttaaatttgttccagttaattttgcaatagctgtctcttgtgagtccattgagataaataaatatttaaattcaagagccgactttgaaagtatttttatatagttttcattccaatttgatttttctaagatgattgtatcattaatttttacgttaatagaatgatgtaaacccctgggtatgttatcattgttcgatgtaattattattcctgatatctttaatctatctattgcgtcatcaaaactaattttttctattcttaaacttatcctgattttgattctttctcctctgtctggtctagagtattcattatcctgtttgattactcttgtagtatctgcaataatgctatctccgatatctattactcttcttagactaaagagatcatctggttcttctaaggttaagactattctattttctgaatcctttactttattgaatttcatttcttatttgtgtcatatttaaccaattctttaccttgtttctgaattttcaaacaatgttcaaaccactgtctggttaaaagtcttgattccaccccattggctactgctttaggtaatgctctggctataacttttccagtcttgttctttaattgtctcactttcaaaatggtatttccagttttcgatgaatagattattccaagtacttcttttgcatttacaaaggtaatttcttttaatttttttaccatgattttatctgctgcttcaatgtaaatatcgcctagtctgatatctctttcgggaaaagtgtctgtctctccattataattactaggaatgaatgatttacaagtaatgaaaatcataaattttctaaaactttccaatgatgtagtttctatgcggatcactacttttctacactatgtgttattggtacaatgcatatatgtatttgaaatttaaatctaaattcaaattattacaaataaacataaataaatcggacaaactctttactcaagatctacttcatctaatcagtagggcttttcacatcattgtttgtccttactatttttaattattctgttataaggctttagctattcgacctatttttttgcatcttgccacaaataatggaaatagtctttagcaaaactagctaaccccgtgtgctctgcccatatggctatagtgtcataactagaggcagttgttggatcgttttttccttctccaagtagaattaatacatgcttggaatctcctatgactccacctccaaacatatcattcttgagtcttacttcagctactctagacattgcttttacggtatcactattagtttcatcggaggctaaaataataatttttactcctttttcagcgagttcgcggagcactggctgaatcgatcttacaacattctcagggattttagggatggctatcaagagctcttcttttgttgatctaattatttcagttacttttattgctatgttgtataatccacttaccacccaaatatcaggtttttcctttaatccggttttttcatagattggcattaattcatttacaattacatttttattactcctcaaattgttctccatttctatcatcatggcttccactgcatttgatggtgatttaggaaaaaaattctgtggcctttgattatccgaatatatccatcctcttacatacagactatttaaaacatcatagatttttgagtatggtactccagatttcttactaatttctgatgctgtatttgaactggcaaacaacaatgaagtatatactcgaatttcgtaatttgttaatccaaggctttccatagatttcttggccttgtcgctaatttccatcgttttatgtgattagtttaaacttggatattaaatctttcatctatgttgtgctttactaactaaacaccgtaggattcgtcagatcatctttataaagttaatcatatgaagtattaaaggtcaacattatggatttaatacagatttccaatttaactagtaaaactattggttctaaacgcaccattaggtatactcaaagtatatgcccagattgcaatatgattctagacgctgaggtctttgaaagagaaggcaaagttttcatgacaaaaacttgtcctagccatggtgagtgtgaggaactatactttggttcatatgaaatgtacaagaaatttagtacatattggatggatggaaaaggtgcgcaggctcctaatgttatggttgataaatgtgcctgtcctactaattgtggtttatgtactaaccatctttcacattctggcttagcaaatattatagtcactaataggtgtgaccttacatgctggtattgcttcttttatgttaaaaagggtttagagggagcttatctctatgaaccttcacatgagcaagtgcgtgcaatgatgaaaactttaaaggctgagaaacctatagcaggcaattctattcaaataacaggtggcgagccaatgttaagagatgacattacagaacttatccaaataatgaaagaagagggtgtcgatcatgtacaactcaacactaatggcataaaactagcactttcaccggagacaatgaggcaggttagaatgtctggtgttagtaacctctatttgtcatttgatggagtaacagccagaacaaatccaaaaaatcactgggaagttccatatacgctagaatctgcaaggaaatgtggaatgactgttgtttttgttccaaccgtaataaaatctattaatgatcatgagttaggcggcataatacgatttgctcaaaaaaatatggatgtagtacatgctgtaaatttccagccagtttcattaactggtagaatgagtaaaaaagaacgagaaaagtatagaattacaatacctgattgcattgaacgaattgaagaacaaactaacggtgaaatatcaaaagatggttggttcccggttccatcatgtatgccattaacaaatgtgatagaggcctttagcaagaaaccaaaatatgaattatccatccactttgcttgtggtgctggaacatacgtttttgaagatgttcaaacaaagaagctgacacctttaacgtcctttgttgacataaaaggactcttagagtattttgaagaaaaaactgaagagattaaatcgggttcaaataggtattggaccatgttggaagtaatacgaaaacttaatcagtttgtagatcgcagtaaacaaccatacggacttgatttaggacgcatgttttcgagtattcttctgaaacagaacttcgattctgttggttcatggcatgtaagatcattattcttagggatgatgcatttccaagataagtataatgaggatctagaaagattgcagagatgtgacattcactatttgactcctgatttgcgtatagtaccattctgcgcatttaatgtaatacctgaatggtatagggataggatacaaaagaaatacagtgtaccagttgaagattgggaaaaagagcatggacagacattagaagctggattgtatcgtggtattatgagaaagggcaaatcagaagctcaaatgggatgtgcgatgtctgagatgcataaagcagctgcagaagcagaatccaatgaggaacatcgaggagtcgagctccgaaacggaatggctggtgcataaaaaccaatcttcttttaaaaagtaaattttttattttttttatttttgtaatcgatggcttaaccttcaaatttattattatagatgtttttgtagataattttaaatagcttgaaagtgtagtaatatacgtaaatgccgtcatcatcaataaatgcaattactcgcatgagcgcgaccttaaaggatctctttatttatatttatgatctgtcgccactagatatggatctgttgcttaccttaatagcacataataataaacaaatgactttggaggatttgtctaaagctgtaaatcgtgacaagagtacggtatttagatctttacaaaaattaacaggattaggaatctgtgtaaaagaaagcagaactttgaaagaaggaggacatttccacgtatattctgctatctctagagaaatatttaaactcgaaactgaaaaacgtgtaaaggaattagaacagagtttaagaagaatattgaagaaatttgaagatgatctagaagtcatgttggatgatgtttttgacaccaaaaagaaaataataaagtagataaaaataacctcaaaatacatggattttaatttagataaggtatttgagaggtctgatcaacaacaatttgatatttttttaaattcttattattcatttctttttttaaaaaagaattcattctatgatgttataaaatcgaaaagtgtggtcaattcaccttcaatacgactgttgatttcatgtaaggataatgatcaatatgattcgatagtggatttttttaagccctttaagaatgtacaagtaaaaaatgtcttatcgtctactgaacccactgaacacatgattacaattattgttgaccaaggtcaagtttattttttcaaaatagagtataatatcaataagcgaatatttagatgtaagttatccgattcgattacaggtgatattgctaattttttcgataccctttttgtcaatctctggaatactatagataaaaatatcatactcgaaaaacgtaatatttttcaacaggatttcgttgatattgcctcccatcaattaagaaatcctatattacctatcataggattctctaaaacattgaaatcaaaaattgaagatcctgacatgttggaatatctcaatattattattaagaatgccgaaaaactgaagaatattgcaaatgatattttggatatttctaaaattgaagcaaatccgctaaaattgtattttgaaatttttgatttatgcgaacttttggagattattgctagagattataatcaactttcaaacaaagactcttcaggcattcagatactttttcaaggccgccctaatgtacttatagaggctgataaagaatacattaaacaagcatttgaaaatattctaaataattcctatttttttacaaaaaaaaatgaagggaataagattattatcagtgtctttgagaatgatgatttctatgctaatatattaatagaagatgaaggacctggcattccagatgatgatccagaaagaatttttactaaattctatccaaattctggaggggctggacttggattgttcatttcaaaaaagattgtagaaattcatgggggaagtgttgctgttggaaatagggtggacgacattggagcaaaatttcttattaaaatcccattgaaagggacaaatgtggctagtcagactgactacaataaaccttctgatggtcttaaactcttaattattgacgagttttcagaaaacttggaaacgattaaagaatcaatagtaagtttgggatacaatgttgattattttgaagatccttacaatgcgatagaaagttttgtcccgggaaaatattcttttgttttcttaggtattaatgtcaaagggctagacggctttgacctatacgatgatttaaaaaaaagagataagaaaattaagggctattttatgtcctcaagtaaaataaacaaggaagctatggaatttttgaatatcaatatgatgtatgatcactttatttataaacccctttctctcgatgtatttgtaaatattttacaaaatgaacaagtgaattaaaagtatcggccgcacaacagtaatattttattattcgtttgctttaactggggttagcatgaatgttctaatcatcgaggatgatgatgatatttgtcaattgtattctatatggttagaagaaaacagacatgattacattattgcaaaaaactatgaagatggaatatcagaatacgaaaagtcgattcaacaaagcgacgaggatcataaatcgaataatgttatatttgatttggttgtcctagattacgatttaccatcaaaagatatgtcttccaatcaaaatggtttacatatagcaaaagagatcttggagttaaagggcgatcaacgaatcatgttcgcatcagcttggccaaaaaaagcattcgtcgaatacgtttcaagactaaaaagtgtacctgaagttcttccaaaacctttcgaaaaagaggagtttattaatctagctgaaaaaattaacttatatgatattgccaaaaaatttaccaaacaacttcgagaattgaaaaatccaaatagtcctgatgttgatatcaaatcactagaatctttgtttaaacttatgaacaatgcgagaagagaatttttgcagaaagataataataaaaatgatgatatcgattttattgaataatatttgataagatttattttaaagagccatcgaagtttgattatgtcttccatgaaatatgttcaaatagatttacttaatgaaattgcaattttaaggataaatagacctgaagctttgaatgcaatgaatctagatgtaatattcgagctgactagagcaattgacataatttctgcagatgagggaattaagctactaataattaccggggcaggagaacgctctttctgtgcgggtgctgacatttcgtacatggtaaatattgatgctgtaactgctgaaaaatatgcctcatctgcacaatccatgctaaataaaattgaaaagatggagaaacccgtaattgctgcaataaatggttttgcacttggtggtggttgtgaactatctttagtttgtgatataaggattgcctctgaaaatgccaagattggtcaaccagaagtaactattggcattcctcctgggtggggtggtactcagcgactacttagggtagttggacctgcaaaagctaaagaaatgatttttaccggaaaaatgattactgctcatgaagcttccactataggattagtcaaccaagtaatttccttatcagatgaggaaaagtctagtttagatccatctatcgatcaaaataatgaaaaggagaaaagtattgcactttcaaagttactaaataagaaacttttggaatattgtataacttttgctagagagatcactaaaaatagtttcaatgctgtaaaaatcagtaaaatgctaattaataaaggtatggatgcagatattgatactggattgaggctagaaatttatggatgggctttgtgttttgctcacgaagatagacagaaaatgatggaggcattcctcagtaaaaatattaaaaaataatctattttctcagcaaagaacggattttcatttcaacgaaattatttttgatccattacctgatctagatataaatgttttacattttacatttattttctcatattcctcttccatgacttctgatagacgtagcccctttttgcttgaatctaaaaaagctaccgtagaaggaccagctccactgatggtaaaagccatcgctccctcttctaacgatctttgtttaattttttcatatcctgggatcaatttctttctggcgggttctataatacaatcatttataccattacaaatcatttctatatccttgcaataaaagcctgcaactacggaacatgcattagcgacattatgaaccattttttccaaaggtacttgctgaggaatgacttttcttgaaaactctgtcttcattttaggaacttgaataagtggtacgcatataaccatagatagattatttggagattctattctgataaattccaattttgggtaagtcttgactattacaaaatttccaaaaaatgagcctgcgacattatcgaagtgctttacacctgcacttgcgagttcgccttccgcagaataatctaataatttggtatcgttaatattcaatccaaataatgcatttagggaaactgcagttgctactgatgatgcggcactacttcccatcccataacccggtggaatattttttttaatttctattaaatagttgtaattatataaatcataatctgaaataattttctttgctacttttcctgctgagttagaatcaagatcatgtggaatatttttgcctagatcgccactcattattatttttacattgtttttctttgctattgtttttctctctattttgatggatactacatcctgtaatacatccagacctaacccaaatacgtcatatcctggacccaaatttgcagttgaggcagatgcacttgcagtgcattccatatattcagctacaatctcatgcttttcctttttcaatcgtatttctgctcctcttcaccttgtgttaatatccttgataatgcggcagttaaatttatcattccattcatagttaagttagatactgcaataggactcaacatatttccacctttataaagtgcttttataatatctttacccaataaagattgctctgaatctttttctagatttagggagtcttgaagtgaggtaatagagttagaccaatttaaaatttctgttaatttctcagttattttatctcttttcgttaggacgttgatttgtgggatgtttaaacgcaatctaactgattgtgacaagaacatcaaagaaacgaaactaattggagatattgctaatgtcccatctatggtaaatagtgttactttagaatcagaataaaaatttgaaacaaaataaggaccactagacctgaaggcaaacaattctatttgtccgggagtatcgattattacataatctggattaagttcctgaacttgagtttggatttcatctatttttgttgatatcaagtcattagccaatatcagtgacccattgggtcctaacttataatcatccattatcgaataaaaatcaataaactctcttacgtctatatctggatcatacggtaaactggatactcctgggtctaaattgattgaaattggtgagacatcattgctttggtaccattccaacaatctcgaagttaatagtgttttccctgaaccggccgtaccagtcacgaatatagtatgcatttcaaaaatttttagttgttattctaattttattgttatatttgtatgattattatattccttcttttgaactagttgatataccttgaattggagaataattttcatttttataagcgttatacccataatacttatttttctttttactcctgtttcactaaatgatgttttatctgtaggcattgtcccttttttactttcttttcttgcaacaatgacaagaatttttcttcaagcagttagattttactattttgtccgaaaatttatcggaaaaagtatcagttcattttggaaaattgtttttgccaggttagctggagaatttgtaactcaaactactccttcctatattggaggcgaactagttcgtattgctttcttaactaagagtggtgtgccagcaggacgagcagcatgggttactacgatggaaattattgccgatgtatttgttggtacaattttagcttttatcgctggatttgttgcaatagctagcggctccatgtttattggtctgttaattattgcgatcgctgctcctacatttggattctggttttttatcttgatatattcagcaaaaaaaaatatccaattaccttcattttctttagaattggcaaaaaaatttatttcagaacaaaaagctcaacgggggatcaattctgtgaataaagcattggatgatttgtgcataatgagcagagaaaactttggatcatttaaatcagtaaaaatattttccgtgggcattgcaattacagtggtcgcatttattttccaaggtctttcatttctagttttaacacattctgtagatatgtacataggtctatttttgtcatttatggctacagcttcttccacaattttgggcacccttcccatcacaatagggggttcaggcttagctgaatgggggttatgggcatatatcaatcaactgaataacgtttcccaaattggtaatatagtaaatgatatcgatcaattaaacgtcataattgcatggaggattgcttcttactatttgccattactaataatgtggattgcattgatgaggttggcattgggaactaattattcaaaatctaattcatccccttccactgcacctgacagtagagttaattgatattattttaaataatgattatttcttttttatattgtgaagatgttaaccgacatactaaaaaacaaggttgttcttattactggggcatcgagtggaataggcagatgtattgcaagcgatttttcacaatttggtttgaaatctttaattctaattgccagaaaaatggatagactgaatgattctattgtatctatgaaggaaagggactttgatatattgcctttaagttgcgatgtgtccaacaaggaggaagttaagcgcgttggtaatctgatactccaacaatatgggtatatagatgtcttaatcaataacgcgggaattggtatatttggaaaggtcgagaaaacgtccattgaggaaatcgaaaaagtcagtttcactaattattttggcatgatttattttacaaaaatttttcttgattccatgattaggagaaatagcggtcatataattaatattgcttccctagctgccagttttggtatacctggaatggccgcatactgtggctcaaaatttgccatgctgggtttttccgagtccttacgtcgtgaattaagaaaaacaagtgtaaagatatctgttataagtccaataggcgtaaagaccaatttttttaacaatgaatattttaataataaaatcccaatgaaatatatgttaaaccctgaggcggtttccaaagcggtattaaactcacttacgtctgattcgtttcaaatttttgtgccaacattagctggactgtccgtaccgttcaaaggttgttttcctgcgatagttgattcaattattgagaaccaatttcgtaaaaagctaggctgaattgaatttattattcatcttcatcttcatccttgtccttcttatttggatcaaagtctgattctacatccatcatttgtgcgctctccaaatcaaatttaaaaatttcatccatatcaatttgatactttgttttcaataattcacataattgatcacttaatttggattttgatattttgattttaaactcgtagacgaaacctttcataaggtctgaaaccttaatatcgtctactaaatcgatttcttcaattatggttctaccgtcgggtagtgattcatagagttgaatatctgcttttttagtttgttcgttgatgtctagaaaataacctgtcctattgatagtgtctaatatttgaaaatttgcattttttagttcattgtcagcccattcgggaagaccactctcctctgattttgtctttgccgcttttcttgccatttcttgcccgttatgtattctagtactttttattaaaaactttttcaaatttatttttgggcttctagaaagcattatctataggatccggtatatctaggttcttgaacaccgttataaatggtgaatctttacatgatctaatccagaatcaacattctgaattgatacttgttgatacccgatcatttgctgagtatgcgaatggtcatattcctggtgccattaatatcgatttgatgcattttcattggattgatacctctacaatgggaattttgcaatttgaaaaacaaatgagtttactattaaattatctaggcattaatccatcaaataaggttgtcttttatgatgatatttcaggtcctagtgcatcccgaggtgtttggctattacattatttctctcatcttgattcatatatattagacggtgggtttgaaaactggtcaaaacttaaatatccagttgaaatgaagacaaatcaatattcacattccacatccaatttttacactaatagggctgtattagctgatttaaaatatgtaaaaaactgtgtagacaaaaattcacaggatgtggtaattgttgattgccgatcccctgctgagtacaacgggtctgttggtcgtgcttttcatcgaggacatattcctaaatccgttaatattgattggtcaaataatcttggcgaaggaaaattcttgaaatttgaagcattggcgagcttatattcctttatatcaaaggaaacagaggttataacgtattgtcaaggtggttaccgagctgcaaacacttatcttgctcttaaacaacttggatatctaaatgtaagaatgtatctaggttcttggggagaatgggggaataatcctacacttccagttgaatgcaattaatactatctgtcgttttactttctaatgaataatctgaatgttctaataaaaaatggaggtaaattattttacattgattggaagattgtttaattcttgtagttgtctacttatctccgttgaattttcttttccgtatgttatcaatattctatcgtcatcgtttattacataactcattatatcttcagtttcattaccattcacatagaaacttaatttatattggtcatcctcacaaaggcgctgattactatctgtattgaaacattgattggaagcgtccattctaatactcttgaggaattcgcccattggaacattagacgagtgtttatggatagttgttccatctaatgtgccattatagctttccacatgaatatagttagatcttaccatgtatttttgttgtgctaagtccaagtttgtaccatttaggttaatcaatactgctgcatgttcatgtgctgatcctagagcaccatatttagctgctacattttcgctgggaaaaaatattgctaacacaatggcaagagctgctattccaacaacaacaggaactattaattttaaatattgttttcttttcttccgaccccttgcaaaataactgctatcgttattattattcttgttagaagcattatttctgttactatcactatctgaattctttttcttcttgctcattctactgtaattctactgacatgctctctaatttaaaattaatattgttattttaactattatttgtcatttcacttataatgcttctcaattttaaagaaaatggatggtttggattgttaattactgtcaaaaactctctaggactaaattgtatgtcgcaataacatgggagtggggaaagagagtttgcgccagtaacggagtgaagttcttctaaaactttcttatgatcttggttttgttcgatatttgaatcgggtatgatagccgggatacaatatcctgatatcctattgagcaatatataagaaatagcaccaaatcgtacaaatgttgtataaatttcaaataacagttttttagttccttcaatgtccaaatcatccattttcatagtaagtattaatttatcagctattgatagggcattaatggaccaatgtcttattcctggactcgtatcaataataatataatctgtatcgagcttggtaataatttgttctctaagaaaaaccaatttcctaaactgttttttccaatagtctgttccattacccatttcgaatttaaatatcgcgtctctgctaggattagaaaatcctgtatagagtctccccgtaaaattgttctgcttttggtcctctttaaacagaatttcagtcatatcaattactgattcgtagatatctgcattattatccaaaaagtcgtttatccatttttttggatttatcttaaaataattatgtaagctaggtgcataaacgtctaaatctagtatggcaacctttttccccatttttacaagtaatgctgcggtatttgcagctattgttgtctttcccgtacctcctttgtaggaatgtattgctatacaatgagtcatactaagcttgcctattacattatttcaaagttcaatattaaatcttttgacaatttgttattgaaataaatatatgttattgtaaatttcagaccggtatatcttccttgatgaatcattagatttcagattattacttttctgcatgctattaaataaagcatagaatatattcgataagaactaatcatacgaattgtcataaaatccatcgtatctatataccgtattcataaatcctttgtcatcagcacggatcaaacgaaaaccaatacttcgacatttcaatgcaatccaaattttttgatttgtccgattattttgaccagcataatgagtccgatcatgtgatgaagtatatataatttataataaattgtaattaatggctaagaagggtaaattagaggaaattattagtaaagcactgtatgcagacgatgcatcctcgtattttgtaacatatagggattatgaagattataaacaaattaacttattagatttcattatagtttctgaaaattttcaaacaatcccggcctcaaggataacaaaaattgaactaaatggacaattactgtataaaaaaaattaaaataatacattgtcgaaactccaataataatagaacatggaaaaatatgttaccgaattcaaaaacctatgcaatgaaattgtggaaatcgattcgagaatacgattcattgggcttgctgacaagcatggcataatccttactactgcggaacgtaaaggaataattccacttttaagcgatgaagaaactgagcaatatgccatcactgcctctactaggcagtatactaggttaagatggcaagatatccttggaaaactaaattatacgtgttcactttatgaaaaaattttaaggattacaataccaataacaaatcataaaaatagattagaatatctattgatctttacattagatccacatacagaggattttgataatttaatcatggaaaaaataatgccgtcgattactactttcttttcaaagcttttcaaggtaaactagttcaggattaatagccaatgtatgaaaacaactagaattaaaactaagtctctgttgggtctatgtaaaagagacggaggcttataattgtaatttatgattaaggtaacattcatgcgttaatattattatcttttgtacattttttcccaaattaacgactgtataccatcaaggaatttttttattggtaaaatacaatctaaaaactcaaatattcatcctctagtgatggtgatggtatcgaatcaattaccagaattaatagcaatagttcaatcgtatttatagaaaattctctattttcctttctaggtctttactagaatttcaaaaaatttctctgaatttggaacatctagtctctatgtctgataataatatagtgctttaatagatttatctgaatgtttttaaaagaaaaaaatctattttatttgttgacaatagtgggcaatgtttcggtcactccctctgaaaagactcggattatgggtatcataaatgtgagtccagaatcattttacaaagactcgataaaacatcaagaagacgagattcaagatatgattattagaatgcagaatcatggtgttgatatagtggatgttggtggtatgtcaactgctccatacttaaaaacactgattccaaaggacctcgaatcaaaacgattgcacaatgctatatcagctattaggcaaattagtaatattcctatatctgttgatacagttagatctgatgtaatccgttccttattaaaattagaagtaaatgcgattaacgacgttactggtttgaaatatgataagaacatgtcaaacttggcttttgaacatgatcttcctgtaatcctcggtgcttacttgtcagaaggcgaaaatctttatcgtgatggggacatacaagatactagttctctattatctgaaagtattagaattgccaagaaatccaaaattgacaatgataaaatgataattgatccttcaattggtttttttagaaaagaaggattcaatccattttattccaagactcaaggtatgaattggtacgtgcgtgatatcgatataattgctaatattaagttactaacgtctttgaaaaaaccaatatgtatttcaatttccagaaaatcctttatgggatctttatttggtttggatatagaagatagactgattccttcaattattgctgagatgtatagcgtgatgaatggtgcctctctggtaagaactcataatgtcaaagaaactagacaagcaatagaaatgctcgaaatgatccattagacatatgagttaatgtaacaattataactattagaatacaaatatcgtttgatttgattaaaactcatgaaattgatcatattattcctgggaaatcattagctataattgaggaatttgatgcgggtaaaaatacttatttagatgacggtgaggttagatcttctgttataggaaaatctagtattaatatggtcgaccgtattttgaatgtcaaacaaaaaaatccacctatgatacctaagattggtgatattgttgttggatatatcgatatgctatttggaaatatgatatcggtaaggattgtttatatcaatgaaaaatattctaaatctgggttttctgcgatagcatccactcgtatgtctaattctggaggaaactatagttcaggctggcgtgagagaagttataaaggtaaatttgtttttaaggtaggcgatataataaggggaagagtattcagcttactaaattcttcaattcatttgacattagaggacagagacatgggagttgtatacacaatttgcttttcttgcgggaatgaatttgtcaaagtaccaggaggattaaaatgcaattcctgtggtaactttgaagacaggaaagtttcatttgattatggaaaagaatcatttacacttctatatgacaaacaatttcctatgacatgaaagccttaaaggtaggttttcaaggagaatctggatcttacagcgaagcatctgcccgtattcaatatcctgatccaaattattcattcgttccgtttagatcatttcgtgaattgtttgagggagttgaaagttctaccgtggatctggcagtagttcctatcgaaaattctacagaaggaagtgtaaatgaaacttatgacttattagttgaaaagcctctttacgttatcggggaaatttatcagaaaatacatcattgtttgattatcaataagaattcatctccagacgaaatttctgttatttattctcatccacaggcattggcccagtgtagaaaatatattcaaaatagacacttagaatcagtccctatgtacgatactgcaggatctgttaaatttattaaagaaactcgcaatgctagcgcagcagcaatagctagcaaacatgcggcccaaatctatgacatgaaggttgtagaagaagatatcgaggataattctaataatttcactcgatttctaataatttctaatagatatgatagtaataccgatgacaataaaatatcagttattttttctatctctcatactcctggatcattatattctatacttcaagagtttgcattaaggaacattaatctaacaaaaattgaatcaagacctactaagaatataccttgggagtattattttttcgtagatttagagggaaacattaatgatgataaagtatctacctctctttcagctgttaaaaccgctactatattctttaaattattaggttcatataagaaagacgaaatatgatagttatgactgcattctggttctaattcctagccctacgaccacaatacctgttataatcaacatcatttggccactaaaagcaagtggactggccttcgaaaacgctcctaaattcaaattcaatgtatcttctccttcgttaataacctgaattttgtactttccatttacttcagatgtaacagtttcatttaatgccccaatatttctagtcttattcattatcaacttgttgttggggtctatcactagcactgtagattcagatccattagcataaatatttgcgatgttacctgaattcatatcgggggtaaatattcccgattgatttggttttattgtctcagtaatttcaacaaatctagggatgttggaatcaataattgaagcactacctattccaataaaaatgaaacctgcaacaaaaaatattatcagggaaagcctttttgatataactaccataaatttgcttatgttagcagatcgattaaatataatctttacaaattctattgcaacaattactggagatattaattgttgtttgaaaaaccaaataatactagttatgatatgatttatttttttattaaactctactgattacgagccgtcatttcaataaaatgtcagtcatgctgaagagatgtaaacctaatatgctaccgcaagcatagtaccaaatactttctgaattgtagcgttatccaaactatcctataaccagtgctgaattttgaaaaattcttcgataggttctttcttcaataactttatcaaagctaatccttgtggaactgatagtactggtttggaaaaataattatcagttccaagtcgtggacatgctacttgaataaaggcatcaatttctctaaagttctctaacttctcatttgaaatatcggtcaaagctattagttgtatattaattcctaatttacttagttctttcttaaattctaaagctttaatgtttgcaaattgtccttcttttaatcctattattatccctattgttcttgcatctagtgccttgtacacggagagtattgctcgcttcttgacaacttctgcttcattattaatttgcaaaaattcctcaaaatatggatcgagcataaatgtcggtttttctgtagaaagtgcgatccctatcgaatgaaatctactctggcccagaaaaataaaggcatcaatttcacttttgatgttatgtagcggatgaaattcgcaaccaaagacttgtgcatcatttaattgtcctttacctttcccctttaccacgataaaaccattatcctcgaaaatctttctgactgtgtcaatttgatgcaagtgttgactgtctgtaactaatgatatagttttaaatcgcccctttaattccattgcacattttaatgcaatattgtcaaactctatggtatcaaaagcatttatcataaatactttctctccaaaattttctagagttatagtgtgccctatgttgaataatatatctgcacccagcatctctgcagcatgtgtattaagatcacaagaaccccagcttttctctcctattatatatgaaattatgttaaatttattttcaattttttcagaaactttttgaatttttggtaataggggttcaggaccattcaaagctacataacgaggcttcctctctctaatgatatcaaaaatcatgtcttcatctatctggatcaaatcaaacgcctttctgaatcgtatcggactatacattaatatttttatgtatttttagatatcttatttctacaacaaaaaacatgcggggcttttcctttccacgctcaatatacaacatgatctatgtttttctaaaatcctgcatcgctaatcaatagttcaatctaattattataattgcattttttggtaatggataaataatttgtttcttatcgtcatctagttaaactagtaatcaatttttgtttttaagctcctttactttagttgcatgatttcgtagattaagtatgccaaataagactatgataattgataatatgataacaagcagtgaaaaagcattgttatctaggtagatgaatacttgcattgtagatatgtcgtcatctgtccggctttctaaggtgtttatattagacaaagagggaggtgacgttaccgacagaaaggatgctattgttataattgatattcccaacaatgattctattttaattgatttctttatttttttgattattgttctctcaatatagctttctaaatattcatgattcttgttgacttgcatatcagctctagttatacttatacgtgataattcatctatcctgtcctgattgtatttgcctagtattatcattggaagagtcaagcttattttaataattaggatatttccatagactgtaaataataatgactcaatattttgtaaatgaatccttcccaaatataatccagttattccaattatagttagtgctataatagctacataagaaaaattcatcaaaaaacttaatattgattgattttcgttgcgcttttctaaatctaaatttccgttattttttcccttggattgaagaaggttatgtctatgtttttctaaaattaaagttgaaatgtaaaataatcctccaatccatatcgatattgccaccaagtgtacccaatcggtaaaaactgctatccctgtaaatgatgatagggcattactgtgaccaatcatgctattagaaaaaaggctcaataagacacataagagaaaaatacctggaaatacaaaactgatgagggttttcctattaatgaatattatttttttgtttttaagtttcttatcttcactagggttgattctcaaaactaaaacataataaattattgcagaaccaataatcaacactgaagtacaaattcttaacatccatacaaaaccgacagacgtagagagtgttatctcaaatgttgaatgtgtatctaatcccaattcttgttccaaactgaatacttggagaaataacaataatgtggaggtagctattattactatagcgcataatattattagctttaaaaatcgagttgagctccgaaaaagaatcattgctattccttcctccattttctctttctgatttattccttcgataatttagagatttataaaaaatttcattaaaagttattcctgcaacagctacctgagatacaatcaaaatggccttaactattgcatcattcgtagacgttaccgcctctgaggaggagatgagagtataggattcttcctgagcaatggcaattgaaatattagttaagatgcaaattgatataccaattgagataaaaagaaaaagtattactcgaaaggccaagatgtattacaatatttataaaaataaataaaaaattaggtggaggttctatttagctgttggctcatctcatattgtgaaatatatggttcagggaatcctactctatcttcaggacatccaaaacctccttgcagtgcctttctcacaacattttcagaaatgtcgactgtagagttatcggaaggtgcagtttctccgcctggttgacatgagaatgttacatcaaagtttgtcccattgatgtttccataaatacgataatcaaatgttgttgcaactgttggatagaatgtctcagattcatattttcctacttcaccaaatgcagggtccatattggatgtcatgtttttgtcacctgctaatatttccacctttaacatgttttctagccccgtgattggttgagtgccatttgctctactgttagttggatcagaagcatccggccagtatccatcaagtgttgcggctgtcttgtcatctacatataatggttcatttgcagaaccaataacaaacaagtaatctttcccgtttatatcaaaaagtgccctttggtgtgcatatgacatttgcaatgaatgagctgtcaacatcgaggctgtgattacagctcccaaaataatcagatgatttttattcattaaaagtttatgtctaaagtttattataacaattgttgtacaatcttcgaacgcattagttggctccgagaatttgacatgagttgcgtagtcatgatcttgtatccgaaggaaactcacattccaactattatcttgaaatcatatatactagagaattcgacatttgtacaataatgatattataccttagtagtaaagaatagaatgtgaatttttcaacaattttgcctattgctgtggtttctatcataggaactggtatattgattttggcatctgtatccttgttacccgtatttggtcatgcaagcccagtcacttattcacctacacccaatgaaataattgattctttaaagtctgtgcctgaccaagtaattatcacatttactgaaaatcctgagccaagagcaagcaatatcaaaattatgaattctaataatgaaagaattgataacaatgatttaaaagcatctgattcaaataagtcgctttctgttactttagattcctctaaaatcatctcaggtgtttatactgtcaattggcttgtattatcaaaagacgatggccatattacaaaaggctcttatgttttttcagttgaagataacagtagtaaacctcaacaactacacaaacaaaatatatcaaatgtgtcaccaggttattctactaacattacaaccgctaacgatgtagttcttaattttgatattactccctttgaactgggtcctaatacctttgacctttatatctatcatgtaaatggtaccgccgttgaaaatattaggagtgtatttttagaatttaataatcctgacaagaacttgggaccacttgttgatactatgaaaaaagtaggggcagggaattattcctctgctggaaattatcttagtcaagagggtaaatgggaaataaaaataactgttcaaagaattggtgaatatgacatcaaccagcgagtcgaggtggatgtcaaataagcaatttgtaaatgctaagatattacagggtcgttcagaatataactaaacatattcactcctcgagtatctacgttaaatgaaatatgatttatcaaactaattctattattcgttgatatttttgattttggatcaagacatgggtcaaatcgtagtaaaagccgggatataatttgcaataattctcgtccaatatctgcttctaatcaaatatattcgtaacctaaggttaatattatgctgcacaaaaatctattttgacttgcaatatgcaagtcgtacaggagttagaaagtgaatagaaaaattagtagctatacaaagtaactacttttccatgaaacaactaatcgatgtcattaatctagttaacatgaaatgatgagggagattcgatcaaaaaatcagtgctgacctgatagattgaatctgacatgggaatgatcagatagatgatatcgaataataggtcattataatgctattataattgcattaaagatgatcctatagaacaaatctagttaattgtaattttttatttgtaactaaaaaacaacatacaaatctagtttttcgatcgtactctttctctttattgttaatctctaaaaaatagagctttaataataaagaaagaactcaataaacgtcctttcaaatcttattacttttccttattccttattttgtctacaatctaaaatctaaatgagataagaagtaagaagtaagaagtaagaagagaattggacgaattattatataaacacatacaagtaaacagacaaacaaactcgtaaaaaaaagttagtttgtttgtttatttatatgagaatcaaccgacgatttataataaagtaaataataattctacagccgttatttactttatttgactccggttgatcctgccggacccgactgctatcagagtgggactaagccatgcgagtcaacatagcaatatgtggcatacggctcagtaacacgtagtcaacatgcccaggggacgtggataacctcgggaaactgaggataaaccgcgataggtcatcacttctggaatgggtaatgacttaaatctatatggcccctggattggactgcggccgatcaggctgttggtgaggtaatggcccaccaaacctgtaaccggtacgggctctgagaggaggagcccggagatgggcactgagacaagggcccaggccctatggggcgcagcaggcgcgaaacctctgcaataggcgaaagcttgacagggttactctgagtgatttccgttaaggagatcttttggcacctctaaaaatggtgcagaataaggggtgggcaagtctggtgtcagccgccgcggtaataccagcaccccgagtggtcgggacgtttattgggcctaaagcatccgtagccggttctacaagtcttccgttaaatccacctgcttaacagatgggctgcggaagatactatagagctaggaggcgggagaggcaagcggtactcgatgggtaggggtaaaatccgttgatccattgaagaccaccagtggcgaaggcggcttgccagaacgcgctcgacggtgagggatgaaagctgggggagcaaaccggattagatacccgggtagtcccagctgtaaacgatgcagactcggtgatgagttggcttattgctaactcagtgccgcagggaagccgttaagtttgccgcctggggagtacggtcgcaagactgaaacttaaaggaattggcgggggagcaccacaaggggtgaagcctgcggttcaattggagtcaacgccggaaatcttaccgggggcgacagcagagtgaaggtcaagctgaagactttaccagacaagctgagaggaggtgcatggccgtcgccagctcgtgccgtgaggtgtcctgttaagtcaggtaacgagcgagatccctgcctctagttgctaccattattctcaggagtagtggagctaattagagggaccgccgtcgctgagacggaggaaggtgggggctacggcaggtcagtatgccccgaaaccctcgggccacacgcgggctgcaatggtaaggacaatgagtttcgattccgaaaggaggaggcaatctctaaaccttaccacagttatgattgagggctgaaactcgccctcatgaatatggaatccctagtaaccgcgtgtcactatcgcgcggtgaatacgtccctgctccttgcacacaccgcccgtcgcttcatcgaagttggttcttggcgaggtggtgcctaattggtactatcgaacctggggtcagcaacgagggagaagtcgtaacaaggtggccgtaggggaacctgcggccggatcacctccttagttattatattgtagtagtggtagtgggttagaatgggccttgtgctctttctaatctgcgagactttacaatacttatactaataaaataaataaatccctaaaagggagtgcaatcaaatcaaaactgatcaatcaattccttcatttttcatacggtttgaaaaattagaattgtatgttgtaattttatgcaaaaaaataattatatttactagcccaaattttataggtgtagtctgtgtaaatattataatagatatcactaaagtgaagaattatgatatcatctatctgatcatcccaattaaaaaaaaatcagcaaatgtagtatcggatgcaattctttgtctcatgtaaatgagaaggagtagaagataaagaatgaagttgatgtagtaaacgtgagtttacaataatcatcatgtataggaaaactccaatcatatgtgaatagaaagtaaaatacatagaatagataatactaattcaaaattatttatgataatagataatattctattcgcgtaataatggaatagtgaaatgtagtaaaatattatgtgtaactggtttgtagtgcaaacagagatttaatgtatatgtatataaaaaatatgcatatacttttacatcatacaaaatacgaaataccaataccaatacgaaatacatataccaaccattgaattgaattagacttttctaccacaagtggaactaagaactaactagatccaaaggacaaagaaagaaaggaaaaaactccaaaaattagtttataataactactggactggtgcaaagacgccgattggtggatgactcggcttgataagcgatgaaggacgtggcaagctgcgataagcctgggttaggtgcatgcgaccgacgaccccgggatttccgaatgaggtctctctatacactcccatgctttagttagctagggagagcaaaccgtccgaagtgaagcatctgagtaggacgaggaagagaaatcaattgagattccgttagtagcggcgagcgaaagcggaacagcccaaactgaatctgttatggtaacatgatagagatgtggtgttacggatatgacgtataggatcctgtaatcgaagctaaagtgtatggaaagtaccggaatagagggtgatacccccgtaggcgaatgagagcaggattctgtcatattcagagtaactggccttggcagtggccagtgaagatgggtgaaagtagcatccaaggctaaatattcatcaagaccgatagaatactagtaccgtgagggaaagttgaaaagtaccccggaaggggggttaaaagcgcctgaaaccaatcggttacagacgtgtatggctcgaaaggatttctagagtcatacgttccgtctagaaacacgggccagggagattgctgtcatggcgagcttaacctttaacagagggaaggcgaagggaaaccgaatttgcgcattttttcatctgaaaaaagaggcaatggatctgaaagggtcttgagtcatggcagtaaggctagaaaccggacgatctagtcctggataagacgaaggtgagcgaaagctcgctggaggtctgcaagggtcctgacgtgcaaatcggtcccctgatctgggattaggggtcaaaaaccaatctagtccggtgatcgctagttcccaccgaagtggatcgcagtcctgccttagctgagattgcttgtactgtagagcaccgatcgggcggtaagggctcgaaagagctcgccatccattcgaactccgaatgtgcaagcgtcgtagaagctaggaggcgggtttatgtggggtaagcctcataaccgagagggggacaacccagactaaagttaaggtccccaaatgtctactaagtgtcaaaccaaagggtgttttcgagcaaagacagcaggaaggtaggctcagaagcagccatccttcaaagagtgcgtaacagctcacctgccgagctcgaaagccccgaaaatgttcggggctcaagtagactaccgatactttagaccaccgacgatgtcggtgcgtggtaggtgggcgtagtgtttgggtagaagctgggctgtaaagtccagtggaccgaactactagtgcagatcctggtggtagtaacagcatagccgggtgagaatctcggcgaccgcatgggcaagggtttcccggcaatgcgtcatcagccgggagttagccggtcctaaaaacaacctcaacagaattgtttgaatgggaaactggttaatattccagtgccttgaaagttcgttatacctcttctgtcgcttccggatagggtaagcagaaccgtcgttctgtctaagtactctagctttgaggagtgccgtaatggcgagaattaaagcgagataccaatggccttccgcaaggagggtttgcttgattccaggagacaatgaaagcagaaataggaagatactttcaagaccgtaccgagatccgacactggtgccctggatgagaagtctaaggtctatcgggtataccgtatggcaagggaactcggcaaaatagctccgtacctatggtataaggagtgcctgcagtttttacgaggagtagggactgcaggtcgcagtgactagggggtcccgactgtttaataaaaacacaggtggtcgctagtccgaaaggatgtgtatggcctctgtatcctggccagtggcggtacctaaaacctgggttcaactgggctaagggccgctaaacgccgggagtaactctgactctcttaaggtagccaaatgccttgtcgggtaagttccgacgtgcatgaatggaacaacgagggccccgctgtccctgcctacaacccggtgaagccacataacggggacgaacagtccccgaacctctgtcggggagagaagaccctgtggagctttactgcagcctgttgttgcgatatggtgtcaaatgcagagagtagctgggagccgttatggtcagttctccgggactgatctaggcaaaagtgtaacaccagccatttgttaccgtatcgctaacctgtttaacagggacatcggcaggtgggcagttcggctggggcggcacccccttgaaaatgtatcgagggggcccaaagattggctcaggcgggacagaactccgccggtgagggcaaagccaaaagccagtctgactggattcccaatgatacgggattcagaggcgaaagccgggcttagcgatccatcatgtcctcactattgggggctggtggtgacagaaaagttaccctagggataacaggctcgtcgcgggcgagagctcccatcgaccccgcggtttggtacctcgatgtcggctcttcccatcctggttctgcagcaggagccaagggtggggctgctcgcccattaaaggggaacgtgagctgggtttagaccgtcgtgagacaggtcggtctctgcctgacaggggcgtggttgtctgaggggaagttgcccctagtacgagaggaacagggcagcgcagcctctggtttatcagttgtccgacagggcaagctgagcagctaagctgtttaggataactcctgaaagcatctaaggaggaagcctttcccgagaaaagacaaccttccgtaaggaggagggcggccatagaagatggcgttgatggaatggaggtgtaattatcaagccttcgggcgagatattcagcctgccatcaccaatagcccaacgcacctgatctgtaattaaaaataaaataaaataaaataattacaaccgacagaaaaaaaagtaggttaaaaatagatagatagatagaaggtataaggcataaggcataaaacaacaacagcagcaaagcactacacgcacacaaaaatatgaactacaacttgctatttcatgcgtaaagaatagatttactatttgtctaagtatgatagtatgataatgtttaaagaattttatgatattttttctaaatgaaattttatgattggattttctttcagtttatgatagcacataatgaattcaaactaatctgctatttgaaatcaatgctcgagttctgttactatctatggcttcttcgataaatgcatttacggtctcaatcgaatataatttcaaaatttcaaccaatttagactccctgttcaattcataatttttaattttgtctttgtatttattttctattacaattttgttttgaactaagtgagggatgattctttggactgttcttagaggtatttcgctagatctgcttatttctgcagtggtaaaattaaactgctgatttattataagaaaatcaattactctagctatactgtttctgaaaattctttccagtggtctgttctttatgagtgttgattctgtattttcattcatgtttaatattctttgtaataatataaattgtttgcgccaaaactggcgctataagtcgaatcttaacattatagctctcttcttgaagcctattttctcgtaaaatttcgatactttttcatcacaatcaagaattactttatagcatccacgttcccgcgatatagtgattagcttttttattatttcttttccaatacccctaccttcatacccctttcttgttgctacatcttctatgtgtcctaccttacctccgttatgtatgaatttttgttctatgaataatgtggccgtgccgatgacttctcgactctttgcatcttctgatataattatcacataatccttgttcgccatgatttcctttatgatttctttttttatctcttcatttgtattgatactgcctatcgttgataagtttgagagggtttcaaagaatccattatcaaaatcattctcttcaatttctcttattgtgaatgacatgctttttaaattatttagcattgttaaattaatctttattattaagtaattattataaaacacgaaaattagattgatgatattaaaatcatataaaatctcttctcggtggttgaatgtacaattagtatctatattcatgatgctgtctcgattaatccaagtcttttgggccctgtagtctgttccccaatttatcattctcatcatactgtatcttgagatggtcttagttttgaaatgaacactctctgggtagatgatatcacttgttaaatacattttactattgctgaccttattttttcatggaaggactttattctattataattaaactattaaatgtctttagctcataatattgtataaagaaattattgattctttagaaatgctaattaatatatttcctttaatcaattattagtgtaaaaataatatccatgacgtccgaagttgaaattaacaatccttacaagaataagatggctagaataatggtagtggatgatgaaaaagatattcttagaattattaagagagatttggaaataacaaatgaatttcaggtagaagtattttcgagtggacaagatgcattgagctcatttaagaatcatgaattaggctactatgacgtaatcatcactgatattagaatgcctagaatgaatggatttgaattgtatagacatatcaaggaaatgcgccctaataccaaaattgctttcattactgcgtttgaaataaacagagatgaatttacaaaagttcttccttcaattgatgttaaagactttattattaaaccgatcgatatgaatgatttaatttttaagattaaatctatgttagcaatttaaatggcactttcatatcaaaaatgttaaacagcttgtaaatgataagcatagtatcgtctagaaataatattttcttgctaattcttgtaattggcgtaggtatttctttatctatactatcttatcattattctggtctaaccgcagatcaaattggtgaaattgcttccagtgatatccggtcaaacgctataattgaaacagacggtctttctaaaactctgttgcacattatagatccagtatctactaacctcgagatcttatccaaaattgtaaattacagcaatatagatggaaccaaaataattatggatgaagttcagaactccacaaaatcattgacggagggatactattggataaatgaagatggtcgaatagtctcaataagcaacgttaactctagtataattaaatcatatagtagtattgatttgagtaacagagaatattttgttatccctaaggagactcatactagctattatagtagtgcaatcgaatctatagataaaattccacgactttatatttcgtttcctattttggaaaattccactagagagtctgtatttaaaggggtcatcgttgcttcaatcaaaatccatgaattgggtcgttttttacaaagcgagttagcccctcaagtagcaggaaatgttggattaatggataagaatggtattattatttacggtagtaatccttcgctcattggaaaatcctatctcggggaagaacttcaatccctagtacctgaggaaattcgaggaccttataattctcttttggctagatctcttcaaggatctgcaggagccgaagatctaatattgattggaggaaacaagactactattacatatcaacctgtctacataggtggaaagtttctgtggactttgtttgtaagctctcctcatcagttagcagctgaggtgggatttttgataaataatcagaaaaattttagcactttaatgatcctaataattggagcagtagccttgggcattgcgtttttgatcctttcctggaataaacgactggagtcggcagtaaattcgagaactatcgagctaaaggatgccaataattcattgataaaatataataaattacttgaatcggccaatgagaaattaagcattcatgataaaatgcaaaaagaattcataaatattgccgctcatgaattgagaactcccataatgcctattcttggagatgcgatatttcttgaaaagcaattcgaggaggggaaagaagaagtcaaagttgacagagaacaagtgagttctattattaggaatgccaaacgcctaaagagattggcatcagatattttggatattaccaagatcgaaagtcagtccttgaagcttaacaaagaacgctttaatattaaggacattattttgtcatctatcagtgatacaaaaacccagttatcaagtagtaatccagaacagctagaaaatttgaatatagtgtatgaacccaaagacatctttgtatttgcagataagaatcgaataacccaggttatttttaaccttcttggtaattctgtaaagtttactgataaagggtcgatcggcattgatgtaaaaatcgagagagatggggtaaaaaatgttgaaaatgtgatcgtcagtatatgggatactggacaaggtatcgatcctgatatgctcccaagattatttacgaaatttgcttcgaagtcttttgaaggtacgggtctaggcttgtttatatcaaaaagtattattaattctcatcatggaaaaatctgggcggtaaataatcaagatggaggtgctaccttttattttaaaatacctcaacaatgaattgaatggggagcaatcattgtagcttttcaacttttatataattcgagttgatctcgactttgaagtatagtattagaatggaggaaatactatcctacaaagtacaatgaaacaagatacaggtgctgggtctaacgatgcttagttttttaatattatgcagggttattttctttttcgcgtttggtttttttgtctagtcttttattccataacctacttgcgacgaatagtaaaactatggttattatcaatgatatttcgaggattattaaactcgtaatggttagtgtctcaaatatttgaatcaatactatgcccattatatttccggtaataagtgcgataaaaaaaatctttaatatctccttccttgtcatgccgcgactatctctccatataataaaattaaatatatttttattgaattgacttgtttaccttgatcgaataaatattgaattgatgtagtccatatttagaatctaccgtataaaatatcaaataaataatgttttattgaaaactatcaaatcctcaatcgtcaaaatcaaaccttcctcctatgtctccaccttgcaagtctacattttctgttccgcctgtttctgtgcccgctccagaatcagatttcgtccctgtggcaccggtattgcctgtgtattcagccatcgaactctcgattggattaagggccatacccaaaagggatattaacgatataaagaacaccatatccataatacccgagaaaatcaaaaatggctccatgatctgttgtttccataaatgtttggagttgggctttatcaccttgtaaacaccactgctgaacttgtcttaacttattctctagttcatgttattttgaagttaataccttcaccccgtgtctgttaatctatactgcgctttcttacctaagaaaaatattttcttttctaatttaatgacctatcgttcaatttctaatttcttgagaattgtctcaacttctgactttgtaagtttggtaagttttatgattttatctaaagtgttaatattcttatatattgtattaagaactataaaatgtgttggactatcataaagattaattgatatatttataaaatatataaagttatacttgaatactatcgtattttctgcttttctattgaatttgttttgataatcaaaaaaggtaacaacttgaaatccctatcattttgaaaaatttaactaaatagagatatttcccattttcaatagagtccattgaaaaatccttagacctaataatcctgccatcatttctacggcctatgcccttgatatctatatgtcctttccatacacttttaataaatgtcctgttatgataattgaaatcataacgagaaccaaagcatcaatagaaactgggagattaaaaatggttgtagtattactaactgtttatctagtggtagaaatcgtggctggatatatcaccgggagtctagcgttaattgctgatgctctgcacatgtttgccgatgtctttgggatttcgcttgttcttgtggcttccatttatagtaaaaaacctccaactcctttacatacctatggattctatagattctgaaattctatcttctcttgccaattgtgttatcctgttattggtatcaatctttatcatatttgaagcctatcgacgtatttttgaacctcacaatatagatagctcctttatgttgatcgttgctatagtgggattagttgtaaacatttttgggcttagactattaaagggaacacacacacatacacataatatattttctgaatcaactccggaatatagtaatctaggaaagactgatgctcttcatattcagggcgcaagactagaactaattagtgatcttcttggatctattgcaatcatcgttggagctgttctcatattctatactaattattatatgatagattctgtgattagctttggtctcgctctattcattatacctcgtgtttggtatttgttacaaagatcagtatctgttttgatggagagttctccttcaagtttattatatagggaaataaaggattcaattataaagataaaaggtgtgaccggagtgtttgatctccacatatggagtataacatccggaaatattgcattatctgcgcatatagttatttttgattcaaccaaatcgcaagagatactccaagaaataaattcactattagaaaagaaatttggaatctatcatactacaattcaaatcgaaaaatatcatacagttgatgatagggaccactaattttttttattattttaacattgaatttgactataatatcgtcatcagtattggataaagtagatatttatgtatgcaacttgatcaatattcgttcttaatgatttctgaaataactattgcgctggatctcgattctgttttggctgatgtgatgcaaatctggttagaagaatataatgcaattttcaataccaacataaaaaaacaagacataactgattggcacattcataacatattaccaataggcaaacaacagataacggatttattcatattggtctggaaaaaacgatggcaggacataccccctactagtaatgatcttttagaagtaataaatcaattacaagacaagggctttcgaatatccattattacaaagagggagagagttacgataccatttgtggctcattggctcgatctaaacaatatacctttcaatgacattgttttcatttttgatgatgtatcaaagagccattttcctttctttctattagttgatgactctccgatcaatgtgaaggaagttgttcctcccaagcaaattgtcatttttaatcaaccttggaataaatctttagtatcttatacaaggataaacaaattgaacgagctaattgacttggtataggatataatacttgaccttctgttttattttattttactatctaactctataaacaatctatttaaggctgaggatagtccgttataattacaaaggaaattgaaactttcttcgaatttgtctttatccgaagttggttttcctaagtaatctaattctatatcttccagatctgtctttaaataaattactatggaaaatgtttcatcttctttggtattacttagtttgtattctctaagctcaaccttcattaccgtcctcccttcaatcataaattttttctctagaataactttctttctttttaagctcaacagtatagaaatattataataaccatttaatattaacgttctctttataagtatattcttgtccacttatttataatccaaaaatcgtatccattcaggaaaccatagctgactttcatgaacaccaatacctttcgccaggatctccggagagttataaaatactgaatcagcccctaattctaatgctatcttcttattcaggtcgtctatataagatatcttgccaacgtgttttctcccaataagatctttttgttgagtatataatccgacttgacggccatcaatggtgggaacataactaactattatatcaattttatttacattagcttttcttaaatagaatactgtttcaattatagtgcttccagtttgtattgtaccttgaacggatagaatattcttgttttgagtgactggagtaatgataaacttaagagttttaccattagatagtaatttattcttacttacttgttctgaatagtctatcattggatctgaatcatcatatctgtcttttattataccttcaaccatttcaaatttttttctattatttttgaatcctatgtttaaccctagagccattggtctcgtataatctggttccgcaaagatcatgtcagcgtcaatgtttttgtttgatagatattgtgcctgaatatttccaatattctttcttatagaataaatgctcttattattaaaaatacttgacacatgtgactcgcgaatgaattcgaatggatccattaagattctatttttatctagttgtgtcaggatatccataccgtacttgggactcaaacgaattagctgtccaggatttatttctgttaattttaagtggaaaaaactctcgaggtagttttcggaagtaaccatgaataataattcgttttcatcctttccaagaaataggggtttaaatcccgtactatttctaaaaacatagatttccctattaatatttattacgtaatttccccttaaatgcctgtccaaaaattcagctgctttatatggatctttttgtgccattagcagttctttgaaaatgtaatggatttgctctaagggttcggattttctgtttcttattaacggatgtgttgtcaatttatctaaatctataaaaaatccatccagagcaaaatttattctccccattcttttcgacttcggttttttttttgaaagatggccaatcgtcgtttgcattgaattattcagctgctttatgatttttccatgaatagtatcaaatgatggtaatgaaccatatccgctgacctcaaatttacctgaactaattttccacactgcctttccacggtgttggagtaattgcattccgcgaaatacttgataaattatcttttcatcattgacattctcatcgagtatgcacactgcaactattccgcccactaaaattcagaattgctttatcactagagcgataaaaattttgatatttatacatttatttattatctcatcattttggtctaaaatactaaagtaaatatatattccattgtcaactaatcttctaaaattgataattggcttattgggtaaagcaaatgttggtaaatcaacattctttaatgcagctacagattcatcaataccaattgctaattttccgtttactactattaatccaaatatcggcattgcatttgtgagagtaacttgtgtttgtaaagagttaggtgtttctgataatcccattaattctcagtgcattggtggaataagatatatcccaataaaactaatagacgtagcaggactagttcccggtgcacactcaggaagaggtctaggtaataaatttttagatgatgctcgtcaggctgacgttcttatccatgtaatagatgtctccgggtctaccgatgtagaaggcagacccgttaatccaggtgaaggaaatcctctttttgatttagagttcatagaagatgaatttgatctttggatacattctttaattctgagagattgggacaagataataagagaaagtgaaaatttaaaacaaaggatagaaaccgtattggctagtagactttctggtttatcaattaacgagcaattgatcaaaaattccttggactatattagtttgattaagaagccaagcgaatggactgacgaagatttactcatactaagcaaacaaatacgaatccgttctaaaccaattattttagcagccaacaaggccgatatcacttcatcagatatcaatattgaaaaattgaaaaaactagaaagaccgttttttcccactgtatgtgaggctgaattattgttaagaagagctgctcacaagaatctcatttattatttgcctggagattcgagttttgaaatcaagcagcctgaaacactttccaacaaacaaaatgaggctttggaggttgtatctaatatattacacaagttcggctcgacagggattcaacaagtaataaatcatgcttgttttgaaatattgcaaaatattgtagtttacccagttgaagatgaatataaatttacagacaaaaaggggaatatcttgccagatgcaagattaatttccaatgaatccactgccaaagatttggcatatttgattcacaatgacttgggaaaaggatttctttatgctattgatgcaagaacaaaacaacgaattggtgctgagcataagctaaaaaatggcgatataattaagatagtatccacaaccagtaggaattaatacatgttatgtttaggaattgaaagcactgcccatacattcggatgctctataatagaaatcgacaaaagtggtgatgctggtagtgcagatgaagagtttattttatcagaagtaagggatatttataaagcatcagaaggatggggtattcaccctagagatgcatctaaacatcataccatggtagctaccaacatcttaaaaaagtgtttagaagaagctggagtcagtattaaggatattgatattatttcttattcagctggcccgggattgggaccttgtttaagaataggtgctgttatttctcgatcattggcttcatttcataatatacctttaattcctgtaaatcacgcagtaggccatatagaattagggattaaacttactggatctgaaaatccattaacattattggtttctggtggacataccatgttacttctttattataggaataaatggagaatatttggagagactttagatattacactgggacagctttttgatcaagtgggaagaaaaatggggttttcctccccatgtggaagtaagatcgaagagatgtcttatttatcacagggtcgaatggtctatccgcttccatacattatcaaagggaatgacgtatcgttttcaggattactcagtgcagttaagattttactaaacgacaacgataatgatgtccatgacatatgttattcattgcaagaaacagcattttctatcattgtagaggcggtagaacgtgcattagcctttactggaaataaggaattgctaattgttggaggtgtttctgcgaataagaggttgtccaacatgcttgaaatcgcatgtgacatacataattccaattttaattcttgtccacgaaggttttgcggagataacggagcacagatagcatggactggcgctcagatgtacttaaatcgtccttctagtagtgttaaacccgaaaatgcagctgttaatcagtcttggagattggatagcgtacatattccatggaggtaactaatctcatgaattacttttagtttaatcttccatctgcaatttaatttcttttgcccagttgccaggattcaaaactccgaacttgtagattttattactatcattgagttctatcactaattttttgataattctaccttcagatcttgcttgggcaatgtcctttaatttaaattctattttttcacctagtagttctttagataatgttgctattcgacctttggttttttcaaaggcaagttttctatttgttagagtaagaattccactcttcaatgtatcttctgaacagtcttcaaacagaatatttttttcactatttgatgaatatgatgttttgtccataatttttaaagtaataacgtattactaaaattatctattaatgaaagatagaatattattaaaaaaaggtgctgaatcagaattgtaccttattgattggcatgatgctcttgctatttccaagattcgaattgctaaagcatatcgtaacccttttatcgatattccattgagaaaacggcgaacaattcatgaagctaatattttatctcaagtaaagttttttgggatcaatactcctttcatttattttcttgacatgaataattttgaaatcataatggaatacattgaaggaaaaacgatcaaagactttttttcctcagatctttgtataaatcttggggaaatcgttggaacccttcattgtaataacataattcatggcgatattaccacatccaattttattatatcttcaaatggagccatttttgtgatcgattttggattgtctttcttttctgaacgatatgaagacaaagccgcggatatacggttatttaaagaaatattgaccagcttccatgttgatgattttgatatatcttttaaaaatttctatgatggatataagaaaatatgtggcaatataacatcaagagtattcaaaacagtaggcgaaattgaaaaaagaggtcgctattcaagatctgatttttaagatagtgtataattttcttctattattgaaataactattgtataatttttttacacaatgctttttccttgtgttgcacaaaatgatcttgacaaaaatcagtttcgcattcatagcagtgccacccgcataaagtataacataccttgcatttcgaaatcggtttattatagtcgaattctttagtttgtttcacaattcttggtttttgtattcttttctgctgttgcctcataaatttatcctctattaaagcgcaaaacatcgtagtgatgtttgaaaattcttctccaactctgtgggtctatcaacctgtttcataaaatcagaatgttatttaagcttttcaaccgataattaaggaacttacaactgccattatatttgtaatttagattatttcattaatgcgggaggtgggattcgaacccacgaatccctaaggaacagggttgtaggaaacttccaagctcattctaagcctcgcacaatttctgacctgcgccgttgaccgggcttggcaacccccgcattactttggactacattaaagccaaatttatctattgttaataagaatcatgctggattcattaatcgatgatctctcttacaagataggttatccatctctttagtgtttaaataattattaggatggcataaatattgatttaactggggagatgttttgacggagaaaaaactatttgggacaaacggcataagggggatatttggaaaagatctatcaatcgagtttttaatagatatcgctttttctatagggcatttttttgagagggggccgatagtgttgggatatgatggtcgttcttctagttttgcaattcaaaagattatctcggccgtgttaatgtcaatgggtatcaatgtgtatacaatgggcttgacacctacaccttgtctacaatttgctgtcaaaaattcgagattttccggtggaattatgattacggcatcacataatcctaaggagtacaacggaataaaacctatttcgagtcaagggtttgaattatctagagatgatgaaataaaaattgagtcaatatattatcaaaaaaagttcgtgagagatcattctacctcctttgggaacttattcaaaatggatgttttggaacagtatatcgacaaggtactttctcttatagatgttaatattattatacaatcaaatctcaagattactatggattgtggtaacggggttcaatcgttagtagctcctctgattggaaaaaaattaggatgtgaagtgttgataatgaatggctatatcgatccaaatttttctgcaaggggctcagagcctaagatggataatttatgtagtcttactgaaatggtaaagaggactaactctgatttgggtgttgcgtatgacggggatggtgacagaagcattttttgtgatgagaagggaattatccattggggtgataaaactggatcaattctatcttatcatttaattaaaaataagaaaatggatacgtcaatcgtatgccctgttaattcttcacaagttatttcaaaaattggtgagttagttaagaaggatgtttattttactaaggttggaagcgtcgaggtttcttatggcatgaaaaatacaaattctcttatcggatttgaagaaaatggaggttttttttatgggcctctaaatttggttcgggacggagcgatcacaacagctttggttttagaaatgatgagctttcataagcaggaaaaactgatacaaaacacaaatcgtagtggcaagttatcggataaaaaatcgtctctgtctgatattttctctttgttcgataacacctttcaatataaatccagcctaaatttgtctagcaatgatgatatgcaacatgttttagatgcatgtactgcacatggatccgtatataagatagaaagaatcgatggggtgaaaatatggtttgatgctgaatcttggataatgtttagacctagtggtacagaacctctgattcgaatctatgccgaatccaatgataaaagcttactggattcaaaagtaaaggaatacctaaacttgataaataaaattctgaacgctgctgattgacacatgataacatttttaatactcttttttaccataagaaagagtggaaatgagcccaatgggtgattataaattatgagtaaaccgtattatgtaaagtttgagatacctacagatctagttagtgcaatttatgaggcagtaagactggcaaaacagagtggtaagattagaaaaggaacaaatgaaactacgaaagcaatagaaagaggaatcagcaaattagttgttattgcagaagatgttgaaccaccagaggttgtagcacatttgccaatattgtgcgatgaacgttcatctaaatacgttttcgttcctagtaagaaagacttgggtaatgcgttaggaattgatgttggttctgctgctgcaactataatagatcctggcgaatctcaacaaattcttgaccagattacaaatactattgatagcataaaaaacaagtctgagtaaaacaggtgtattttaataaatgagcaagactgaggaaaaggtcattcctgcagaagtaattcaaatagtaggtagaactggtatcgctggagaagtaattcaagttcgtgtaaggatttctgaaggaaaagacaaaggcaggattctaactcgaaacgttaagggacctgttcgaatgaatgatattttaatgcttagagaaacagaacgcgaggcaagaaaaataaagtaatgcttaaaatatggagttattgcaggtggttaaataatgagtaagaatgttgcgtcattacgaaagtgttttttttgtgggaggcatgttgatactggtaaaggaataatgttggttaaaaatgatggatcgattcaatggacttgttcatcaaaatgtaaaaagaatctgcgcgatttgaaacgtgatccacgagtgtttaaatggactgataaatatatcaaaggtggaatcaggaagcaaaagtgaaatgggggtagaacaaactctaatacttgttaaaccagatgcatttaaacgaaaattggtaggaaaaataatacaacgttttgaagagaagggatttgacatcaaacaacttaagacctatgattttacagatgaaaaagctcaagatttttattcaattcaccaaagtaaatctttttttaaggaactagtttcatttatttgctctggtaccgtcgttgcatgtatcttggaaggaaataatgcgatcagcacagttaggataatgatcggacttacaaaatcttttgatgctgccccaggaacaataagaggtgattttggtctgggaataactgataatattattcatgcttctgattcgcatgaaagcttcataaaagagtcatcagtagtatttttataagtgcatctacgtcagcctgtagtagtcgttctaggtcatgtagactctggtaaaacatctttactagataagatgaggggaacattcgttcaatcacgagaagcagggggtattactcaacacatcggagcaagtttttttccaatagaaataattcagagtttgacaggttcgttatttaagaaattattagcacatgatcatgctattcctgggttactggttattgatacacctggacatgaggtttttgcaaatttaagactaaggggaggatcggcagcagatatagcaattgttgtagttgatgtgaataagggatttgaaccccagactatagaaagtataaacattttaaagaataggaaagtgccatttgtagtcgcgataaacaaagtcgatcgtattacagggtggaaaaaaggaatcaccaatttcattaccgaagaaatcaaaattcaaccaaaggaagttcaattagatcttgataataaaacatacagtatattaggatctctttcacaattgggatttaattcagaggctttttggcgtgttaaggattttacaaaagaagtggcattagttccagttagtgcatcaagtggtgttgggattcctgagcttttgacagtcctggtaggactggctcaacaattcatgataaaaaaattagaaagacatgaaggatccgctaaaggaattattctagaagtaaatgaagaagttggattaggaccttctgctaatgtcattcttttagatggtatcataaaacaaggtgattcagtagtggtcgcaaaacgtaattctgttatcgtaactaggatcaaatctttacttctaccaaagccacttgatgaaatgcgtgatccacgagataaatttcgtcatgtagatatggtaatttccgctgcgggattaaaaataacttctcctgatttagatggcgtaatagccggcagtccattgtacggtcttgcacctaccgataatgaagaaaaagtaaaaaatctagttgaatcagaagtaaaatctgcgcttattaatacagactcaaatggtattattctaaggtgcgacactattggttcgattgaggcaatttcggaaatgctaaaaaaagagaacatcccaatccgttctgcagacattggacagataagtagaagagatgtgatgactgcatctgcagttaaagaaaaggatagatatctaggcataatattggggtttaatgtcaaaattttagaagatgcagaaaaagagtcatttgaaagggatgtcaagatctttaatgaaaaagtcatttataatctagtgcgtagctataccgactgggtatcttatcaaaagaatcatgaggattcgatcttatttaatgaaatatctccaatttgtaaatttgaatttatgaaaggctatgtttttagaagaagtgatcctgctgtgtttggtgcagaaattaccataggtaaaatgaagcaaaaaatgtcgataatgaatcctgaggggaaaaaagtgggagtaatacatcagatccaggataaaggcaaatcaattgacgaagctactaggggaatgcaagtagcggtatcagttaatggacctcagataggtcggcaaattaatgaaggtgacgttttttatacatatctggatagtaggcaagccaaattactacttaatcgttttaataataaattagatgaagaagaaaaagtaattttaggtcatatcgttagcctaagaagaaaaacagatcctgcttttggatacatatagtaaattcatgtttgatgtcatctgatatttatatagtgttaaatttgtaaataatataaaacctatgaatgaatttaatttaataggaaaaattttctttgctcctaatacttctgattctgatttaatcgaaaaagccaaactaagactaaaagaacatggaatacctgaagaaataattgaaattaattataatgttcaagaactaaatgaaggtgatttatatataagttatgatccacccgatttggtattgagaaaagtatatgccaaaaccccaagtggatttattaaaatgaaaagtataaaatctattaaactttgaatttatctggatcttattttgactaactcattaattaattcatcaaaatccttaattatgtttatctttttatctatcttcttaactgcatctcttagtataacttgaccctttttttctaaattctctttacttaaaattatgatttttttactcttcctattttctgcttccgcaatttgttttgaaaatgatcttcctaataagtcatagtcaactggaaaattgtttctccttaatgacgaggctaatcgttccacattatcaaatatttcgatagagtcgtatactacataattcaaatcttcaaactcatcattttgatctttcttaaatgctccctgttgtttcatcgctaaaacaatacgctccacccccccagctgccccgattgctccaacttcttttcttccaaaggcatcggtaagcttgttatatcgaccaccaccaacaagcgatcctagattatttcctgtgtctactgcttcaaaaactaaccccgaataataatccagccctcttacgatgcccaaatttatacgaatgttgtttattcctttatttgataacgacctgttgattttttctatctctgtccagctcttcaattttagcgatttcatagcaccgtctaattccttaaaactcccttttttctctgcaaaattaatcactttttctaagactttgctatcaattctttcattatattcttttaacacattatcttttcccttctttggtattttgtcaatcgctctaaatatctcaaatagctcttcatcatctgatatcttgataatgtttttgatatactcttcaattagatttctactgctaatatcgataagtatatttcttaaaccaagtttctgtagaaaaattgatgtaaattcaattatttcggtatcggattctattattgaaggtccatatatttcaatgtcccattgatggaaaaatctgtatcttcctgcttgtggctcatcatatctccatacccccccaaatgaggcgatttttgtgggaatctttagatctcttcgtgatacaaagtatcttgttaatcctatggttaaatcaaatctaagagcaatcttcctattccctttatctacgaaattgtagatttctttagttatggaaggacctgactttgcctcgagggtagtcaataattctaatggagaaggttccatcaaaataaaattaaaaattcttgcagattctatgaacgcgtttcttattacattcatgtcctcgtactcatctggctccagatctctcatccctcttggcagttgaaatttcattgttgtttagactgttaatattttttaaatttagattttccggttcattataatatcaattagcttaatacaactatatgtttctagataatattgagtatcttgaccatatgactgatgcatacttacgaatcaggggtcaaaccatgaaggaagcttttgaattttcggcaatgggattggttaatatcatgtatgatatagaaaacatagagaaaaagcagcgtattcctatttttgcagaaggtagagatctagagaatctattgtttgaatggcttgataaaatcttgttgatgatgctcattgataaattggtcttttcaaagtttaatattgaaattacctttgataaaccttctgataaatacattattactggctatggcgagggtgaacttgtagatcctaataaacatgaacttaaagtagagatcaaggggataacctatcatgaaatgaaaatactcgattataaagatacaaacgaaatcataattgaatatatagtagatttatagcttttaacataacaaatacatccagtctgttcttataattccaattcataagaagattagattattctgttaaataaatttttgagaatataaaagtatataataaaattaatatggctcattcatgtttatctttttttatatactggttcatatttccttaggaatgtcataaattttttctcttaataggacacgtgtgatcataaagtcttatatatcaaatattaatatagattatccgtaaaaatgactaacgaatcaggatctacctcctcatcctcatcctccactaatacaatagtagaattatctgagaataattttgaacgctttatatctgataacgagatcgtcttggtcgatttttgggcaacttggtgtggcccttgccaatttatgctcccaatatttgataaactttccaaaaaatacatggacaaagtcaaattcggtagattaaacgtagatgacaatcaatcaatagcaatgcgcctagaagtgtatgcaatacccacgtttgtaatgtttgtacgtggtaatgcagtagatagagcagtgggcgcagtaggtgaaaagggattggaaagtgtactacaaaaaacccaatctcaataaatagaatctatcagcataattactttgcattctattcttaaatttcatatttataaagtcgtatcacgtattgatgataaataacagataccttgagaacttgtgattaattattagaaagaatttattattgacttaatttagatatcatgagataaagtatttgacggaaactctttcttacgatatacttatagtagggtccggcttggcaggactaagggccgccattactgcagcatcgaaaaacaagaatctaaaaattgctgttctgtcaaaagttcaggtaatgcgttctcactctgtctctgctgaaggaggcacagctgctgtattatatgaaaatgaaggcgataatatagaatcgcatatatatgatactattaaaggtagtgactttttagcagatcaagatgttgcagaaagacttgtaaattggattccatccgaaattatacagcttgatagatggggaatgccatggtcgagacggaataatggaagaatcgatcaacggaaatttggtggctattcttttcctagagctacttatgctcaggataaagtgggattttatgagatgcaaacgctctatgatacatgtcttaaatatgataatatttttttctttaatgaatggttttgtacttccatccttcatgaaggtaatacatttcaaggatttacttgcatagagatgaaaaatggcaattttattaaggtcgttgccccatcaggcataatttgcaccggaggcgcaggcagaatttatagcttctctacttatgcttattcttctactcccgacggtttagatatggcataccgtgctggtatggctttaaaggatatggaatttgttcaattccatcctacgggtattttgccatccggaatcttgattaccgaaggtgcacggggagaggggggctatttgattaattctaaaggtgaacggtttatgaaaaattatgcaggcgaaaaattggaacttgctccaagggatgtggtgtctcgttctatgattactgaaattcaggcagggagaggatttaagcatattacaggtgccgattgtcttaaattagatctaacccatctcggtgcagaaagaattaaagaaaaacttgcaggaatcagggaaattggtattaaattttctggaatagatgtaattgatgaacctatcgaagtgagacctgtatgtcattatatgatgggaggtattcattctaatgtggatggtgctactgaatttaatggactatgggtagccggtgaagcttcatgtaatagtactcatggagcaaatcgattgggagcaaattctacatctgaatgcttggtatggggtgctattactggagaattggctgccaatcatgctttaagtaaaaagaataccattccaagtactgataatcatcaatttttaatagaagaaaagagaatctatgatgggatatttagaggtcgtggagatgcaaatccttatgaaattagaaagaatctgacagacactatggatgaaagatcttatgtctacagaaatgaaagtgatcttatagagggattgaaaagaattcgtagtcttaaatcattaagttggaaacatgttgatgatcaagcaaaagaatacaacacaaatttcattaatgtaatggagattgattccatgatgcgagttgccgaaatagtattgatgggtgcaataaatagacgtgaatctagaggagctcatgcaagaattgattatcccaatcgcgatgataataactttttaaaacatactctagcatattataatggtgacagggaacctcggatggaatggcatccggttatatttactcgatatgcaccagtggagagaaaatactagatgggtataaaacctaatagtgacaataattctagtacaggtcgcgacattcggctcaaatctggacgtgaaggattaatgggctggttgaaccctactagatatggttgggaaagagtatcttattggctgcaacgtttaaccggagtcggtctattaatttattttattgggcatatatatgaaaccagctcactagtaaatgggattaatgcttggaatagtatgctggagttaactcagacaacaggaggccacatatttctattgttggttataggtgcaagcacttttcatacagttaatggattacgacttatttttaccgagtcgggaataggcattggtagaccaggacgaccggactatccttatgatgcaacttctttgaattataagcaaaaatcaggtatatgggttgccctattactagcaactattgccatgttgtatggcggtatggttatgtttggagatgtgaactaagattggacacaacaaatacctttagcattttgaaatattttatggagtttggaatctagaatgccattattaaaattacgtgaaagtcagataatgaaaattcattatctgactggaatatgtgccgtattctttgtagccattcatatattatttagactcattatgccatttggccaaagtttagaatatcataacgtagtagctaattatcataacatatactatgtcatactattggaattaatccttgtttttatctccattcatggattcaatgggttgagaattattttattagaacttaaacaaaatcaatggtgggagtccacaataactatattggtgttggccgcaatgattggtgttatagcatatggtacaagaacgattatcattgggagtcaattataatatgtatcaacaaaattttatactctggtcattttttataccaattctgattgctaaacttgaacatgaaatagaaaatatgtgtggatagacatgagtgaagaaactaataatataaaattaaaagtatatagaactaattataatatagaagagtctccgcattatgacgaatttgatgtgtccgttaaacgatggactaccgttttggatgcattgttagatgccaaatcttattctgacagtagtttgggtattagatattcatgtagaatggcttcttgcggttcatgcggcatgaaaataaatggcaaaccccgattagcatgttatacaaaaatatctgaactaaatgaccaaacaatagtttgtgagcccctacctaatttcccaaggataagagacttggtcacagattttacggaattcttcgctcatcataaaaagatagaaccgtatatacacaatgaaaaggtgccaattgatgttataaaaaaagatgacttggttgaatttaaacaaactccagaagatgtagacaagtatttgcaattttcttattgtattaaatgcggtttatgttattctgcatgtcccacagtagcaacggatacaaagtttccaggacctcaagctttgtctcaggcatatcgatatacagcagacaatagagattctggagaatcaactagattcaatataattgatgatagacacggaatttggagatgccattttgcgggatcttgcagtaatgtatgccctaaaggagttgacccagccttaggaattcagcttcttaaaggtcatctgatcggaattacaaaaaatgataaaaaaatcgcgaccctaaggtcaaaagaggaatagcaaaaaaatcagcgactgctcgacaataagctagtattcactctttctctttttgttgttctgaaggttttttactttcatttacctgcttgtttatcgcttctgccatgaagtggttacttacatttacttttacatccttgatgcctccaactttgaaaatattgtctcttacatcttgtgctattttaaatccaaatactgctggacagaaggggcttgtaagatgtaaatcgacatcgacttttcctttatcgatgtctaccttgtcaattaattctaattccatgatcgaaactcctatttcagggtcaactatttttgtaagttcatcaaatattagacgtctagttagttgtagatcttgagacatgataacatatattgtcatctttcctatttattaattatttactaaatccaatatttttaacctcctctattttattatgttaaaatatccgatcaaattaaaattttttaatgtataggtccaggcccagcggaaatttggataacaaagctctctcattcctgtcctcattagacgaagatgctgagttattttattacgatatccttggaagtcaagctcatgtaataatgttgtatgaagttggtatcttggctaaaaaagaactgatcgccattctaaaaggtatgaatcaattactgatccattcggatttattaaacagatatggtgatagcgcttctgaagatatccatgaattggtagaatctgctattataagaattaccgatatcaattcgggtgggaaaatgcataccgcaagatcgagaaatgatcaagtaatattagatattagaatgaaacttcgagacgatttaaatcgaattagtgctaatataatattattaataaaatcattattattgcaggcaaacaataatgttgattccataatgcctatgtacactcatttgcaacaggctcaattgggtgttttttctcattatttattatcatattgcttttctttaacccgagactttgaaagatttactgaatcatacaaaaggattaattgttctccccttggagcttgtgctatcggaggaagcagtatgaacataaatcgtgaaaaggtgtcatctatgttaggtttttcagatattatttataatagtatagatgcgacgagttcgagagattctttgttagaatttgcttctgcttctcttatttgtatgttaaacctgtgcaaaattgcagaagattttattatttggtctacatctgaatttggttttgttttattgaatgatcaatttagctcatcctcttctgtgatgccacaaaaaaagaatcctgatcccttggaactaattcgtggaaagactggtgttattcagggcattcttgtatcaatttctacaatcatgaaaggattaccttcaggatatagccgagatttacaggagataaaacctttgttatggaagattacttcaatacttgaagattctatatctattatggtcgatgtgatatctaccatgagtatcaataaaaacaaaatgtatgtagattcatctaaaagctatgctatatccctagatattgcagaacaacttatcaaaaatggaggaatatcttttagagagtctcacaaattaatcggcactatagtggattatgctgtaaagaaaggcaatatccctctgaatctattaaaattaagtgatatatctgaagcattaggactgattaactcttcgaatcctgatctaaccgcagaaaaaattcaaaatataatccaaagtttgactccggaaaattcaatagcatatcgcactactaagggttctcctaataaaaaagaacaaaaagagatgatttcagatataactacgaaagtaaatgattatgagaaaattcttgaagaacgttctaataggttaacgattgcaaaagataaacttaattcaaaaataaaagaatttattaatgaatcttcataacgttttaataagcgaatgctctctattactaaaaaatcttagatttaaattatcctctcgaattacttacattgatgtcagaagtacaatcacaacccaatcaacaaaacaaagaaaatagccctacaagagatgcaatatatatcgggaaaaaaccactgatggcttatgtaacttcaacacttattcaattggcgaatcaaccttctgtaactattaaagcgcgtggtttaagcattggcagagctgtggatgtatcacaaataatattaaagagaatggaaaatgctggctatgctgttggtgatatcgttataggatctgaaaccgttcaagcagaggatggtagaacaagaaatgtttcgacaatagaaattcagataaaaagaaattcttaaatacctgtagtttactttttctccctttgtgctatggaaaaaaaaattgcagcgatatttttagcacatatcaaccctttgaccgtttcacatgagtcgattatccagaatcttttacagaattatagcgtttatatatttccggtaaggttcctaaaagatgggatagaagtaaatacaagaagttttccattttcgtacgaaattagaaaacaaatgatattggaatcctttaattaccataaaaacattcatgttcttgaagattatgcttttctttctccatacatacaatactttccaccattcgtatctcccgcatttaaaagattaaaaaataagataatttttaatattcatgaaaattcttttataacctacaccggagatagagcagagcgggttctgttatccctctttggttttaatccagttaaagctaataggcaagttatctcgtcgacgaatgtaaaaaatcttttatataaatcggttttatccacagacaattcaatctcgaataaatcacaaaataatgatttaaaatggcatgaatttgtttcccctaaggtcggccaagtaatagaagacaattgggaaactataaaaaatttttccagtactaaggatgaaactatacgtgttataggtatgaaattcccaaaaaatggatttatttaaattaattactatggatttaacacttttatagaagtaaaaaacttgcaaatctatgaataccaagaatgctgatttcatttggtttgacggcgaatttaagtcatgggattccgttaccgttccaattacgactcatgcattacactacggaacgtcagtctttgagggcgttagaggatactcaaatgatcaaaatctatttatttttaaacttaaagaacatatgcaaagattacttcagtctgcagaggtctattctatcaattcaaattatactctttctgaaatatgtacctctactgttgaattattaaggaaaaataatattaaaaagtcttgttatattaggcccctattatttgtgggggataaaggaatagaccttaatgttactaaagactctccttcccatctagctattattgctttcccttttaacagatattttccagaaagcgggataagaacatgtatatcttcatggagacgaataaatgagaactctactccgcctatggcaaaagccggaggaaattatatgaattctgtgttagctactcaagaatgtaaaagaaatgggtatgatgaatcaatattactcgattattatggcaatgtaagtgaagcaccaggagaaaatatttttctagtccgaaataatatgatttatacgccatcactatctgattcagtacttgaaggaataactagggatacagctatcacgatagcaaagcatcttggttatgatgtatgtgagcgatccattactcgcacagaattatacattgccgatgaaatctttgttactggtactgcagctgaaataactccgataataagcgtggataatcataaagttggaaacggaacagttggcgaacgtacaaaaaaaatctctgactactaccaaaaaatagtagtatctcaaatacccgatttcaatacatggattactccagtgtggtaaatccgatgttaacaattctaaaaacaagacgaaatagtataaatttaggagatgttgaaaaaattggataaatccattaaaatcgccgtaatcggaactggtggctggggaaagaaccacgtacgcgtattaaatgatttgggggtattatctgcaatatgcgattcagatgagaatagagcccaagcattggcaaaaaaatttaagatcaaaagctattcaactgttgaacaattacttgaaaaggaaacttctcttgatgcttgtctagtatgtaccccgaccaaaacacactttccggttgcgcaagaaataattaatcatgggataaatgtttttgtagaaaaaccattgtctttctcgtcaattgaatgcgaagagcttacaaaattatcaaaacagaacaatgtacttttaactgcggggtacatagaacgttttaatcctgctgtacaggatctcaagcaaatcattgatgacaacacttatggggaattattaatgatggagtttcatcgtgaaaatagaatgcccatgcatataaaggacgtaggtataatctatgatacttcagtgcatgatattgatactgctttgtttatctttaatagtaagccaaatgtcgtttttgctcgtgcaggtaagaagtttcataattctgaagattttgcaacaataatgttgggattccccaatcagaaagtggcaattattgcatctaattggattactccaaaaaaagttagaagattttcggctgtgtgttctgagggaaccatcacgggcgactttatcacgcaagaaataagaatagatgatgagaatcaaacacttattcccagaagaaacatccgagagccattaaccttggaactagaaaactttgttaaatctttatctggggatattacaaagtacctagtaactcctgaggatgccactgcagtaacaaaaatcgctgaagcagctttaatatcaagcaatactggtacacctgtttacctttctttctgagatatcgacatatatgcttataatattcacatttttgaaaggcgtcttgaattgtagtgttctcttataaagacaaaaagtcggcaactaataatattttcattaagggtaattgtcctgcgccgccttagagttatattgtatgcttaatttgctgacacatctccagtgctcatttgacaggcaaattggtattttaagttaattataaatggactgaaatacaagtctaattgaattagaatgtctgaaaaaaaagaaagttctgtaataaatttcatttctcctaaagcaacggttggtgaaaatgttaaaatatggcattttgcgtatgttggggataataccgttataggtaatgatgttatgatcggctcacttacccacgtggattacaatgttaagattggaaataactgtaggatagaaggttctgtatatattccaccacttacagaaattgggaataatgttttcatcggccctggaactacctttaccaatgatccttatcctatgagcaaaagaatgattggggtgatcgttgaggatggagcaatcatcggaggtagatccattattaaagctggcgtaacaataggtaagaatagtgtaattgcaatggcctctgttgtaactaaagatataccttcggatgtagtagtgatgggacatccagcgaggataaaatatactagatccgaatatgatataaaaaaaactaattgggatgtttagtatctctttatattttgttttttatacttatgacaaatttgtgtgataaattaaatcctttctataggaaacttgatttcatacagcgcgacgtgatattgaacctaaatggagaacaaataataaagtccacaattaacgctttatttgtattcagattttcagcataaaggtgatactacatttccattgtgttgaaagtagaatttgccgctactataattaacttgtagtttggatggcgatgattgatattcttttccattcggtcaattattttcttatgatctgcactagaacaggcaattatgatgttattagtagaagtggggatataattttcaacgtcttcgatttctacttctgcaatataatctcgtagttttgattccagcaattctcgaataattgttttatctcctcttatttcatgattatcaattgtccaaaaaatagtaaccttagttctactagcctttatctctctgaatttcagttgacttcttgtttcatcaaccaaactttttatgaacccttcgatcgaccttattgtgccatttaccacatagcttagtgcagtagagctagatatggataagccaataatccgaagatcgaacaagccatttgctatttcatcaaaatatattgactctacattattgtaaaagatttctcgtctatcttcttttgatttacctaatcttgaaatttcattgatgcaacttaactttgaatacttggatataatattaatcgaatagactaattctgctaatgttatactagttaacttgacgtcattttgaatgggatcgctttcattaatcaaattaaaaatgctatttaaaaataaatttccattcccttgctgatgtgaacctaatattgtctgggaggtcttgtctgaatttattggattgtaataataagtgacatctgttccaactatcaaacccgattgatgttcaatgagtgtaattatttcattatttcctccaattcctaatggaatattaattacaattacagtatttttctttaaataagtgattatctccttaaattttaaaattatttcattttttacatcttgatttacctttcttattctaggtgcaaaaaagactattggagcattactaattgctttatcgaaaggttctaaatttaatagcaactcttcttcatttaggaagttaatatgcggatattcttttacaatttctgaagtgagaataattcccaacctagaattttcatcaataataattacttttgattgtttacgaagtatcttttttgcaatttcatatccctccgtacttaatccataaatgacaataagcttgtccttaggatcactcatttcaatttcaagattttcaatatttttatcattattattatctgtataatctgataacttttcaggttcttcactaatactgtcatttggtttagctatcctgtctgaaattctctactcccccaataccttaattttatatttctttatttagttttggatttattgatttttattacaatttcgactaactagcgatattaaagcgaaagaattttttaatattaaagaataattctaattgtgaagatttggtttgacattttgactccaaaacaaataatgttttttaaatcagcgattatcatgttgcaaaaacagggtcatgaagtcttatgtacatcacgaaattatagagaagccaatgaattatcccgaataatgaaattgaatctcctgatggttggtaaccatggaggatcagatctttttgataaactttttcaaagttcaaagagaattatggagctggctaaaataatttccaaattttcccctaatttagttatcagtttttcatctcctgaggcttctagagtttcttttggtttgggaataaatcacatcggtttcaatgattcaccacatgccgaagctgttgcaagattaactattcctttgttgacaaagttatttactccaactgcaatacccatttccgcttggaaaagatatggtatatcttcaaagcaaatcatacgttataaaggcttagatcctgttgcatggttgacccgagatctttatgaaaccaccttccggcagcaaggcaagaaacgaccgtgggtagataaagatttggaattcttagaagagttaaagatagaccacttgagaaaatctattctgataagacttgaagaatcaaaggccgcttatatatctaacaagcatttgcggatacgaccattagatttagtagattatgttgcaaataattttgctgataataacaacatcattattctatgtagatatcccgatcaaatcacagaaatgtctaaaagattcagaaataaagccatagtattgagacaggttgtcgatggggttaaactactgaataatattgatattttcgttggtgcagggggcacaatgactgcagagtccgcactgctaggcaaacccactatctctatagcccctattcgattctatattgatgattatttaagaaaaattggattagttacccaagcttctagcccacttcaaattgagaagttattaaaatcattcttagacgatgaacaaaaatgtattttgatacaaaatcgtgctgcaaggatactagataaaatggaagatccaattgaaaaactcctaacatatgtatcaacaattaataaaaaatagattcgtaaaattaataacgtccgtacttacaatataaaaatgcccggaagcccggtagtattacaagtgccgagtgtagtggccaagcatagaggcctttggagcctttgaccccagttcgaatctgggccgggctatttctatgaataagcaaataaaagtattattatattcgtgttttattttgctctcttcttgatacctattaaaagatttatcatataatttagcaataaatctgtggacttgtttcaaaactacacaataacctaaatgctaaataaaaaaaatttttcttattagtggttgtgactttaactgatattaattttctctattgtcaaaccgatttcatagatgcgatgtctaggacgattcttcaacctattgttagtagtatcgatgcctcgacaaaatgtaacgtgatcatctatgtcataaaaccatgtttttatgacttaactatatgattcatgttcgtaacaccatttccacgatttttttggtaattctactatgactggatgcttatgattctcaaagtgtttcctagcatgaagtccaattgaagagtcacaacaaccaacatgcccacaagttagacacattcgtaatgcaatccaattcgttccttcattttgacattcttcgcatcctatggtatttgggatcaattccttttcgttagatttatcgatatgttcacaattgtgtggcatgtataattcataaatttcaatgaatttaaactattaatcgttgaatctgaatttttgagaaatgaattcagatagcgacaaactactggtgagtttccaatatgaaatctgtagcactggttttaaatgttttctaaaatgccaatcagttcttcacaactcggctttgattgtataatttacatagtttatagttaaatccactttctttaattgacagaacaacaaaatctaattcttgtatatccgatatttggtgttactattgagcaattggcaataagttatatcttagaaattactagattttgatttatagtaaatattattaatggactgttactccaaaattaaattagattattgtatcctcttacttcagtttataatgccattttcttaaagattatttatactattatgacaaaatattctataatgtaataattcgtgttattagatatatcggatttcacaaattaaaattgtctgaagttactatgattttttttaatacatgtaactgcttcaatttctatttgaattaattaaggtgtataatcgatatagatattacttgtctttggaaaattcctatttttgtttgatttgttctttcagggttataacagtcttgaatccttgacaatatgccttaacacttgattatccttgacaaaggtaatagagattaaatagtatgtttcacatgtcttgatattatgcctcaaaataataataaaaatggtaataatagaggattagcatcagctaatgaagaaactaggacgagagtagcaagggcaggtgggaaagcccaacatgatgaaagaggattacaagcagctaatgaagaaactaggacgagagtagcaaaggcaggtgggaaagcctcacgtaagaaaacgtagtccttttcactacgggtttctatcctatttaccttccttttattcgatgattgtaatgttcttcatatattgtaaattaaatattgatatatcttgatataatcacaaagtatcctgcaatttcatgttcaatacttttacgttagagttataaacaaataaacaaatgtgatactggattgagaattagaatttgatctggtttatttaatttcgtgtttttctggattatttcaaatgttgtcttaacctgttagtcatctgtttaactatccattaaatttatacagctgatttttagattttttagatgattcttgaagattattgatctttgacaaattttgaataatcatgtcaccaaagctcagtaaataaatattagaaataattgataaaaaaagaaaaaaatatgtttattgttgaccgacagcgttactaccggtattattttggctttgtgtgtttgcgttatttcctgatccagctgtattgcctcctgatactacaccactgttttgggtagaggattgtgattggcttataccttggttagctgtgttgccaccgccgctgccactaccaccactttgtgctgctgcattatttccagtgtttgtttggctttgtgtgtttgcgttatttccagaattattggtatttccacctgatactacaccactgttttggttggaggattgtgattggcctataccttggttagcactgttaccgccacctttaccactaccaccttgttgtcctactgcattacttccagtgtttgtttggctttgtgtgtttgcgttatttcctgaaccagttgtgttgcctcctgatactacaccactgttttggttggaggattgtgattggcctataccttggttagctgtgttgccaccgccgctgccactaccactaccaccactttgtgctgctgcattatttccagtgtttgtttggctttgtgtgtttgcgttatttcctgaaccagttgtgttgcctcctgatactacaccactgttttggttggaggattgtgattgcccgattgcttggttagctaaattgccaccgccgctgccactaccactaccactaccttgttgagctaatgcattgtttccactgtttgcttggttttgtgcattcaaattattacaagaaacaaaagtaccagaaccggatacacatagagcattttggttagaggattgtgattggcctataccttggttagctgtgttgccactgtcatcatcatcgtcatcatcatcattgttgccaccactttgtgctgctgcattgtttccactgtttgcttggttttgtgcattcaagttgttacatgaaaaaagggtgccatcacctgatacacaaacaccaagttgggttgaggattgtgattggcctataccttgattagctgagttggctgtagcaaatacattcatggtcattgaagttggacctaaaagtagtacgaatgatattgctagtacggctgaactcactaaaattttatttagagtaataatactattcatccaatctatattactaataaaagtatataaactctttttatataattattgaacctaatagtattttacatatatttcctgctattttcttctatatatcacgaaccggatatttcactagtaattgaattctggttttaaatcaaaccccacattgaatcttatttatataaaaatgattgttgtattactaacaagatatattttatttggtgttttcatcttgtttggtatttctattcatatatgtaggtctttttaattttatattcctgaaccgatccattcttgaagttacacgtgtctcagaagcagaatagggatgtggtattactagaactctttcaatagacggaaattgagaactaattaccaactgtatctttaaagataacatttcgacttcttctagtgattcctttccatcaactgctatgtgaatctctgcttgatctatcatgccagaagagcgtagtagtacgtctctaacaactatcttttcatcgctaaattgttctgaaattatattttttattactactgttaatttggggttttgccatgaatctatgagtatcaaagaagattttttaagagatatatatgaaactgagaagatatagcaagcaattatcattgctcctattccatccatttgtaaaaatccaaattgtgttgcaacaagtatactaaagaaaccaataacagaagctgatccatcttttatagaatttctggcatctgtttttagtgagagcaagttatacttgttagctataatacgcatttgaaatgctctgtgaagagatagtgcacttgctccggctagaactgccataacaatataaggattgtttatttcgtgcggatgaattaatgcctgatagccattataaagtataaccagaccaatcactatcattcctattgcagcaactaatgctgtaaagctttcaactttgtgatacccaaaatgaaactttttatcagctggtttatgggcgatccttagacccaataacactatgaaagaaattgctgcatcagatatcgaatctataccatccgcagtagcaactacactaccactaagaattcctgtgattatttctacaacacctatggccaacaaagttacgacagaaacctttgcaatccttttacctgctacgattccttcttgaactaaattgggtgattgttgtgttttagtaccattttttattagattttccttgaggtctgcaagttcatcagtagatttattttctttactgtcttctacatcgtccaaattaataatttattttaatatcttgaatacactatttaaaatttgctagcaaatctgtctttgtaaaaaatttttctaaatattcaaataaaattagcaatttataagtaaaatattaccagttttaaattattctgaacatttcctgttcaataatataataatgtgaagttcatgccatcattgaatggtattggtaatatttttatatccgtttccatttgaatctatcatatctttagacttttattatgatatataggatgttcattgatttattattctaaaatgggatcagccggattcgaaccgacgacctccagcgcccgaggctggcatcataccaagctagactatgatcccctcacctattttcacagtatcctatattatgtctatggcaaaagtatgtgaaaagtatgtgaaaagtatgtgaaaagtatgtgaaaagtatgtgaaaagtatgtgaaaagtatgtgagtaactgttgtctgcttttaatccttaatttattaactttatgatcaagtaaaatcaagatctatttcatacttacaagcttcaattagtttctggtcaaaacatgctactccaatatcattgtagttgtcctctcgatcatttttcaaaattcctcgctcgataagtttaaaaattattgaatagcttatggggaatgcacctgttgctcctggagaattgtaatttaatatatgaagcatgttatttctaagcataaaaattggattcattagaaaattaccatccttgtctatcaagtttgatcgaattccagcggttccacgaattttaaagtccctatattcgataatgggaagaaatttttttactctatttatcatatattttttagaaatactacttaatccttctttgtaaactagattaagcatttctctactaaataacgttctatttatattgctattttttcccttcatgagtttgtatattttaggtagaaattctttggtattaacgaatttattataaccatatggtgaaaaaaccggacaagcattgggtcctacttctctatttccgttagccctaattatccagtgaggatccagaaatggaaattgttggaattcaggtacagaataaatgctatggtttgtgagtgtgctatattttgggggtgctaaccaatattcaccacgaaaaaaaaggtcactatattgatggtttattttggccatatctaaaatactaattgaattgcttccagcggcattgatcaggaaatcacatttgatttcttttattgtattttcaaaaaggttgatatattctaggacaatttctggacttgtatcagttcctttttttatctttagaactttagatcgcgttatgaaggttacttgctgattttcattagttatctgagttgctaatctatgggtaatttgaccataatttaccgatgcatctttatgacataagatcgctgactgacatttcagattcggttcgataattgatatctccttttcatccatcatcactatttccttttcatccaaaccattttttattccccattccaaatgcagcgaaagtgtacttaatgatttatcatcatttgctacttcaattaccccatcctctacaaataaaattttgtttacttgacaatatctcttccaaaaatcatagccatataatgcagctttggcccaaattttcttcttttcaggattgtagatgaaaggtgcatggaccttgccagtatttcttgaactagtatgtaatcctgcactttcttcctgctcaattattgttatctttgagttcgatagggaagaaattacatatgctagagttgttcctagaatacctgcaccaacaattacaatatggttattatttatgattagacactctttcttctatcctgttttatttttatactccagtcatagttaccttgcccatcatcagcgattggttaatttcatttatttcatggctcttgtgttttcttctttctatcacataccctgatttagaatgataatatattatcatgtctgtaggataaaatgaaattatcgaatgattgtcggaatcagacgcaagatgtcgaagatgaatgttttcccactcaaagagtttgtctatattgccatcaaaatggaagttgcttccacaagtgcactgaacatttctccagctctccttgatatttcttaaccatttgtccttttttggccctacttcaactttttcaatgttattctttttatcaatcatttttgaattattggatagctgcaaatcctttttctccgcgctcttcaaatacaatatatgatcttcatattttaaatctgtttacttttgtgaacccttattttcacatctactagtttttttgaaccgaatgcctcaaattaattgagaaatatgatctactctgaccgctatttggcgattattcgaaaaatctattttttatattttataaataatctctatagcgataaattgctgtttttcagtgtcattttagcttttgaatagtcaagaccattccactcgatatggaatcctagaaatgtgagtatactaacatgtattttttcaggtatttttttggaatctaaaatattacatgctgctcccagattaatgacattttttatctcattccaaatctcttcaataaactgtgttttaagaatataatcatcaattagtagtagtcgcttttttgataactcattctcaaacgtgtacttgaattctttattcttgtctatcaactccttgagacttgcctttaagaatacgtcaccatctgtgcattcttgcttcaataatccatctagtttatctaaatgtatgtaactcattgcagaaattctaaattcttctatgattctgattacattttgaatgatcttattataattctctgtattgagaacattacgacttatgtaagtgttttctatatcttttatatatcttattaactccttaaatgaaatcttttcgtttttgtaagaagttattaacacattcttgttatttttaatatgggttatcttattttcttcatttaattcgtatgacatcaaattttcaagattgatgatgaggatcatgaaaaatttttcatcatcaaccttgttttgtacgatttcgaatattttagatattttcctttcaaggtattcttttgtccaaaaaccaataatctcaacaaatactctattgtcaaattttgataagataaagtctggtataaatgcagttttttgttttgttataataggttctggttcccgctctatcttccatcctgtcttaaatatctcaaatttttgtaagaatatcttttctattttgctatcaaaaagcttcggcacataagaattatctttggaattctcaatattgatttctagcatttctgcactgttactatctcgaggattatattcactatgagatttgctggttaatgacaaagatttttttcttgattctttatactgataaaaggaattttctaagcctattttaatcattttatccgaaggaaatgagtttggataggatttttcagaaatttcaaattcgtaaactagtttctttccactatatgttatcctaagaatatcggcatctatgtgccatctttctgatttcataattacaggtaataattttgctatcgcgaccccgtatctgtcagtcaattttattacattcaaagcgccttcaatggaacagattatcttgttttctttaggttcctgggctgtttcatctaccaaatctaaccagtacattaggccgagtctttttacttctctcgtatttctttccaccgtgttcctagatttagatccgatcctaatcctattctcacttttaggcaaccaaaaagcaaagtttgaattaacgatatattataaaggagaagtaacttctcggcattaattggtacatatgtatccattatcatattttcatccagatcagaccacatcacctttgacaacatctcattggatattcttaatttgttggaaattttctcaagaatcgatttccttgtttgatcagttaaggcaatattttgtctgaccgattcatcaaaaacacttctcctaatatccatagcattgagatcttttaacaactcagttgtctgttttgaatcgtcttgatgaggattctttgagtgaatttgcgaaatggatccaaatgtacatcttttttctaaaactgctgctaatcctctaataagcttgtaatctttatcagtttgttcgagacccttaagagactgatccagcttttcttttataagtctatgttgataggaatgttcaaaaacttgaatgacttgtttcgctatctcgatgtctttagaattctgttctaaagaacataatagaggatatattttatgatttttattatccaatttatatctaagtaaatctgaagctatcattttttattctttaaccatgtcctggtaatactcaggctaatagatgatcttgtcatttagtacttatttgatctgatttgtctattaattgctttttattgtttatccctttgtttcttctgttgctagtaaatatttcacttgtatcagatgaaattatttcaataagatcagccacgttttcaacatcctttttaggtctgagtaatcttcctagtctttgaacaaactcccttttacttcctgtaccacttaatattatacccaaattggcatcaggaacatctgttccttcatctaaaaccttggtggtgactataattctatatagtcctttcttaaatttttctaatatttcatttctttcttcattctttgttctgtgtgtaatgacaggaatcaaaaatcggtctgaaatactataagccagtttagtatgaaccgtaaaaataatcgttttgtcagtaagatgttgttttaagatcttttctaattctacaatttttgcatagctgtttagggctatatctaaagcttcatttttaagaagtagtgcctttctaagattaatattgtttgcagaaagtatgattaatttttctagtcttataggataaaagatctttgattcttttaacaattgattatattgaaatattcttcggttatattgtaaaatttcgtctggtaacatccttactttaatttttttcaatctaaatttggctagatggttatcttgagataattcataaaaatctttactgaatactgtatttcctactaatttgtaaatatttacatgtttaccatcttctcgctctattgttgcagttaaacctaatcggtagggagaaataaattgttctccaatcaaagaatatttgtcagaagccaggtgatgaacttcatcgaatattaagaattcaaatttgttacctaaatatgatgatttcaaataagctgagtcatatgttgtaattgtaatgctttttatatcttcattgcctcctccaagcttgcctatttgattcttgactgttaagatattttccatggctttaaaccattgttccattaaatttaatgtaggaactattacaagtgttgatgtatatgttttcaatattgcatgtaatgcaattagtgttttgcctgcaccagttggtagaattatgcatcctttcaaattatttgttatccatcttttcaacgcttctttttgatagtctcttaactcattagtggtatcgaattggttcctattgagtggaatgatgtagtcttgtactttatctatataatcaattttatttcttctgaaataattaattatttctgggtagtagatacctaaagctcgatatttattaattctagggtcgaatacagaatatggcgtgtgaaaatcgccggttactagaatagtccccttatcatattttagctcggtcacagcattatttttatatatgatatatcaagtggcttttttatttaaatctatttttctttttatggccccaagactctaatttgtatctcagtaatcaacaacaactttcaatgtcttattttgattaagtttgaattatctagacagacattttcattccagttatctatatcatataaaacttttggtattttattctaattattgatggaatagataaaattaaaaggatagtaaatgaaataaccattgatagtaaaaatgtcaggtgacgaaagattatcacaatttctaaaagaaggtaaagattgggagagaaaacctaccaccatagccggcgtttttttatttaaactacctgagtatcgtggtagacccgcatcgatagctatagaaattaacccactcaattcgaatggtactccaagtaaaaaaagagggattgtaatcaaatcactagaagaattaaattctatcttggaattgattagtaattctaaggtttcacaattggcacaatccatcgatagcgttaacccggaaaggaagactatggtaaagagtgaatcaactgaagtatttgagatctgaatattgataaattcaatctatactgccatcactacttctttctcatatttaataatctaactttggtcaagaactattttactcatcctctcttaaggcatgaaacgattaagtatagacaatatcaggaggacattgtaaatagggcattatataagaattcattaattgtgatcccaacctctttaggaaaaacaattgttgcattattagtttgtcttgatattttacttaactggaaaaaagcaaagatcttagttcttgctcctactcgtccattggtgtttcaacattttgaattattcaaaatgaatactctcctttcagaccaatgtattgcgctaacaggagagatagcatcagaaattagaaaaacaatttggaagtcctcttcaattagagtatactttgctacaccagagttagtaaagaatgatatccgagatagtatacttaaaaaagatgaattttatttaatagtatttgatgaggcccatcgagccgttaaggactatagttatacatccatttctaaacaattttacgaaaattctgatcatgctaaactaccactagtcctaggcttatcggctagccccggagctaaagaagaaaaaattaaagagatttgttcaaatctatttatagagcgaatcattgttaaatccgaacgagatgatgatgtcttaccctatgtttttgatactaacatagagcattgctcaatcgagatgaatgattatcataaggacctatccacattattgaattctatgattttcgataatattaactggttaatcaataaacgactcataaaaaagaagagagttgaaagtgtatatagaaaggatctcttggcacttggggaatatataaaattaaatttgaatccaaaaaatatgaactttttcttactgactgcattaaagtttcaatctttatccttgattttgttatactgtcgtgatttggttgaatctcagggtagctttgctctcaaaaaattcttatacaatgctaaagagaactccgaaagtaaaacttatcaggaactatttgcagattcccgaataaaagaaataatcaaaatattaaaagatcatgataacgaacctccacctaaactagaaaaggtgttatcggtagttaatcagtttcttgatttaagaggagatataaagacttccaaaaattcctttcaagatactgatgatgatactattaatgttactactacgaaacagaattattctggttacgaagacaagcaggttcctactaattatcaaaaaaaaattttgattttttcgcaataccgtgatacgcttgaagtaataacaacctttctaaatgacaacggtataccctgcaagggattttacggtcaatcaaataaaaatgggcagaaaggtctcagtcaggataaacaattatctattcttggtgattttagacttggaaaattcccggtacttgttgctacgtcagtagccgaggaaggtcttaacatccctaatgttgatcttgtgctattttatgaacctgttccaagcgagatcaggtttatacaaagaaaaggaaggactggcaggttttccaacggaaaggtggtaattctaatttctgaaaattctatcgatacaaaatatttggagatctctaaaagaaaagttaatcgaatgaaatcaagtctccagaatacaaattttactttggaaaaatatgacaagagaacttttgaaaatccagacaaaatgcttgattctgaactccaaattctttacgaaagatccaaagcatattctgcatttggaaaggaagataattacaacgaaaatattaatcctattttggattctatttcttcaaattctaataagaaaattaaaggtcttgtcaagaaattatcctatcgtcataggatctccgctgattccgaattatctgcatcttttacaagaaaaaacttggaagatctttatgaaatctctttgaatttggatcgaaagaagatagttgagagagttcaacgacaaattcataacttactcggaaaagctggaaaaaatggactcgaagtttcatatctaaatgaggtgataggtgttgaccaagagattatcagaaaggctatagaaaatctgactaaaatgaaacgaactgtttgggttaataaaaatacaattgcattaatcgaatccatcaagtttctgtccgggagtaaatattctgtctctattgaaaagatagtgaggggtaaagcaatcgtgctcgtaaatgaaaaatggtatgctgacttggaacaccaagattactttggtcctagggcgttattaaaaaaaggtaatacttttagtattattggtgaaatgtatcgaagtgcaggaagacttcatttgattataaaaaaaataatatagttattgatatagtatgatgtcaaaattattcccaataggtagtcatatgaagaacttgcaatatttgaatgatcactatccaccagaaacctttatgattatgaaacctagcatgaatcccaatatggctccaaatgttggtatccattttcgttctttatgtgcttttggtatcatgtcataatataacatgtagaaaataccgcctgcagatagagcaagaattaaggatataataaattgcattccctgaaaatagaataaacctgcaagtccaaagattataggtagtacagatactgcgccgattgcccctagcgctttctttgaattattactaaaagcggtctttcctgtcatcatttctttatatgatgcaattccttcgggtatgttttgaattcctatgataacagctaaagcagttataggccctgctgctgcagctatcgatgcaccgattgctagagactccgggatcgaatctaatcctattcctagtaatataccagcacctcctcccttcttttcagcaatatagtctgcaatagtgaatattactgctcctgcaacaaacgaaattatagttaaaaccaatcctatgtctttttctgcttccacaaccatttgaaaaatcgctgcagacataagtagtccagcaccaaaggcagttagtgttagtatttttgattctgaaaaccaaaccttatgcgatattaatgcgcctataaaggatgtacatcctgcaaacgcagttattgcaataaccgtaattacggttgatatttctatcgtcaatgggctggactatggtattttctatatatgtctcattgctataaaaaaagactagtctttatccatacattaatctatgacttggaacgttcccatcctcaggtccgactcctcctcctccagcagcacgctgctcttgttctgctttgataatttgttctaactgttttttcaatttttgtccttgttctcttaattgactcgtatcaatctttagtttattgtcattcataaaattattaaaagattctatcagtaaggaggcaccttcaggatcaggaattccactggaagatggaatgagaattgcagcgcatggaatttgattagataaactagcagacaataatcctcctgcaatacccccaatgaatgtagtatacttcttagttgaatcttcaatcgcgtttctattgaaattactttgtggattagctacatcatcagaggcaaatttatcctcacttgcatcgtcttttttgccttcattgtctgtaactttaatttctttacttgtgttatgttccatattctcgcttgccagaatcactgtatttctttccgaatctggtataccttgaacaggaattccatctaaaaccatcacttcttctattgaatttttcattgcccaatccattactgcatctagaacaaaatgtatgccatccatcattatgggcgcttcgcataccaaaacgcaaacatttccttctttgttagcgtatagcctaaatggatgtcttaacttgccatcaataaatattactcctggagatatgtaatgggattctacaaatgcaatctgatacatttctagtttgtcgattatgtagcttgtacttatcgaaccgactagaccgggacctggaaatccagcaataagaattgttcggtctttttttaagttatttaagtctgcaatagtgataatttttgtcgtaataggagttgtgtttgctgtttcactactacctgataatgccgaagacatagaattcattaattacctatacctctcatgttcgcctattaattaatatagttattatggttatatagcaaaaaatattggcgctaggcacggtctccttcacaatttctgaagtggtttttctccaggtcttagacaatctaaaatgataagtctggtattgtatcgtccgccaatcctctaaatatcgtggttcttagagataatcgttgaatatattgatgtttattaaccaatgagatgttaacatcttaattctatattccaaacctttggtctatcacactcaataccttaaataactgctttggtacacgtgagaccgatcacgatacagttaacattgaccagactatagaatctaaaggctaaatactgaatatgtagatttacaatgattatcgctcctgcgttatctttatgaatcacaagcgagtatatctatagaataataatgcgttcaattggccaccgaagaacaagaatgtgggatgtagaagatttattcgccattgttcactcggtaaatttcaaaaaagttaagccgattgattagaataatatgtggatagatgtttgctttgaggaaagttttgttattcttttggcctatgttagtctaataaaatcatcaaaggtttcgttcagcctgaaaaccaggtagtacatatggtgtgaatgtgttattaaagaattgagtgagcatttaaaaaatacaaacatgaaaataactgcaaaaaaacaaaataacaaaaaatatggtgcgaatatggctagaagtttgaaaatatcagactaaatcataccgtcacattctccaatatcatacataattaatcaaagaaacaatagaatcaatacatcgctattaagctgtgcatgtgagattcaaagccccttggattcggagcgcgttgtatactctcatctatacgaatatttctatttaattttgtttcatactataatcaaccacgataagtcgttggtctttaacgttgaatatcttttgatgaagacaatcattcctataatttcacaaaaagataatgatacactataagttattgccatattgaaattataattatcccagataaaaccaaatgtaatgttgcttacaaaaacacaaactccaatcattaacgagggactctaacgaatttgtaacctgaattttctaaactttcttttatttctttaatatttgttaaagtgggatcaaattcaataaccacactatctgtcatatagtttatatcaatttttttaattccaatattgttttttagttgtttttctacaatgggtttgcaggttgtacaatacattccgacaactttaagatgagtcttttcataagatggcaatatccgttatatcaccctcttagtttaatattttaatttcatatttcaaaatagagaaaagagtatctagaatctatagatttatcgttaagttaacagcaccaactactaggttgtaagactccgtccatctagatattaaaattaattgtatagcctactacctgctactatctgtatcacaaatccaactatcaaaaggattgcacctagacgtgccaattgtgtttctaatattctgtgttttatttcatgttcactgtgttttgagatttgctcaatggtttctgtggacctaaatattttaccatactacatcattaatgcggcaactacgtcgattactaatccaattacaattacaatatctagcatcctataactaattcaaaatgggttttattaataatcagatacttattctctgtcgcggttgctctctttcagtcgacattatctatctagcatcctaatttgttcattttatatctaaaattttctagttcatttatctttatatcgtatctaaaaaaacaattcgtttttgaaaaaataattttacttctgaatactcttattttcttactgcaataagctatagtcatcaaacaataagttgatacaacccacgtcctaaagacaaagattcgagtctcccaactacgtgtggtattggcttaaattgtttttatgtctcacctcaaaagtcaatgcgataggatgttgttttaatagtttaattctatttcatgcctagaagaattgaaaatgaggtatcactttaaaaaccatattaaaattttatgatacttctcatctcttgatcattatagaaaattgtaaatatttccttttacaatatattgtacaggtgatgatgtgcaatggatacttccaacacacaaagtcatgtgtttgaatccatcctttttagagaccgtctcattgtgaaagatcccttttttcacaaaggatcaacatggtaaccaggaagaccatcagaccattggcttgcactcaatggtcttcctgtattcttgatccaaatacaaatacagttatagggaaaaattttttgtgactaattgcggataagtcaaattgcataatatcaataattatgaggttcagaaagtaattatactctcaaattaaatgaataaaacagattcttatttgcagtatgttcaatatcttttaatcatttcctctctatactgctttctcattccaaaacctctgaatgatcgtgttcttaatttatagttacaacaaggacaataagtttcgtcccattttataaaaatctcacagacactacatcttttctgtccttccttatatctagagggcataatatgatttctttttgctttgaatctttcgcatataccattgcaactcataatgattcattcatccaccaaaatctaaaaattgagaaataaatatttttttctcatgtttagatagtaggtaaaataaaaaaggttttaatctttgcatattaactaaatcttttcttgccaaagagcaatctcattttcatttctgatatgagatgatgctacctttttttcctgcatgtcttggacgagatagccacattctaatagtcatgaaagctaaaatactcaccatgacagatatcccaatggccatcagaatttcatatgttgaaaagttctgtaagcccagaacaccgtgtccatatgctccaggggacagcgctgcttcaactttggaacgtgctacctctagtgattgataccataaatcagttgttgttgtttgtaattgtacttgctgcgcataagctccaacacttctgttaggtattgaggttagaggaagcaatcctagtacggcgatcaagcctactgacaatagtttaggtagcgattttactctctgtattatttggtcttgacccatagtgatgattttagttacaaactcttttgtgttcataatgtaatcaccgaaattattgttcatatttagaaatttaaattttactttatgtaatagatttaacattatgttagaaaaaaattcaagcgccgaacttcgatttattttattttcctaattcatttttaaattgagaaaatatgggaagatcagttcagtatttcaataattcataatcacagaaatatataataggcaaaatataatattcaaaatttgttattctccaaatggagaatttaccattggattaaatatataattcttgatacttttagagtgtttacatacattcaacaaaaaaaaataattttgattgttattgtagctgcaataacttcattaacatatgatacaacatttacagtatcatttgcacaggtaaataatactgcaaataatacctcatcagataatgaacaaagcactcaagactatatttcgaatattagattattactcaatcaaacaatagatgcttattccgcaaacgatactgaaaaggctaaagaactagcaacgactgcttatctagataattttgaacatatagaggatcccattggtgaagaattatcagaagaaggagaagagctattaagagaacaattaggtgcacagatagacagcaatgcatcaatagaagagatcaaacagaccatcaatgcaacaaacaatgtattagatgaggcagaagaatccataacatcttaattttttatttaactcagattcagtaacctattcctttttagtaaagaatagtgaatcgaaaggggtttgatttacggaattattttgttattctttaggtctatattcgtttaataaaatcatcaaagttttttttggccaacctgaaagtcaagtagtacgtatggtgtgaatgtgttattaaagaattgagtgagcatttaaaaaatacaaacatgaaaataactgcaaaaaaacaaaataacaaaaaatatggtgcgaatatggctagaagtttgaaaatatcagactaaatcataccgtcacattctccaatatcatacataattaatcaaagaaacaatagaatcaatacatcgctattgaactatactctagggattaaaatcccatcgtacctgttttaattatttattgtctgatgttctctaagctgatcgattatatgatgagataatttgaagtccaatattcaatttattcaaaaccctaacatagtatacatgtcattagactaaaactaaaatgaatttagttgaaacatttgttatccccatattttttccttgaatgtccattttttattaaacaagaagttgctaactgatgctattgtaactcctagtaagagtgaaacatcatatgaaacgcctgattctctgagtatatatattgacaagaactgtatgaggattcctaatgagctacacccaatgaacattccatattgtctaataaatcgtgtcaaattgacatttttatcttcaaatgtccagaatttatttaataagaaatttgtagttacagatacggcaatccctactgcggtagcttgcaaatatccaaagcttcctaggattccatttgataaaagaattgataccagataattcaaaacaaagccgctagctcctactgtatagaacctggccgcttttgaaataaatcgaactgaactcctcttttctaattgagtgttttgttgctttgattttcttccatatcgatagagtttccaaactgccttaatataatcaaaaattatttgaaagttaagtttgctctgtccgtattttcgatccctaaaagtatagggtatttcttttaccttgataccgtttttcttctttattaaaatttctagtagtattttaaatccgtcagtattaaattccatgccgtgaagtgtatgctttggaaaagcaaaaaatcctgacatcggatcgtaaacattttttaaacataatccatgtctcgcaataaaatttgctcctacgctaagcaaaaatctcttaaagggcatcccattgatagctccgcctgtgatatacctagaaccaataataatgcaattgggttccttctttaattctgatatcattctatttattacctctggaggatgtgaaaaatcagcgtccatgattaggacgttttgtcccttactagtacctgattccgttcataacggccggaatcaagccagtcttttcctttctatgaattatctttattgagatgtttagatttggttggtctacatccaagcccattttctcctcaatatatttttcaaccataaggccggttccatcaggagagttatcgtccactattataatttcagcatccgttccagcaggtatgttagattgaatttgattaagtaaatctgtaatattctttgattcgttaaaagttggtataatgatggatacaaattttttatattctgtagctttttgtatggtatcatttacatttaacatcgtcattgcgtatccatcatctcacacaccttaatttattaaaatagtatataatacatgcgtttgttttctaatattatttataagatggccgtattttgatggggaatcagtatagttatttatttttatctctgtgatgatatcagatttgcgatcgattacctttttataattacaaaaatcttgccccattttactaatttatcctgttgatgggtgatttttatgatttattgaagaagaatttagataaaacatatcagtttaatttcaaaatccgacaattctatgaaaaaaataagtagttattctgaatttgcaactattctatagagattaccgtggatatgagagagaacgtgaagatatccatctgatccttcaattgcctcacaaaactgaattatcctatttttcatgcatgttaaattgctgtaacaacctgggactatcaaccacaagatcatgaaatttatctatctcaatagttttaatcggatccatcaagaccagttgattatttgatttggtattagtatcaagactttctttttgctgtaacatgagtaaatgatttttaatatctgttgtaatttcagtattacaaatcttactattgttaattacattcagggactcctcaagcattccttgaatatgttcatttcctttatcttcatgaaaatgtggattccttgtttctacttgatatatttctacattattctgtccaatgtctgataattcattggatataatacctccaaatttttctaaaatatttattagttcatatggttctacggaatatccgctagagaaatttaagttttcggcaagcgacattgaaagtgaatgttctccagcgtttccagtagtaatgatatctctctcatatcctgtaatatatgagatcaagtcatttagatatttgttactgtattcagatattcttccccatttcgggaaatatactttgttgttaactatttttggcttggagttccaacatattctgacattacaaaaaggagatttcgacatggcaaaacccgatgcaaaaatcttaatatattcatttatggctcccggaaaataattatcgctatcaacaaatcctacataatctttcttacacatctttgataacaaaattccaattatcatcccctcagctttgccttgtctaacttggttattatgatccaaaattgatgtatagtttactttatgaaaaattctactgaggttaggatccgtttgatgtattgtgatgatccttttatttgaaaacaaagaatattgtttaaccatttctacttccatagcatatctatcaaagggatttcgtcgactatttgatactataattatcaaacattcgtttggaataccgcttaaaacaccttccaaaagacttaatttttcatccttaactggaatcactactgccatgtgcttgaatatctttgataatgtgttattatcaaatgccatggtcgtactgttaaagttctgcaaagtggtaccatgagtgtgcccagaatctatttcgtatactttttgaagtgagtgaatcttcacagatcctatggtttctgtatattttggtggaaaatctaacctcatctgtcctaatgcgtatgtacatgattatttaataatatgatatatctatatattcattagccgtttctttggagtataagtatttaacttttgccattgaaatgatcttttcaaaatgatttaggttttatctagtctattgatctattgatccagtctgttcgattaatcctaatcctgattttaatctcggtgagaattctgatctaacaattatcactaaataaagttctcttttcttgatcgatttttatatattttgcatcacggttttaatatattatctgaaatcttatcaagattattaacgttattcaaaagtgatattagataattgactgtatcattagaaaaactacattagatgttttggagtgttacaatatttccctactgagcaaattcaaaatttagaccatgaaaatgtatcgctacatcttcttgtttagtttcggttatcatggaaatagttgagaaaattgaaatagattatatttttgttcttgaagttaatgaatactgttgaattgatccatcgatttctaagtttctttgcgcttctgattctcaagaatatgatgttatcatatttgaggattgccatcaatcttatatttattatgattagattataaatatgaaaaattttctttcccctataatattttctgtttatatcttgttgatcttttcctccgtagttttcttgttttatgtgtcccatctctcctttgcaacacagaatccatctggcgcagatatttggatggagggtgcggatatgccaaatgcgagaactgaggttactgcagccaatttggatacggaagtatatataataggcggttttacttcagacggtaaaattacagatatcatagagatgtacaattccactgataatacctggactcaaaacatcaagtcgcttcctttgcctcttcaccatgctacagcagatgtttatggcgatcaaatttatgtgatcggaggatataccggcgattggatccctagtaacaacctattcatttatgatccagataccaataattggaccttgggtgcccctatgtctacgccacgagggtcaccaaatgcaaatttcgttaatggaatattgtatgtaattggtggagatagttacgatcattctcatgtagttgtagaagggtatgatccgaataccaatgaatgggtgaccctatcttccatgcctacagctagacatcatgctgcttctgcagtagttgatggtaatatttatgtgatggggggtagacttagtggttctctagtaaacgtagatgtaaacgagaaatatgatactgttttagatcagtggattacagatcttgaaccaatgccgtcaaaaagaagtggtattgcagccaccgcagtaaatggatccatttatgtattgggtggagaacaaaaccaaggaacgtttgataaaaatgaacgttatgatccggatactgatacttggagtaaagaacttcctatgccaaccgctcgacatgggttgggcgtcgcctcatatgatgacaggatatttgctataggaggaggtccacatactggattgactgtttcagatcaaaatgagatctattatttgaatcaagactgaatctagttgattgaaacctttcaaatagttgtatcaaagttagccatagaaacctattttggtgaatggattactaatagcaaaaattaaaagagggtataactataagggtaagaaataaacggttttttactcattgctatgtgttggatagaccatacattcataactaaacactatggatttaactgctaatcccttttatccttgaggtttcagcaatactcatggttatgatattggtatttttatgattatccttgaaataactctatagccataaacaacaatgtgatgcattcttacgaaaccttaattaatttaaaatatttctctatattcatagactaacttatgtttaatggactaaaactattgatttgctttttcgctatatctatgattttactttctaccgtaacttcttcctatattcaggtttcttatggagcttatgctaaggcgcctctgtcccctagtggacccacagtcaacgatgataccctgacggttgaaaaagtaactgatggattggactttcctaccagtatggcgtttttgggtcctaacgatattctagtcactgagaaagctacaggtaaggtgatgcgagttgtaaatggttttgtgatgcctcaacctgtacttgatgtacctgtagcaactgcaatagaacgcggcttgttaggaattgccatttcaaaacaacctgatggaaaaacttatgttttcctatcttatactgaatcaggcaatggtgtagataaaagtgatgttgatgcgcttattgatccattaggaaatagactatatcgctatgaatttgttgatggtagattgataaatcctgtccttctatttgatttaactgctattccgcccaatggtaggggcgagcataatggcggtaaaattcgaattggtccagataacaatgtctactatatggtaggagaagtagggggtcatagaacccaggcccaaaatatatttgatgggcccgccccgaatggtcttggaggcgtacttcgaattactcaagagggtggcattgtggatcctggcgatccaatatttggtgcagggttgccacttaacgtctattatgccatgggtattcgaaatagttttggtatggattttgacccattgacagggaatttatgggataccgagaatggaccagtagcgggcgacgaaataaatcttgtttttcctggatttaatagtggttggtttcaagtccaaggctttgtagatgaggacatactagaacatgctaccacagaagcagatttggtatattttggaaaaagccaatatgccgatccaaagtttgtgtggacgctgcctgtcggtgtaacagcccttaaatttttaaattcatttaaacttggagatcaatttgcaaataatatgtttgtaggtgatatcaacaatggtttattatatagatttactttgaatgaggaacgtgattctatatttataaatgatacttatgttggtaatgtagaattattagaagataatgaaatagacgatcctaaagagaatcaacctttagtctttgggcaaggtttcgggggaataactgatattcaggtgggtccagatggttacttgtatatattaagctacactgggtcaatttatcgaatattgcccatagctgatagcattattccaagctcccctccaagctcccctccaagctcccctctgaactctactgctcgaaatggcactataacatctcagtccgttcctgcagttattctgggaatagatggtagtgattcctattcaccaaatccacttgaaattgatataggtcaaacagtaacatggtacaacggagatacagtatctcatacagtaacctccggacaggatggtaacttagatgaagggactttatttgattctgatgctataattccaaatcaatcctacagtttgaaatttattgaggctggtgaatttgattactattgcatttatcatccaactatggttggcgaagtattggtgaatcagcccggtactttttcacctgcgtcagaagattcctcagatgaagagtcagatgaagagtcagaagaaggaagttgaaaatatggatctcctttgatttctcacctgactctttctcattgaaataactaactatactttcagtcccatactcatttttataacatgtagagtatactcacctatgaaacaattgattcatgatcaaaaacaattactacccgactttcttttaagcctgtatttttataggaatgttgacatgtctaattcataatggggtaaattattgtgttaagtaataataatgcgttagcaaatatagctgtaaagaatctagaaatttctagaaagttttatgagaatattttgggattagagaaaatagactctgtcggagatgaagtagtagtgtataagtgtggtaacactaccgtaatagtatatcaatcacagtacgctggaactaataaagccactagcgccacttgggtagtaggtgaagatatagagatcctggtaaaggaacttaaatctaaaggcatacagtttgaacattataatatgcctaatacaacactaaaagatgatattcattttgatggtgatatgaaagttgcatggtttaaagatcccgatggtaatatcctaaatatcgttaacatgtgacctaatggctctaattatcaagcaaatatactccccttttttagttctcagtcataaagaattccatttataatacaatgaaagcaaaaggaaaacaatatgatatattacttattgttaaatagataataatcttgtggtactattatttcttaaagttaacattctgctattgcaatagacgattctaacacttcttttctgatccttgtgatgtgctaaataaaatcatcatgtcattcagtcacttactaagtgaatgacatggtaacgagttctttatctttggttgttgttttcaatatgttattacgaatatttttgtaaaccgacactcaatattgtgctatctagttatttgaattggtatttgagtttggggcaatgtcattgctgtcatcaacattggtgttgctatcatcagcattatcactggaagctgagctagtgtctgcctctgggtcataaattggtctaaaacagtctcttatttcgctttcagatgcatatcctttgtcgccttctgattgagctagacaactaacaaattcttcataattgtttgttcctgtttcatcatcttcaccattggattgggcaaatgtggcactacttgttataccagatgcagcaaataatgatgctatcgctatgaccatggtaacagttacttttttattaatattcattaaatttagattattaacatcctataaaagcgggggcttatctttctactcttacggatttatcccatatttttctatacaaatatttattttggaatttttatcatcaatagttggacaaaatatggctttatcaataattgcctgatatttgcatgtttagaaggtcaaaattcgtcagatgatatctattttgttgttgcgaaataagagtaggaataattccaatcttgttgtttggacaaacctcatttgttatacatgttgtctaatcaattctgcaatttgtatctgctattggatacaaacacccaaatctgccaaatcggaccggacggctgcacctgcataccatcgggatatacacaatcgcggagtgaaggagactcaaaagccacaatggcagaagtagccgtctgttggctccaaaagagcgggtcggcaggtcctcactcaaggacattgcttattgtaaagtcatggtgatcaaccagtttgatagaaattacaaaggtaaactttctagaacaagacccggaattttattcattaccttcagctttggtgttggtaccagatttcgactctgctttgccttcgcaatctagttatattagagaaataaggtcttacaggtagaatttgtaagaccttaatggaagtaattgactatggacgactgtaacaaaatatactttgaacgtattaaaaaagtttttgatatttaatttttgatgaaatattataatggattatcttttacccgaccttactttaggaagagtaataaaatgtgaggtcaagattggtccacacttggaatttaagacaaatgactaaaaaaatatgcaatgacctttctatatgtcattctatgtgacaaatttacaagttaatgtatgttatcaatacgaccggaaggttacagtcctgtctcctgtactcttctaacttaacaaatcgacaagtaggggtttcaaagccaaagatgttgaaggatcacgcaacacgccatctaaataaaaataaatagtttgccatatttagttgcaacttatttttcaggacaaatttcgtcaaatctttataaagatattcatacatacatagaatataattggttaattataggtagttttgtgtctcaagagacacacctttatttctttaaaaaaatgtttagacacctaatcagacaatgttaattcattgctaatagtatatacccatttagagttttaaacttagaggcctaaccgagggaggatgtctaacaattgagtatgttgattttaaggattttataatactattaatcatgatgctatttggtgaaaaacgaaccttagaatgtttaacttttaaaaattccgtgtctatttatataacctttttacaaatatagaatcatttgaattattatatacatatatctatttgatacaataatcgtaattttctttaaatacgacccatataatatttaaattaaaatgaagaaaattatcttcctgaattcagcaatcatatctgtgctttttataacttttggcatatcttttggaggatggatgttaaacaatgaagcctctgctcaaactaataatcaagaaaatagccaggtacttgctcaattgatcgaaaatttaacccaagcccaaaatactgtatctagtgataattcaacagtctcaaccactcaattaactgcaataataggggagctttctgatattctaggtaaaattacaacagataacaacggtcaatatttagatgaacacactcacttctttactcacaaagatcatacccataccgtgacccatactcatcctcatcattcagatcatcatagtcaccaccagagttggaccgaaaaacatcatatctttgatcccagtaattgtaaaccaggtagaatgtgttaaatatcctacctaccctattaccttaactttttttcactgttctgaaatatttattatttgaaggttttcgttatatttagtagtggtattggtatcttatctgataacttctacgctttgtgttccttagtctatcataaaaagatatttttgtttgttgatagttgagtctgatagataaattactgaatcctagttaaaggctttaacatttattgataaactttattgatcatcttctggatatgtggcgtgagataaaccctaatttctttctcaggttttaagcaagtctttacaataaataaactaaaaatgtgactaatatgaactaaacttggtcaataaattcgaccataatctataatattataataaatgactactataataggaattaaaacaaccgaaggagtagtacttgcgtccgataaacgagccagcaagggcttctttataggatctaaaatagtacaaaaaatttccaaaatagataatacactcgcaattgctattgcaggacaactatctgatgcggaacatttaatcaaagttaccgcagctgagagaaaattgatagaactacgaagaggatttccattaagtgtaaaggaatcctcgagactaatcgcaaatctagcctactcgggtatgaagaactaccaaccatattatgtagagttactagtggcaggagtagatgctagcggatcgcatgtaaatgttgccgatatgagtggtgcgattacaaatgaagattatgctgcatcaggttcgggagcacccatagcttatggagtgcttgaaagtctttaccgtcttgatattacaaacgacgaagcgaaggaaattgctaaaaaagccgtctcagcggcaatggagcgggatccaggttctggcaatggaattgatgttttagtcatacctaaattggtaacagccgatcaggttataatatgaggataggagaataacacaaaatgtctgaagataataattctataggttctccttatagttttggaaacaacagtagatatccatcctactatggacaaggtggtcggctggtattagtagataatgctttagaagcggtaaataagggttcaacaactattggattaaaaacaccggaatttgctttaatttcaagtcatataaagcctactttgccgttagtcgatccaaatgaaaaaatatttgtcattgataatcacattggagcaacgggagcaggatatatagcagatatagaacatctaatcgaagaaataaggttacaagcacagaaacatcacatttcatacgatagcgctatagatataagatccatcacaaaacatctaagtacttatttacacaattacactatttatgctgtaagacctcaagcggcctcaataatcattgctggagtagatgaaaatggcatacatttgtatcgggttgaccccagtggaacttatttaaagggaggtgggtttgcgataggttactcctccgatttggcattagatgtccttcacaaagggtatgacacaaatatgaacattgaacaggcattgaaattgtcaaatgaggcgatagaaaaagcaattggagaaaaaccggtggttgagtcggggatagttacgttaaaaggatttacaaaaataagcacgtaactctaacatgctgagataacaacttatcattaaacttatcatagtgtggtgtgacaacaataattcacaagcacaacaacttttttactattttattctaaatattatagttccatatatgcgcggaaaaatagattgatagattgatagattgatagattgatagattgatagattgatagatatcctgcatcttaccatatttttaattccctgtttaggtgaaatcatgatagaataagtttaacattctatcatttattccgattgtgcgaaaattttatatccgtataaataggggtgaattccttttctggtatggattcttcatgtaagttctcctgcagaacttttattatctcctcaattatcctgtttgagtaatacatagcttcaactttctcattatccgaaacggcatcggactctacaataacatattctgataaaatactaacattaatctgaaatattttattgttactgtatctatctaccactatccattgaagtctaaatcctgtttcctttgttatcaggccaaaccatcttaaattaccgaaccatttcccggttaaatgatccactatggcttccatgttaccctttacaggcatgtagatctggactaactgcttgtattttctaattttttttgatttaattatttctggctcttcatttaaaagattatcatccaatattggattcaagttataggcatttctttcaactaacttgtatcctgatgatgttttttcaattaggttcaagtccaaaagcctttttaaagcccttgacagactttgttggtgaatttcaagctttctctcgagagctttaaatgaatatgttgaccacatttctttacgcagcaataaaagaattttcttatcgttgttatgaacatcattgatagctatcgtaagcttatcattatctacgggatagcccgtattctgatttgaatatattgaaaagtaattatcatatatttttgaattagttgtctgatcttgaatcttctgatctatgtggagaagttccatagagccctgaatattattgcagttactagtttcacattgtggtaacaatagcgttgttatttgcaatttagattcaatccattacttagatgggtagataattttatgagagttgatgcagaaattttcccagacataagttttatttcattaatggataattctttcctcaattccatgcataacatattggttgatccgcttaaatacttatttcatagactatcatcatatttgttatatacctcattatagagtctgataaggttgattttatctatttatgatagtcaagataaatctatggattctattaatatataattggattttttatgagttgagtttacttatcttagttttttttatgattgttatttagctcaaatttttggattactttgtaatatgatttctttttatcttaacgtctgacgcttaaacaaccatgttgccacaggcattgcaatcacgattatacccgtacaccagacaaacgcaagccatcccgaatcacctattggtgtcccaactaaccaagaacgaattgcttctatcacatgtgtaagaggctgattttcagcaaagaatcttaacggacctggcatggtatcggtaggtacgaaagcactactcacaaaggtaagtggaaaaataacgataaaaccagtccactgggcagcttcgatactctttacgattaggcccataatggctgatatccaagagatagctaaagaaaaaaggatggctataccaaatatcgatatccaatcagtaacgctagccactggatgaaatcctaccagaaaactaaccccaatcacaattagacctgaaatcatgtttctgaccagatccgctccgacatgacctattagtaaagcagatcgtgatatgggaagggatcggaacctattaactatgcctctttgaagatcgatggctaaattcatagttgtatagttcgcaccaaaagcaagcatttggacaaagatacctgcaaccaaaaagttgacatagctcatatcacccgtatctatggcacctccaaatacgtaccgaaacaacaagaaaaacatgatgggaaatagagcgactgaaaagagttgatctaaattccttgtaatatgtttgatgcttcgctgtgccagtacaaaagaatcactgatcatccaatagaatcttgagcgattttctggtttgatattggttctaaaggatggtctggtcattgcttaaagacctctttttccctttcttctatatttgaatgctctgttgaatgaccagtaagaatgaggaaaacatcatctagagtaggaccatgaaaagatacattttctacctctatattttcttcctctagttgactaagaacctgtcttagttgatggactccacctgtagtgacgaaacttatggtacgcatcttgttatctgcgtgaaattttcctacctggataatttctttagctttttcaaaatagccggtattgataaaggttatctctaatcgttcggaacccacctgttgttttagttcgtctgaagtgccctcggctataattttgccaccgttaagaaccacgattctacttgccaaatgatcagcttcgtccatatcttgagtggttagaagtattgttgtaccactttcagctaactgtttaatagtgtcccacataattaaccgacttcttggatcgaggcctgtagtaggttcatctaaaaaaataatcggtggagacgcaatcaaactaacagcaaggtctaaacgacggcgcatgccacccgaataagtcttgaccgcccgattagctgcatccaccagatcaaataactcaagtaattcttctgtccgttgtttgatgtcttggcgacttaaacgatataaacgacctatcatttgcagattttcccttcctgttaggtattcatctaaagctgcatattgaccagtcaagccaattaaaccacgtactttgtctacttccttaaccacgtcaaaaccgctaatccgagcaatgcccttatcaggcaaaagtaatgtactcaaaatatgtattgttgttgtttttccagctccatttggtcccagtaaagcaagaatagtgccttttttaatattaaagtcaatcccgtctagcacagtcagatttttaaaggattttcttaatcctttgactgacacaatgttttcattcaaataaatactatcggttgagatgttaaaatttttttttgcattgtaattatcatctttaattgtagacatttattgatagcccttaattagcaaacgtgcaatcttttaagcacatattaaacctctttaaagatatcccgatcaaattccatatatgtataatagagaatcgatagggtgaattcgtaaagtgagatgaatccattgtactcacattatattgtgatgcaaatatcataatatgtttgttactacatgacaaatcgatcgaattatgaaagcgatccgaagtttcttgagtcattcgatctgttggtaatatcatcgtattaatcaaatctggaacaatcgaatatactttgtgattaacttccctcatttttataatacggaaaatatagtataaaaatgaataaggtacaaaaagtatagtgaaaactattggcaatggatcgtggtttggtttgtacttttattctcttgatccttttgtgcttactaatgagattggcagaatcactctagataaatagatgaatggattaaacaaagtacatcattcaatcacttgacttgtttttattcataagtttcatcatgccataatatttttcaatgtattgacatacagaaaaccttgacattgaagaagggcttttagtaattgtagatccaattgctgacctattgggtagaaaattttttttgattacgatagtattatttaatatctaattttgataatcataatactaatatgtagtaactaggtagataagaaagtagacaagaaatttatattagtaggtactaatattaaaaatggattttgataagaattttattgcaacaaaacataaaagaagaattattttttcgtttagttctactattttcttagtagcaggaatatttgtcttggctaccattgcttcttctgttacatacggacagttgggcgataataaaaccggtgtattcaatcatactcagaccgattcttcaggaaacataacctggctgaattcaggtaactggtcattgacgggaataaattcctcatctcccggctttactgccattatagatatggtcaaaccaaatggaagtgcaggacacgaacatgagataggtgatttcaaattagtaggatcaccagttattgaaaaccaaacgattcatcttaacggcacctcaactataaccatgagggatggtccagttacaaatgaaccaacaataattgctctctcacaggaaaaaattgacatttactttgaccctgagaatataaacaatcattttgagaatcagtctatctcaggaatagggaattgattacatcgaattttcaataattaaaaaaccatatttctacttttatcgatactacaaagatcataatactttctataatcacaatttttatgatgactggaatctatcttctgaatccttctcgctattgggatattatttacttttattaatgaagctgataattacgctagcattggtaatatgtatgttagtcgagttaaaatgaggtcaaggttctgttcttataaaactaacgactgttttatgagtataattgtctttgtatcaaataaataccgataagcttggcattttactagtgttcaaattaaggatatctgatttatatcacttgtaatttttttgtttttggcctaaatcagaagaataggaagtactactttttatggaaactcaataaatgttaataaaaaaattctcttaaattcttattatattctagatatacctttaagcagcaaatcatctgagtccaaccttggcagttactatatgattcatctagcgagggctggtcttcacttatccatcctgactctgaaatctttactaacgtaataccatctccaagacgttcaaagtccatcttaactgttaagcgattagattctaccgcactggcccattcaaaaacgattttctggtttttgattgtctgttttacgtatactgaaaaagcaccaggatagtcatgaaaatcccacataacctcttttccttcctcgagtggtccacttgcaccacctgtggtaaaatatttgcttagtttctttggattatagactgcgtcaaatacctcttctacaggcttttttatcttggcttgtacactaaattttaaatccacggttatacacctttataaggtttattagtggtatatgttatataaaggtaacatgtattctgagagtgagtatgattgtatacttaaggcacttggtcacactggtagacgtaaaattctcgatttaatcaagggtaaaccacacaccaccatggaattgtgtctaatcttaaaagaaatggaccgatgtacggtaatgcaacatttgaatgtcttagaaaaggctgatttgatcatagttaagcatattggaaaataccgatggaactacatcaatcttctacctatcaaagaattacatgcccgttggataaccaaattttccgtggatgcgatagacttgcttgcaaagttgaaacaagatatgggatgagatcgacgaatacggaaagtggaatatctgctcaagagatgttttggattattaacatgtcttcgttaaatgctaaacatacttttgaatagcaattatatttaatagagatatcggatcagatcaaaatggaacttctgatgagaaacagtatatttttctaattgttgctaaattaatttccatatcgaaaaatcttgctaaaatcatttagattaagagttaagtaaaaaataaaatcttactgtatgattattatgcatttgaaagaatctgcaagtcaaaagcccctatcaaattaggatgaatctgtgtatgaacaatcatcattatgtccattggggaaactttgtattctatcgcgttttcaagttgtataataccgctttcaagattagtaccgtaaaaagcagtcccattttgggataaggtgggtttgagttctttattaaatatatacgataatttttcagccatgccatttgcactttgataatttgccatatttacaatatgtttatttgtactcattttggtatctgaatccttcattgatgatgacatattcataatactcatattcatatcgctactgttattagaatcataactattactattcttaattgcagattgttggttcatgtttcccattttttccatatttatcatatcagtcatatcaaagtcaacaccataagcatcgccataatttcttagtacgttgtctaccccttcggcaaatctcattggatgaattgatccattgctgttatcgtttttttggctaaatatatttgatatgaacgttgtaacttgatttagaaggttagaatcttctgattgtttttgtgtttcagttatggctatgattttgtctacatttgtattgatactcgcaattaattgatttgattgttctattctttgtttttcaccttgaactgctaggggggtatctggaaatgacgccgtcagattgcgtaaattttctactgctgttttaagatcatctccaatttttttatcatgctttactatttctaccagcaagtcccagtaaaaaatactaacagcttcatctgcatgtttttgagctaaggtaatgttatgatttagaagatttgactggacaagattcgattctatctgaaattgatctaaggatgctacaaaggaagcataattattgggaggaaaattatggccgtacacatttgggaaaaaagtagaatcatgaataatatttgtattattgtgggtgattatgctaaataaaatacctaatattaatagaacatagtgatgggtatttttctgcttcacaatagtaaaattatgtttaattgttataataatacttcgcttaactgcaattgataatctatgattttatgacacatcgatatattgtttcataaatgctttaatgaatctctattaaactaatatgtcaaaagatgttaagatgagtttattttaacggtgatttaattagttactgttatcctacgataactcaaaggatactcataacaattattgtacaccaaaatacaatgtcgtttttcttataattcgatcttgtaatgaaatttctacaaaaaattaaatcagtttatttctaggttccacatcgtataattataaggaagcagagttatatgtgtagaaaggaaacatcatgccctaattgctttgtggacatagattttaactcgggacaactattgagtatcatatctaatttttgtaattcctcttgtgatcgatttgatatggtcccattttcataagatgtacgaaaattttctttatttccttccagtgcatacaaattgtttattatttcactggctttttgtttacattgttcttcaaaagcggatggagcaagcaatcctactactgctatagttatgatgattattggtatagataaaactatgatgatctttatactcttttccatagtatattggattagtccaatggtgttgtaataaagatatcattacgatctcatttattgagctgaatttggatctcacattccttctactttagtgagctactgattgtccttttcttttttattgctttcaatctaatattttgtctctcattgtcagatgtattgacttttctaatttcaattttatgaacatattagacttttttagacccgtagcaatatatcgtggtggtatattaatgaatataaggtgttgtttatcgctgtcactatgtataacacaatgagctcaagtattcttgcatgatgatacttaaaattagttatattattatggaaagatgtgagaattaagataaaaacgacgattaagtcgaatgtgtcgcgaattatgttttgccgatgtcaaaaatattatggattatcatagcatattgcataagcctggacagttaatgctgaatccgaatttgaactactggtaattgtggttgtaaatgtgctaaaagaatccgggattgcagagaaagaaattgcatttgcatcggtaatatcataaatggatccgcctcccaaggttaaatcattggagtaacatgctgcagtagaggaataaggattaccaccagttttgtggtcggtccatgagttatgtagatttttccagctaacgatgatgaatcagttgaggatgatgaatcagaaaccactacattatttgtagtagccgaggaaccatctatataagtaggactagtcgtaggattagtcgaacaactcatctcatctgtacctttaggaccagttggacaacctacccatcccatacttttagcattaccttgacctgcttgacctacacctcccgcattttccatgccttgattgccaaattgaaaattacccttttgtgctaacgaaaaatttatctgactgaaattggaagggacagagaattacaaaaattaatccacatattattatactaattaaactagccatgatttaaaaattagaggatagtaatagagattttattcattacagtttgtttattttgattctattacttcgtgataaaaattgctcttttgattgaatagaagtttatgtgtgattaatgacactatataagactcttaataatcgagtccaatagagatgatgtccatgaatattgttatcattgattcactcattttttaagagtatatcagttaaatgtaaatcatagtcatttatttttcaatccttgggcaactagtattgaataacatcccagtccacatttttcacatatcggcttcatcgctttactgtcagagcttccaatacaacaaggttgttttgactttcctttgtgatccaaagataagatcgcccatgaaggacagtccactggagtcgttttaatgcctccccagttacccttcattaattccagctgtttttctgtgttcataatgaaatcaggatatttacttcttaatctcaaaatattgttaattatatctgttcttatatcaccgaatggtagccagaggggatcattatctgcaaagggagtatgaaattgaaaccctattttatttatcgtacctttccattcattaatcagatcttcaatggtagtataattcagcgaatttatagtcattgtaatccaaatgtccttccatgctggttttccattgcgagcaggtcctttgatgtagtcaaaaatgttctttttggtttttgaatatgcaccttttcctcttatgctatcatgtacttgttctgtcccatcaagggatacccagtaaaagtaaagattgtcaaatctgactaaaggataagtaccgtttgttactacacatattcttctgggcatctcatcgcaaaaaacttttattatatcctgacgcatcattggctcgcctcctacgagtgtgactacgtaaacactgtgtttcttaaaggtctgttttattatttctctccagtccccaggactcaattcatctatttcatttcttctagttttccaccagtaacaatgggaacaatgtaaattacagacgttgataatatctgcagaaccatagatgaatggttttgagttaaaaaactttattgatatatatttgcttaggatactaaaaattgtgggggcatcttttattatatctgttatacccataccgtatacaagatctaccaacagttatcagagagaatatagattctaaagtatattaagaatacgtgaaatttagaaatattctttggtggggcttcactcatctggaaaaggttaaactttctaaatctctcttctattaataaagtccaatttaggtggaatgtcttttaaagatcattcggaccgtaagatcaaaatgacccctatttccataatcaagatctgtcaattcttccctttttttatttcgtagcagtatgaatagtttttagcagaatttcaaatctatgtgccggtgattgataacatatagtatttattaatatttcatattctaattatacaatttactttggagactatgaatttgaaataaattgttcaaaaatcataagaagctgggacctgctacgataccctttgtttctctcccggcaggtttatcatggtattcctctaaaacatttcccaaaccaatttggctcaaaaattctattcattgagtgatgtctataaaaatggaatttattttatacattcttgataatgctatatatgttatcagctgcagtaaacgaccctacgaccttcaaagatcactgcaatatggtgaataatgtaaatagttattgtatttgttactctattttcagatcaagctgtttgctattaaattaatggttcaattgaaggaatcatttttaatggatgttaaaatggtgattaacttgaactgaaaacgatattcatcataatatacttaagagacacggtgtgtatatagaaacatggtaatagaaaaaagttataataataatcaccttccccttatgtcattagattcccttcataaaaacactataatcaatcaagctaaaaaagaaaatgtggtcgtccttactacagaacaatcaagtgaaaatatagaaacatcttttcgtcaaagatactctctagaattaagaactaaaaaacaacaaataaataattttgaaagaggatttgttgaattagatgacgaaagaagaaatgttagacagcagatgatgcgaactccaggacgaagaggggagattataaaagaagaagaaatctccaaggaatttggcaggagattttgtgaaaatgaagggattgttgcaaactagagcccttcactatctcataatatcataatttttatatagttttatctagttatctccaaaaaattagtttttaccagtttgtagcattgcatttcatgttagggcggcttttccatatacctgtaacgacatcaatatgctctagccatggttatggcaaagatatgtggtataggtgtttatgaacagcctttaatctcacatccgctcagacagccgcgtttttctttgaagatgtgattcataccttgaataaatatgaatatgatgacggtttttccaacacattcaatggtaaaatgccactatgatatctattcataatcaggtcaaagtttcaggtaaatatacccaaaagtcaaacgaaaggaattggcgtatttaaactttaaacttatttttaatatattatcattagcagtgatcttcaaatcttgagatctattaagacatgatggttagataacaaaagaagtttatttggttctattgcaattaccttatacctagtttcgtctgattatatatgccatctagtaccctttttgctaatccttaatattgtatcatgtatatagtatattgtgagtaacatgaataaccttcaattgctaatgtgtaagaattgtacccattcaaagaatgagcatagacaacaacccagcggcccaagattttatgatcatcgctgtttattttgtaagtgccagcaatttacataaaattatttttttgtctcatttctattactcttatttaatgacatacgtccctggttatacttgaacatgagtatatttctctgataattcacacgctatccatcattattgccattttccttgcagttttctatactagaataaagattgtaactacattgtttactaaagtcactaggactaattgattatcaaaatgcaataaacctatcccagaccaagataccagtaaaacattgcttttaatatactgtttaaatactatggaaacagctttattcaatgtatataccaattataagcaacatcatctcaaaatataaattctgcgttagcgatctatccaattgaagtccgtccaattgaagtccgaaatcctaaaacgatattcaaataatcctatacttattcccaataagaataactggtgggaatcagaagctgtttttaactgtgccatattatatgatgggaaaaaaattcatatgctttatcgtgcgatcggagaatatgagcactacctttcaaggataggatatgcatccagtgatgatggttatctctttagtaggcgtgatggaatagcgtttgatccaacattggactatgaaaagtatggtatcgaagatcctcgattgtccgaaatcgacaatcaaatctatattacttatgtagtattacccgatcgtccaaaaaaaggtccaatggtgtcaaccgcattggcaactactaaagattattcaaaatttgagagactgggcatcattacaaatgaaggaatggataacaaagatgtggttctttttccaaccaaattgccgtctaaaaatacccctaataacgaaaagttgacctatttcagcctgcatagaccaagttcttggataggtgatgcatatggaatagataaacctagtatttggattggggaggggactacattgacaagttttgaaacccatactttgctcatgaaaccagaacagaaatgggaagaattaaagatcggtgctggttctccgcctattagaacaaaatatgggtggttagtaatataccatggtgtgagtgcggacagaacttatagtgctggtgctgcacttcttgatttagacgatccatataaaataatttgtagaagcaaagaacccattttagtacctaccacaaaatatgagaaatatggtgatgtaaacaatgtggtctttcccactggtgcttgcattatcaatggagaactttttgtttattatggtggtgcggacaaggtgtgttgcgttgcaacggccaaaataagcgatcttgtagattatatttttcaaaatagttagtctatcatatgtcgttaaatcaatccaatattgtaggacgaagaaactaattttgttgtaaaatagaatggaatagaaacaggtcggtaatttcgctgtctatcttttatatcttatttctttgttctataaaatgcattttagaatcttcaaatcattaccttttacctttactattaagtactgtggtatacagtgaaaacaaatctaaagtaatgttcttacttgttactctcaggttaaaaaaataatcgcttctataatatatgaatttggatctaaattggcctgggaatgattagttatacgtatctattgagcataacctagatgtcgattattatacaataatcatctattgaatttcttatgatgggctggcataaggtaatagattgtttttgattcccgtgttacccaaaacagcagtataaagtgcaaaatgctgcaacgcaacattatcccatgttaattccttattgaattcctcaattcttttataatactgagagtaatttgcttctagtttcttgattgctttagcaaattcattaggtcttctttttactactattcctaatcctttatttgcaaattctttgaagaaacctaaatcagttgctatgaatggtaatccgtgagcgagggcatcaaacattacccctgaaccagaggttactgtataggggaggatgattatatcacatgcataaaaaagaattgaaagttctttatctgttaagaagcctcgattcaaattaattattttactttgatgtgtatctttactttctaggcgggaatctcttttctggttatcatgaccatcaattgaagacggctttattgtattgaatgaattttttgattgattaattaccatgacccaatcatccggaatgtccaaattattcaatatgtcccaaccttttgtatgcgtcatgaatccaaagaatagacctattttacgatttagtggtaaggagtacgtgtttcttgcctcttttttctttaaaggcatattcaaatttggttcagctccatggtatatcactgtgaaatttttcgatatttttccgtcattactggtattttcatttttggatatttgattggctaaataatttgaaaaaacgatattagcttgactcatttgcattttttgcttgtttgctgcattaaaagattggtagtttatgaaacgtttccaataggctagtatttgcttgcttaggttaataggaaaagtaataatgtttttatccaaaagattagggtgtttggatagctccatccattgtcgtaggggatatgctgaatgaaatgtcgtaattatgggtattttacattctttataaaattcatctatattggtacttaagttacttggattgatagcatccatttttagtccatatagtccatgttctaattggatatgcacaagatcagggacgtactcatcaattacatctagtattattttcgaattattgccattttcaggatcaatacccatataatcaccttttcctttctcgttacataaaacagaaactttcatacctgatctttttaatccctcggtgagattctttgcataccttccaacgcctccgggaatagggggatattcggtggaaaccattagaatttttaatgaaaatttatctaatttatctaatttataagacatcattgtataggttatatatcacatccaagacatataagggaatataataacactataaattcatcgatatttacacattttttaccggtaattactatattttggttatcttaccaaaacaactggacacgttgctacttctgaaatccaccgtgaaatacttcctataccttttctatcatgtcttttcttcaatgatccactactacccattactatcatacttgaattctcttctttagatacggtaaggatctcatctgccggatggcctacccgaattactgacttggccacaacaccttcatgggttaatctatctacctcctttccaatcatcatctccgctccctccctaattgtcttttcaaaatagtgcctagttttgtcaagatcatccatattcgaaataaactttgtaatttctttaggatagaaacttgtatcatctataatatatagaataattatcgcagagctctgatttgatgcaagatctctagctttatttaaggcctttactgacagctcagtagcatcaaatggaaccaaaatgttagatttattgtcgttcattactattacatgattttttgaatatatagacatacacatcaccttttcgctaaatggttccatttttttggtatctatgattagggtataaaggcgttttgacgaccatccttgctaattttatttctttagacccgcctaattatttcccttcattacacggtttgactacaaactttattttcaaaattaagactatcgtttggattttggttcatcaatattttacttatgaggtcttcaatacgtaaaaaaatggtcctgccaccataaaagaacatatattagtaatttcgattcttattaacacgatagatattttaacttagattcaatacttgtaaattcaatattgcaaaaccttgaaaaatgatttaggagatttatcatagattttcttctttaattgtgaatttaataaattttaggaaatactgcctgtggacttgaaggcgataactttctaaaagttgttattaatgaaatatactaatgaattaaggattaaagttttgacccagcaaaaaacaaacttatattcaatagatgctttaagaaaacaatagaatgaagaaaattacttataacatcgagcgtcaataataaaatgccgaataaagataaacaagataaacaagataaacaagttaaaccatcagctaaaatagaaatattaaaaaaagcaaagaaaaaggtttctgacgtatcacaatgtgataatctatctatcgctgaaatagatgcacttcattatcattatagtaagttttctccattatttaaaaatgcgcctcatcctacattcgtggttttaaggatcttagaacgttatatccaaatagataatattgttattggagatgtaataaatgaaatcaaacaaagaggacttgatatctctcatactgatgcgcaaatagatgcattagtgaatgagttagcatccaataataaaaaatataaatcaaaatccaatgcttaagataagcatcatttgaatgtcatgaatttatgaaagatccacataatcctcaagaacataattattcaaatgccctttagagcacttgaatgttgagtttggattcttctcagattcatttctaaattctttcatgtcgtctgcatatactccactaaaaatagtgccacaagttttacattttaacataagcattggcatttttataccttcttcctcgacgttctctatacgttgaacttgttattatgcttgcagtccataaaaaaaaatcaattataaatcaaaatggtagtctgacaagattggcaaatatccacgaattaacttttaaacgtatattctaattttgaccttatttttaatgtagtttttcattcaccttgaaatttacacttttgtatttattgaagggaaaaatatgttaaagtcgattccaaagacaaaatatatttatgtccttcataggagaatgctagtgttcccaatacttgtatagattcaaattcttgatgatatcaatacgtagtatattcactcattgaggatcttttttcctgatgtgatctaaatgatgtatatgcttgtaattatgcatttaagcaaaagtaaatcttctagaaaaacatttgatactttaggttattattttcatctaaacgggctagagtagccaattatcgttacatgtatttatctatttctaacagagtaatgaactgactttgaattgaaataaacagcaaatatgtcatgaacttgaacttcaaagactattccacaggatggattaaaacgatagtaagcacatcccttgacgagggattctaatttatggtttaatcgagttatctaatatgtacgtgaaaatctccagctgccgttatgaaatgtctcaaggaatctaaccccttcggtattgtttcttatcctggtgttgccattcttagggttattaagctgatttctcttattaatgacttcaataagttttctcatatttatatatacatttcctcatataagaacgtataaaatattgatatcaaaccaaattttactttagaatagtaaatgggtttgacttttgaatcatgcttgtacttgcgtaaagtaaaattgtgctttttagggtgatatatttgcgtgctctaacctcggtaatatgcgaatcattgcatctatgaatgaattgggtctaccacatttcaagaaggagtgtaagaaagatcgttcacaataacctaagttttatatcaatcttgatcttctattgcaagttgctagaggcaaattattctatcaaattatagaataatattcgttatcatactttttgctaatgtcattaattctttgaataagatcacattttcatctgattgggtaaaattttgatttatgctcttcgatgaattaatgaaaaacagatccaattcatatttacgatttaaaatactatcgttttatttttattctttcatttattcaagaggccagaaaggtatggcattatcttctttggttaatttcaatcagtattattcttttgagtattttcattttgagtattttcattttggaagtacatgtggttattacctttagtacgctttggcacgttggcaattgtggcttcatcatcattcttgctatatgacatgtattactattgggcttcatcttatataaaattatattaggtctcagtttctaagaggaaatcactattctgaaagataatataataaacaatcttattcattcttttgaccgtatagcttttcacaaaattcaaatgtaaagatctggtttttttggccattggctcatttcctggtccatccatatattattgggtaataagctaaaattcacccgttggtaatattattatgaaagtccaacttatttccctgtaggaagaaaaaagagggttttttgtaataaagtctcgacgtaaatgcaattaatccccgtgaatccagtgaattcagaaatcattcaattattatatgatgatcgatatacatttaatttcacattctaatctcatagtttgattctataatattatctatacatccttgacatctgtttcaaccataacttatcacctttgtgggataaaaaaaacagcgagcattttgggaggatactatcatattctatcgggttaatcacctttatcaacagactgaaattactattgtctagtagtttttccaaccattaatatatttgtaaggcgaataattagtaatgagtgaagctagttttcaactattaatatgtaaaaattgtatccattcaaagaacgagcacagaaacgaacctaatggtccaaaattttatgaccataggtgtcttttatgtaaatgtcaacaatttacatgaccgttctttcaatacttttctgaagatagatattaaaaaatgccgttataatattaatacgaatatgggtaaggtcaaaaagatgtctactaaagaaattatatcagacaaattctttatgaaattttgacttgtttcctttctactttattattctgtctttaatctattcatttcctccagacaaattggttaacagagttatattcaggatcattaaataatacattctgttaatgattgtcactttttaagtaaagatatggccctgattgcaattaaagaaaaggatgaaatggttcaagtttcaacgtaaaataagtgatcctatgatagtatatatgagtcataaaaagttcctattaggcgaaatattaatcaaaatcaattagttataaatccattgcatgcttaatatgataaatgagaaatcaagagtgtgtgattaatagaaattgctgatatggaaactgagaccatttcaagagccactgtatttccagtatagaataatgttatgaacaatcttgcattatcatttttaaattaatgtctgtaatattagtaagatggatagtgttaaagtattggtattttggagtattgttttttgctttgggttaataactctatcatattatgaatacagcaatgtatacggttcattggcatcaaataattctacacaaaacaatttgaattatactatatactctaatgatcggttgggaatcagttttgaatatccttctgactggaacgttgaggagaaaatcaataggttttcaaaatattccgatgtccaagttcacaatggtagtagttccttcaaagttatgaaatctcaatcaagttctgatactgaaatggccgagaaaataggaggtttaaaggaagtagtaggaataattttacccccagaagaaagggtagtgggagcaatagaagaaaacatgtatgcaatagatggtacagataccgtgtcagtgctaacggcaatggagagtttgactaatgttcctgaccaaggtttggaaagaattctattgatacagaatgatgttttatatatccttacgtatcaaaataccgtggatcaatttgattcaaagcaaagtcaggaaacaattggacacatattggcttcctttagatttatagattcaagcaatgaggatggccgagggagtgataacgaagatggcgacgacaacgactaaaaaaatcccacaagccagaatgctgatatactttatagtattaacaaatatacctcaccaatttttttatcatcagatttgcaagatgagttgagtggagtattgatctctgatctctgaattatagttattcatcggatcaaaaatatttttaatgttgctgagtgcttatcaatttttgtgcaccgttctaaactgtctccataaaatagttcttctagtgttttcgttccattttagcatctattcactataggagcaaagagtctattgtaaaaaaatcatgtacttttctcatcatatgtctgaatactatataaatatctcctcttttctgttctcattaaataaatgattccaactactagtattatttcaaacgacttggcaataattcctccaagatcgacatcttcgggagttgaatttggtgaaagaggagggggaagaataactgaatataaatataaaaatattagaaccaaagaccctgctagtccaatccagtttaagattaaagactttttgtaatactcttttgatatatactttttgtccgttttcttgacagttagtttatcatcagagaaaattaataaaatatatgaaatcccatagaagagttgtccgcctgcagcagatattaggaaaatactatattcatatcttaaagtagcatgaccagaataaactgcgaggtgaactatagcagcacctaatgctaagaacaagactgaatatttaatgaattcatcattagatattggatttgttttgctttttcttctacttagaaacatccagcttaaaactgatccgattatcaagatcacaccaaaaactgaaccataaatcactgtagtgaaaatgaagccaaatgattcagttatggcgatattaaatacagctctttcacagttgcagtttgaattgtcacctaatattgtacgggaagggggagttgtattgataatttcctcactcgaattattcgaattaacatttagtatgctcaaaacaatttgataatttcctatctttggaaatacatagggaatttggaaatcgcctacttctagctctgtccaaggataagcagccaatcgctcattggtaagggttgaatatatttcaaccatcgctattacattgctcgtgtctctgccttgcttatcctgaatgctaaactggatgtgtgataattcattaggtttggtatattcgggctccatttgttgaagaaccatatacttatccccaattcctgtatccccattattatagtgagaagagtggctgaaatgcgcctctgcagaactaaatgagcatgagataagataagaaaaagataataataaagatattgaaatcaagaatttggtgatttgtctacaagaataaatatcatttattctatgatttttcaattatattcaattatacaaaatcgagctataaataccgttatcctatgtacgatctttagatctcttataagatcttaaaatttatcagtctgataactattttgctacaaaattatatgttaaaaagccgctaattacttaaatcggcaacaatttgtggtactttagccttgaattaaccacatatactgcatacttcaaagtgtttgttaaaattaaataagtaaacttattttcactgtctaaatataaagggcaaaatcttattaaaaattgtaaattgttatatttaatttagagtacagtcatttagccagagccatgtaaatgattcaaatttgtaaaattgtctataggtttggggttaattgcattattggaattataaccctccaatcctataccactaataagatctccaaacatttcattagaactcgaaaaatgacttttagttttgttaacatcaatcatcagacccaaaacctttttgcccataagatgaatggttattgacacctgtgtatatttagttccattatcagaatagatgcttgatattcctgtcacaattatgtcctttccggcaaaaataatatcatttgaagtaaaattattaattacgtgattatgggaaaggctaccatcggttttatcataataaaattggcaccaaaggctgcactcatattttgatttttcaaatttttattgctagaatctatgatctctagattccatagtccttcttgaatccaatttactatgccatttccatctgattgtttgcaaaatagccagatgccaatactaacattggctcattttgttcaggcgttctgaggctattgttgttatgacctaaatgaactgcttgtagaacatgtaacagactctgagttcatttgcgcacacgccattatcaaatacggtttctgctatatgaaatctaaaatcggaaatgacattccgatggtggtagcgaataaaaatattacaagcaataggatgatagacatcttatactttgatttggaaaaaatatattcactagtttatgtattaaataattacataaattattttcgtaaagggatcttatcttctatacaacatgtacaaatccatatttatttttatagatgttttactttggcttgaataaatttgtaaatccaataggggttgataacaaataatatactatacgtttcccttcattagttttggtctatattttcgaagtaacaagggttttgtacaactgttactaagaggccacgatatgcgactatgtgtcttgaaattaatcaagtcgagtcgacctaattcacaattattctgtatcattattctaatactaatgagtagaataatttttgttaataatattaacaaattattttaataaatgttcttgttaaataattaataattaatttgttaagatcaaaaaaaactaaaagcctttttttacaaactactttgatagcattgctctctttcatttttacttttacatttaccggatctgatccttcattagcagtcaattttggatttgctcaactttctactaataacagtataatccagatcattagcacctcaacttttatagatgactttggtaattttcatgttataggtgaagtaaataatacctcttccgacccccaaacaaacatcctaattacaacgattttatctgatacaacaaacaatgctataattggcaaccattctgctttctcatcaatcggaaccttaagatctggtgaactatctccttttgatatattaataccagatcctcaaattgtaggcaagtttaactttattgaattctccactagttctcaacctgctacaatagaaaaaccagcaaatcttgttttaaatggtagcagtgccttcttagacaatattggaaatcctcacatcactggtaatataattaaccaagggccatctccagaacagtttttgaatcttgttgcaacattttatgataattcaagtcttggtattgttggaactcaaagttttggcctaaatgttgctaatctgactcagaatcagatagccccatttgatattactatcacagacaataaaactaaatctcaagctgctttctattcacttaacgtagattcggtccagaattccatgggctttccccttaatcccaagttttcatttgaacctattgatggatttgtcgatagcggattatttctggattcaccattaaataatgatctcggatttacgaacaacgataatatcaacaatggtttaaacaaccctgggaatgattccgacaatgataatcaaaataataatgataatggtgataatcagcgcggagaagagaaaacagatgatagtgggaatccttattacaatgacgaaaactgtagtgagagcaccggttcttctggaggaaattcttctgaatgccaggatgcggaaaatgaagaacaaagtgagcaggaagacgaggattcttcagaaactgatcaaggcccaccatctaactccgattctgcaggaggtaacagtgatgaaggggatggcactagcaacgaaagcgatggcggagaaaacacaaatagtaatgaagagaatgacaatatcgataatagcaataacaactaaataattaccttcaaattaacaataaaccaacttttttttatgaaaactatctcatcatgataaaaaaagccgttgtatggattgtttcgtcaaccttaaccaagtaagtgaagataaggaataaaattaattaaacttatttcttcgttatctagttgttcacggatcaaacaaaattaatgcatttatttagtcgataaagataaaagcagaaattactttcatgaattagaggtgttttctaaaaaatggctttcatggttgaaaggcaatgataaattaattattgagatgttagaaaaacaatctgctaatttagtaattgcaacaacgtctctagttgatatcatacttgaaagcccggaaaaaaacattagtaaagggaagatatcgcaaatcaaggatctggaacacgaaggtgataatattactcataatttatttactactttgtcgcaaacttttgtaactcctttagatagggaggatattgccgggctcgctagtgcaatagatgaagtattggattatacggatggtatagcagataggtttttgctatttaatattcagagacctacttcttatatgatagatctttctaaaattcttcttgctgcaaccaaagaaatacatttcgttaccaaagcactatacaaaatgaagaatgcttttgaattgctgcctcattgtaataatatcaagaaatatgagcaacaagccgatagtttgtatagaagagcgattgctaccttatttgaaaccaacaccaatgcaattgaagtaataaaattaaaagaaatatacgagaattttgagtcttcattagataaatgtcaagatgtagctgatataatagaagatattgtccttaaatatggatagtatgtccgcatgttagttcattaaatatttagagtagtatatttcttggatagaaagatatagtctctttaataatttttatattcaaccatggaagacggtttgttatatattaccattggggcaatatctgccgcccttttgtttgatttcgtaaatggctttcatgattcagcaaatgcaattgcaacagtggttggaactagaactcttaaaccattacatgcggtgtttatagcatcaattacgaattttataggaccatttctttttggaactgctgtggccacaactgttgggaaggggataattcagccggaatttgctactaccgaagtaatattggctggcttaattggagctattatatggaatttaattacttggtattttggtttgccttcttctagtagccatgcattgattggaggtttaattggctctgcattaatctccggtgggatacaaactatagtatttgaaggaatagaaaaaactattatttttatgatcgtgtctcccgccttgggatttttcatggcatttatttttgcagtacttttggtgtattttctacatagaaaaaaaccacatttaatcaatatggtgtttggcaaactacagataggctcatcaatttttttttcgttaactcatggtgctaacgatggacaaaaaaccatgggagtaataacagcattgttgatatctggaggctttttgcagtctaatgaatttgttgttcctttctgggttatactaagtgcggcgatcgcgataggattaggtacctttttcggtggatggagaattgtaaaaacgatggcatttaagcttacagatttaaaaccctatcagggattctgtgcagaaactggaggcggagtaattcttgcagctatggcttggcttgggataccggtcagcacaacacatgctatttctggagcaataatgggagtgggagcaactcggaggctttccgcagtgcgatggggtgtaggcaggagaattgtttatgcatggataataactatacccgctagcgctgctattgctgccttaattcttgtagctattagcagcatttctggatatttgctttaaatattcatagcataaggaaaaaacgactcttttttgtttattgaaatgtaatgattgatttatcttttttaccatgtatattgaacgatattttaataattgattacttttcataatagcccagaatcactatttcattaaaatatgaaatagtattctctaaaactgaaattatagatagaatctgtcaactttgcaaactccaaatcatatactatccaaaagaggatgatatattattattattattattattattatttagtatcgtaaccttttattttttgccttctatatcatgactgcagttatgaacgaaaacatctctttttttagatgtgcagattgattttcataatggtctattattttcaagtataaaatgatggcatttgtatgttcgatatatacagtagtaacgcaattttactgacgtcaagtctttaacaaataggcgtatctttgagataaatgattataaaaaggtacaaagactattcatctgaactaatcgtcgctataaatttgaaagtgattttatgtatactgttattattaatcttttattctaaataaatttccagttttttacaaaatttcggtagcatgaatctaaatgaatctatatgatgaccacaggcaactatacttttattcccttgtaaacttataacttataatttaatagatcctttatgagtcaagtgaaaaaaatccctgacggatatcattctataactccatatttgatagtgaaaaatggatcagaagcgattgaatattataaaaagatattcggagccaaagaacacggacggatgatgactccagatgggaaaagaatagctcatgcagaaattgagattggtaattctaaattaatgttggcagatgaatttccggaaatgaattctctttcgcctaaaacaataggtggaagccctgtaggattatttctgtatgtagacgacgtagataaagtgttcagtcaagcagttgccgagggagcaaaggttttgatgagagttgaagatcagttctggggagatagatatggtagtatagaagatccatttggtcacagatggtccatatctactcatatcaaggatctaactgaagaggaactgaaaaaagcagcagaagaagctttcacaaaaatgcctgaaaataaaccaaactaatttcttctttgaacaattatgacaacattgtcataggttgtacagttcttaaaaagatattagttcacaataagcttcgctgataatatcatatttcttgatagtaactaaaattgatacttacactttcgttatccaataacctgttacaaatatttgtttagtttatttttgtgatctaatattccttatatttacaattctacatctctcaaaaaagccaggaatgaattggaaactgatttgaacattgcatttttttgataccagtggcaatagaatattaccaatctgcttgaattcatgtttattctaaaagatataatctattatcaagaaatgaattatatgattactttcttcctattcatataatatgaatacttggcgcgtacattttctacttctcttatttagcattatttttattgttaggatgttaaaatatatctgatgaatatgatccgtgagcaaaaaaatatttcacaacaatcaacggataaagagaatcgatccgatcgagatatccttttcaaatactttctaaaatgtgactgttgttcatggaatgcatccttttatgaagtgtctggaaatattcatctagatattatgacattacgttgcccgacatgttttaaaaaggaagtaagatggaagaaagttccattttgaacaattatgaatagatccatgcatatcggcaaaagaagtttcaatcaattttactttcaagtctattataccatctttgaataattgagagaaaagtaatattacagaaagttctacagatcaaaattacatgtatgtatacattccatgttgtgatagcaatacttaacatggggcatgcagtatgtacattgtgaatgcaaaaggaagaaaaggtgacagaaattccatggttacatgtagtttatgtcatggcggattaagtatatcgacagacgcagatctaaaaatgcatgatgaaatatggcatcagaaaaactcaattagttattttattaggaataaaaaaccaattaactagaataattctattcttatagttagaagaaacctaattattaatcataaatttattaagattactggtaatgatatctatcagatagaaggagtgtacaaatttatttttttataatttagtttttatcttgtactggtattaaattcatacggtatgagatgatgtcctcattcatttaaattgttgtaaattgtaaatagtaggcattaattttttgttgatacatatttatcatattatttattttcgctaaaaatcatggggtattaccatgtacctgagtcaggtgtttatttagttctttctcatttttagcaacatagttacacattatgcaagtccttttatctttacgtccttgcaggtaatctgcgaggtgcattaataatattgttattccccacatatactatagtatttatgatactatttaatcctcattttttaagttaatattttactttttctatctgattattcgatttatgttcagccatattgttacatacgtaatttcttttggttctaatagtatagtaaacttacaatgagccctgtggcttctaatccataaagttcaagggaattattatagtactttataattagaaagcttattgttgtattcattactattggcaaggggaatcctgctcacgagtaggcgcatactatagaaaagaggtataatctgtgttatttttataaatgaaatcatggttgagaatttatccagttcaataagggatttattaaataatggtaaaatgaacgaggtggttaaaatgatgttatcagtaagtcaaacaactattttgtaagcaacttgttgatttgaatctatgatcattctataaatactattataataaaataattttaccgaacatctctagtatctattgattactagtttctgcatagaaatgaggcacgggttgttttccacgagcaatcgcctcatttctaatatctgaatggttattgtcaattagatccccgctttttagaccctttatagcaggttctgttattctagtattggcaataatccgagctttgtattttggattaactagattatttatgacattttaactatatttattagatttaatatttgatgttaaatatatggaatatcgagcagacaaggtaactcagagttagatcatattttgaaaatatgataactttaattagtattttttctctctatattaacatcacaataatctatcttagttgaaatcttattaacatctatgatgcattattaccatgcctataattagtgtgcaaatgtacagcggaagaactcaaagagaaaaagatagattggcagaagccattacggaggacgtagttaaaatattaaatgttagcagggaagaagttataatactatttacagaagccactcatggaaattggtattcttcgggtgtacgtctataaagaacaactaaaattttttggcttattacatctcgcactacaaattataccttttcataatattagagataatattcttggtaatcggtctaatcatctattattatcatgatagtagacgaaccgcttttattagtagtagataataaaaatgattcatatgaaattgagggctctatagtattcgatacctattctaacatagaaacaacattaatacttatgcatatttgagaaagcttggtatcaaacgagaaaatatttacaacaaaaaatttagactataaatttgatgaatctaaaaatgagctaaagattgagaggtaataagaagaaacagatagaaataaatgggtagtaacaatttaaatcgtctatactattttattgagaaatgaaagtgttaactcaattttatcaaattgtttagttgctacttaaattccttggttcggaagtctgacttgactattatttgatcattcttttaactcatcatcttgagtttctaaaatactctttgtatcatcgtctgagcctgtctctacaacaggatcttgttgattttccaaagatgtggatgattgttcaatctttgataattttttcttatttaatctttttgtagattctattgtttcatctatcttctgttgctcaggcatatcttcatagcattcaatgagaatataaaacctttgttacaaaattattgaccccaaatcttaagtaataaattattgtattaatactactaccccaatcaacggcatacaattaattggcgtttacagaagtcttgacgtcataaaatgtaatatctgttatatcaaaaatttttttattttttatattgctacagattgtacattatttgaatatcaacttcaagacatctctagttttcatttaaattgccaatggtgattctgcaattgtatattgtcatatttataatatgtttaataaataatattatgagttcaactattgattggaaggatgttataaaaaaagaggcaagaggattaaatgatgctgattttggcgaagttcaagaagtttctaatggtatggttttaactcaaaagggtatagtaaacaaggtactttttagtattccgcaaagtgtagtggaaagttatgatggagaggttcttagatttaggttatcggagattgaggcagtcgacaaatatcagaaacttttcgaaccaaaatctgtagaaattgaaacaagttctgacactgaaattgaccgtgtttctactaatactgattcaaggaaaattaatgcagtagtcgatgaggcaatagatgatacaattaaggatgtcctcattgaaccaactaaagaagaagaattggaaatagaaaagaaagtagaaaaggaagttgctgtattgaatgaagaatcgggtataaaaaatgagaacataaactcggtctctgctcgtgaaacaactcagtctgaaaatactgtgaatcctccatcgaggcaggataaaaaacgttcaaaatttttaacaaaagaagatgaagaaacaccactaaaaaaagaggaggcaggaatctcttaaaatttttatcatcatcctttgtttcaaaaataaaaaaattctagattgatcattagagattatctgagtttaccaaataatggaaaaccccaattaaatacttccttatagaattgctgctatatcttaatggaatatataattattctaaatttctagatttttattacgatataacaatgtttttttatcttgtccttaaaaaaggtaaacttcaaggagattctagtttttgttttactgtttgtgctgcttgttcaataccttgtcttagcttgtcttcagcttggcttccagtcaaaaagtttactatttttccagtttttggtaattgatagtttataacgtgtctaactaaggtagctttatcgccattactttgaaattcttgtatgctttcccaagactgaaatggaccttctgtttgccttgtaactaacctgttattttgatctttttctgtaacttcaatagtcatctcttcttttttgcccatgtattgtccctccactttcatttctacaccctcttcattactttgaccagaaattctttctgactcttttatgatatcgctaggccatgactgttttatattatctggatttgtgtaatactcaaaaacttcgcctataggtgcattgattatgatttcagcttgaattttcgtcatacaattcactagataaaaaactatatctattatatggatttgttggcattgtaataattacaatcatcagaattatcttataagattcttggcattttacatccatttcactaaaaaaatttttagcatgttattttaataagggcttaaggaccatattagccgagtatataggttctattgtattgcattattgattatttcaaaaaataaatatttagatttcatttatttgatgtgaatcgaataaaataatgaacctttctcagctacatgctttttatattttcttcgattactcgtctaatctatctttttcctgagcagtaagatcttggttgtattattctagatatgctttaagataagtgactatccgaatttacctatataataatagtagattctcttggtagagaataaaagtagctttggcttagaacgtagaaactacatcgcgattcaatgatatttagatactatcaaatctgaaaatctagatcaaaaataaataagattttctccatacaataattgcactcagactcatagaataggcgtatcacaatctttgaaagcgtatctattcgcagactcaagaaaagataggaaagtactagaggctacaatcatgtgataagtatcttattaatataagaacggtccatattggtcttcatttgccacacgactaccatgatcaatgatgatgatttgactgatactgtacttcagtttgatataaaagcatgagaaagttccctaagtgagcttctaattgatacctttggtactttcctttcttcaaatccttaatggtctaaatatattgtgattctcaagcctctaacatgacaggaataattaacattacgactctagtttgtagtaagagatctagatgggtatttaacatctgcccgtccctaaagcatatatcgagatagacgtagatgaggaagtatattctttatatactctaagtaggatcatattacgaattcaataagtcgtctaaaatataactaataacgaaaagtcaatatatattcaaaagtcatgatttttttaattttttgggaatttaacgtctactgctagctttttataaataataatttttatattctatgctaaaataatacacatatataataattatgtaaggatatatcaatgtgttattaaccattattcaagaaaattatattttttaattattaagatatattaaaggtaaaaataaaagtaagacaatgttaaaaaagcaatttttgataatcagttctattctattggcttcattttcaattttttctgttatagatgtgtttgctcagaatcagagtatgaattttgtgtattatactaattggggttcagcaggtgaagaagatgggcaatttggtggacagaatgatgttgactattttaatggaaaggtttatgttccagattatgagaaccatagaattcaaatatttgatccggaaggtaattttatagccaaatttggtgaaggaggtgaaggcgatggacaattccataaggcatcagctttatcgatggattctgaaggtaacatttatgttgcagatcaatttaactacagaatccaaaagttcgataataatggtacattcctaactaaatggggctctgaaggtgctggtgacggtcaatttctgcatccacatgttcctgcaaatgatgccgaaggtaagttgtttgtaaccgacagagatcatccaagtgtccaagtattttcaacggatggtgactttctttatagatggggctctgaaggtgaaggcaatagtcaactctcaaatcctgaaagttctatagtggattctcaggggaatgtgtatatagcagattatggaaatgacaggatacaaaagtttagtaacgatggtacatacctttctcaatggggtaccaagggaactggtgacggtcaatttcaaggaccttctggtctctcagtagatagtaacgacaatatctatgttactgataaaaataacaacagggtagaagtatttacaagcgatggtcaatatattacacaatttggtggcgcaggtgctggtgaggggcaattacttgatccagaaggtgttggtgtcgacaaagaatccggtgatgtatatgtagctgatacaggcaattcccgtatagtcgtattcaaacccactgcatagttctaatatttatattttttataaaaattctaaatagtaacattggctacctacaatatcagattaaaaggtgtttggtaaatgaaaaaccatttgctttatacttgcttgttaattataactttgagctttgccaatgtggttggaactacggtaacagctcataactttagtacagacgacaattctaccttccttactcttataaatatgatattaatcgaaaatcgactcataaacaatagctttatcgatagttcatctgatacatcgttgcatactaactatgttaagaatattaacgagataattgatgatattcttgtaagcgaagactctttgcttattgatagtgatcagttctataacaataccataattgcaacaatgatggctaatctgggagatgaagttttgagaaaatatggctatgcctttggcattccttcaaacattatgctttacatgaatttttcagccgtagataatttagaaaaaaacgttatcaaagatttgaattcagaggaccgttctagtcatgatcccttcgatatagataatgcgggcaattattcggctaatcttaaagataagtcccagtattatgatgcactggaaacatccaaaaggatgatagaaatttacgaaaatgacttggaatccgcagacacatccatgcaagttaatagctctttatcccttttaaaaaagtcattaaatgatctttatgaaaacatatacaattataataacccttcaaagattatggaaattgttcatggcaaagtacatccgaatttgcaattagcattcaatctcacattgaaacgataaaagcccgatagattgtttgacaagaccgaaaatatatatttccaaagataggtgatccccaaaacaacatgtgtgtacttttactctattgattttaaaaatatatcgtgtaactagttaatgctaatcaaacaagctacttatataatcatgaccgtgatgcagaagttgagtcaatatcaagaatatttaggaattatcaaataatggggctttccttgcaatttctaacatatccttgcaatttctaacatttccttgcaatttctaacatatccttgttaacatcaaatcctacatattgcaagtccaaatctaaaagatatggatgcgatttcaaaaaatttaatgttgatcctatctgtatattattattgatattatgaaaagtcgtcaatcgataatcaaaataagtatcttaatttcttttactttatcaatcgttatatcccttgttattacctataaaaacacaatacaaactaatagtaattgtagtattgattgcaatagtaatattggcttgtcctctattattaatccaatgaatttgacaaaacaactaatcagcagtacggttgaccctaaatatgatactcaactggtctctcttggtaaatctgtacaaatgcctgaaatccatggttaccatgatattatttcaactcagatcagtaagatgtatggtaacaaattgcttttagccattagtttagatgatgatccgaataaaaataaaaaatacgaaacaacatatctttggctaataagtcacattgatccattgaatcacagaaaccagatatacaccataattattcctaactttggcagtgattctaattttcaagctgaaggctggtacttagccatatacgataacgtcaacaccaaatatatcttaccgctatcaaagctaggtaaaatgaccaataatagagtcgaaatagccatcgatcctatatttattggaaataacctcgatttcaactacacaacagcaattatgattagagtaaacgatactttccttgttaaaccaccagattttctggtagactcatctccaaacgataatgatttttggtctaaatggtttctttgaaatatggtcctcctctcacttagtatactccatatcacttttgaagttgaataagctggattggcgatattatctcgataaagaaacaaacatatctacaatataaagaatttaatagtattagaagaataataaaatgaataaggatagaattcattagttacataattttaatattgattacgcactatcatatgttttttaaatggttttgttctacaaaaacatgggaataggattgacgttttaatcactaattttaccagtctttaggtgataaacaatattaaagtgcttgaattcaaacccttaatcaagaaattgtagatagggaataaaaaattcatgaataaattattaagctactattacgtcctttataacaatggtggaacttgtatgcgagacatgttattataaaggagataaaactgaatttgaggcgagtagtgaatactgtaaagaatgtcttagtgatcacgcgatgtgtccaaaatgtggtgtcccttaccattcggctactatcaccgattaaaataagactatgccgccaagaattatttgaattccatacaattaactggccctgtcggcttcaagacgatattggtaggcaaggaaggttgcagtaggggaactagcaactatgaatgaataaaggacttaagggtaaataattagcgaaaaactcttcctcattcccataaccatattttcgaccaattagttccattgttacctgaccatgtaatgtaaagacctatttgattatctaattttgaaaatattccaacaggctcggtagaatcaaagattattgctcctttatacatgaaattaccttcaccgtcagcgaatccagtgtctgttgatgtaaaagttataaattgtccatcctctgaaaatataataccttcaccttcacttagatatcctttagctgaatatgttaagacgtaagttccctgatcagtaacattaccaattccttgcataaaccctttgtgtgtatacgaatccttggttatcggaggattagaactgagtacttcagatccgatattattagaacttgttaattcataaaatggcttaccaaagatcgaggcaaatgcagctatttcttcagaatgattgaaataagatggagtaagattggtcaaattatttgatatgtttgaaacattttgaatttgattagtggaatttgctatttgtgttgaggtcattgttaggattaatattgtcaaaaatccaagtaagataaatattttcatattgcacttgtgtaatagtaagtaagtataatgacctattatcttatgactattaaactaaacagatattattgatcaaagttagtcggaatatgatttagagctgtaatcaagtagtatgttatagcaacccctcggtaggcttcgaaaccattaggtatgaaatctattattttatttatctatttgttgattacaagtgtactatatactatatgttaacagtcatagaataatttaagaactcaattttttcgttattcagattcatattcatagatcaaacttattgaaaaaccgagggtcctaaagtaaataatgatatacaggaaaaaactaaatatatttttctattccaatctcccaataatatgatattaataagaataccataataagttgtaaaaaccatgaagttatctatctcaaaagtgttttgataataatgtctataataataagctgattcaaatcacaagtggatttgagaaaagtaataataaataaaatagtaatagtacattaatggacaacactaaatagaaaataaaaatgttctagttatagaagtgaatcggacattcactaacaaaaatactaattcaatttatctgaaagtggctattaccgagccgatattactagcatgcatagacggagcatcattatctgaaattcatcaaagtgtacataagacaataccgactactgaacgtattgtaagaaattatctattctatctgataaacagttttttagtatcctataaggggatcatgaaaatgtattttatcacaccaaggggcttagatatgttagaaataatttattttcaacgagaaagagaaattgcacattatgccgatcttaccattaagatagagtaactaatagcattacaatcaattagttgggatcgatttgattttcaccttctttgtatttgtatattaattgaatctgtgtaatttttaataattatacaaagtttggaaatcaagttttatgggaaggctaatttactttccaaaatatgctttgacatttggttggtaaagatagtaaatgacaattccattaataattattagaaatagtgaaccaacatgtccaacaacgatggagcctatacccactataatcgctatgccggacaatatcaaggtaatgatccatgcccagcttgacccattccacaatccatatgcaacagcaaaataagctagtccaattataaagagagctcccgcaagaattatgcccagtatgggtattaaagctaaaaccgtcaatccgcttaacaaggatcctatgcccccaatagcagcaagtatcgcaattattgtaacaccgaaaggtctgtatttttgcattcattatgattaatgaccattaccttttaaacttgaacttgaaatttggtttggcttggtttggtttggttagtgtaggataggataggataggattatggatttatcacatgtaaagaagttgaataatttttctaatatctatcacagttaaatagtaaattaggctgtatctatgagcaacgaagattaaaagaacgaggcaaagatttgcttatactctcctaatccatgagaaattgagttactaatacagatgatattaattggatgaaaagccgcttaagtccgatgtcattccatactggtgatgagcatttaagatacaagagactaaatccaaaaggttatctaaaaattacataaaagtaccgatttcggatattcaatgtttcatagtatgggatcaaaagaaatagatgactggcattattttaaactccaaagaggtcataatacaataattaggaaataagaggaactatctggattattgctaaatatctaaatgatgattagtaggtatatttatcatatttgcgagatgttaagctacgactgtgcctgatgtattagtaatagatgtactacaagtctaattttatctataatttgacttaaatttattagagtttgtagtattgctgggaattatctactccttttttgtttgttagaagaaaatgtagttatgttacttttggaataatccttagataaaccaaattactttaataccgaatgttaaatactattctatattatgtttataaatgcgaaattcaagtattaaatcagaactgcttaaaaaatattttcgtacgttatccataagattggttctaataattattgtttcaggattattaggaatttcgtcttttgatttgacctataataatataaccgcacagactcttcaagaaaaatgtcttccagatatgggaacaaacgtatcaaagtctaactgtttctcaaacactcctactgaaccaacatataatgttacgaatactgacaatgctagaccaccatctgaaagtacgactacctattctaataatacaaatacaaatacaaatacatctgctagataatctaaacactcacagctccggtacaaataccgttgcgacagcataggagtcaacattcttattatatagctcaaagcagttgtagacctcaattgcgttttttttgcagcggagggtccacttttttagatatcgtaatattgccttcatgaatttctattatgcaattatataaaattttaagaaaaaatagaaacggttatagaattaaagtctttagatcagtcttaacttgtaaagtgaggcatttttacagtttctggattgatactaatgccatatattaaagatgagttaccaaaatgataatcaacgctttcaggatttatcgttatcataaataccctatcgttatttgatttttgaatagtggtaggaacgtcaacagcaggaccctctctcaaacttatgcttcagtagatagcatgactaacatttggtaaagtgtcaatagttgagaatggaagagccgaaaaaaagtgtaaagctaatctactctttcgctaattatcattctttcgcaatgctcatctgtccatacccctactccatccagcttaccttgccattccgcttctatcttatcggcgcacgatttagtaagggcattaaaatatgcctcggtaatcgcgttagtgccatttataccttgaatgacttgtgtgcgattaacttcagttaaggctgccatagcgttttcgcgcaggtcgtttacgtattcttgctggactacaatatcttgctttgtcccgggctgaccatgtccacccacgaaaacgtcaaattccaaagccagtatctggtcaatagagtttattaaggtagggacgtcgggagtaacgcctaggtgtttccacaggaggccgccaggtacaacattgtctactgccatcagaaccttatgttcagggagataaacaaagatgttaccgagttgatggtatggaccaggataaatgagctggaggctttggttgcctattgttaagttcatctccttattgaaattcatgttcggcacaggtctatccgtgtcatttctttcattcagaattttggcagtttcattgtgagcgattattgtgacattttcaaatagatttgcagctcctatgtggtctttgtgggcatggctgtatatcagatgggtaataggcttatctgtgacattcgacaccgctgcaaatatcttgtcacctatccctggcggcgcgtcgactacaacgactccttcctgagttaccaagaacatggagttggatccacctgcagataccacgtatacactcggcttgatttctagcagctcatagtctgcaacctgcgagtatacaaggtttgagaaaaggctataaaagaggataaaagcgaaggctattaaagaataccgaattatatttgtgttcataaagaatatttgccaccgttactaataagcatgttgttggactccatggtgtcatctcgaccttgttctgctatatataaattcatagaatcgtttagttatctaggattctgttttaaagtacagatttcataccaacgagccggctttctcaatgataaaaaaacctatcttcattttggtatcgagaattgtacatcctaatgaatagtctaagaaaagaagagggcataattaaatcagtaacaagatttatgacctatcaacaacctggaaataaatctaataatatttttttaaatgattgtctgtcttatttcttcgatatggcagtttttaatggttatatctattggaggaatgttatacctcttcatcctcctcctcatcctcctatctaatctattatatgatttcgaattatttgaatccatgtaaataacgggtccggttaacaagctcgcaaagctcttttgctatatggttaaaaacaatggtgtttaaggtttgtttatgaaacattatatcattttttcattactggcacttttgactggtgcctccattgttgctgcaccaactcaaaatgcttactcacaagaaactactggcctgtccgcaatgaccctagtaaactttggtaacggaaattctactgttacttcgaatccccaaccaacagaaaacaagacggtcacgtattttggaggaaatactactggctatctggtttatccgaatcaaaatcaaagcggcgaaaaagcaaaacttccagctgtaattctgattcatgaaaacaagggattaaatgactatatcaaagaatcagccgatcttcttgccaaaaacggatatgtggtattagcagtcgacctttttaacggggaagtcgtcaccaacaaccaagaacgatcaggggagttgactggagcaataagggaaaatccagaccttgcgatacaaaacatgaaagcggctgtaaactatttaaaatcccttgacaatgttaatccatcaaagatagcatccctgggttggtgctttggaggtcaacaatcattgcaactggccattaacagcaaggaagatcctctagcagccactattatctactatggcagactaaccaatgatacacaggcgatttcaaatattacatcgccagttctaggaatatttggaggcaaggaccagtcaatttccgttgactctgtcatgcagttccaaaaggccttaaatgacactggaataataaatgagatttatgtttatccaaatgtgggtcatgcttttgcaaatccatctaacgacaattacacccccacagaaacagcggacgcatggaaaaagactttggactttctaaaaagaaacctgtaatcttgatgataaatagacatacgtgtatttttacggaataaatccaaaacattccatatttttgtttgatcaaaatcctggttaatcttaaacagccaaaggcatgtagtttccaagttcaccgaaaaaagcgtgtagaagaacaaagaacaatcttactaatagaatccttgcaattcacttagaaccaaaatatcctattgaaatattgtaatatgctctaattcaatagtgaatgtgtggtaatattgttatgctcatcaattgtaaagcaaattaatttgctatccttaactactttgctagataatatatgtatcatgtccgttccagataaaaattataccgacccaactaataccggagaagactctaaactatctcgagtaggtgataaaactaatactccagccataaatgaagctaccaatagagaaattgttgccaagatggccaatttattagaaggattacaatttcctgctacaaaagaggatataaaagattatttgaataccaaatcacccgcaatgggtaatcgaattaacgatgttattgaaaaggtacaaaacaatctagaagaagacggaacaaaataccaagatgtctacgatatagcaagagctacaggattagttaagcagaatatgtaggttctaaagcaacactaacataatctgggttagaatttattgacttagtatttaatcctatcaaataatatacatatacaaataaatcaagtctaagcccgactctttttttagatcaaacgtcattgtgggcttcaggtgatatcagtcctttaggctgagttctgttccatttagaaacttctaaattactatatccaatcttcaaaaaaagggaagatcgatctttaagtattattaacgaaaatatgaatatgaatatgaatatgaatatgaatatgaatatgaatatgaatactgaaagtccgaaaatcaattctggtaggtcaaatacatttattgtaatcattttacaaaggtatcaatggtaaaagtctctgtttttattggtactagtctagacggattcattgcaagagaagatggagatataggttggttggatgctgctaacatgaaagtaactcctggagaggattttggattcagtagtttcttagaatctgtagacctaataatcatgggaaggaaaacttttgagcaggtcataacctttgacaaatggccatataaagacactaaaataattgttttgacctcaaagaatatagaagtccctgagaaattaaagaaaactgtaacaatatctaacaccccatcgccggaacaattgattagagaattgtttgatcaatctgtcaatcacatatatgtagatggcggtatagtgattcaagattttttatcagcagggttggttgatgaaattaccgttactattgtaccaatacttataggaaaaggaaagtcatttagtagattgttaccaaaagatgtaattttgcatcatctaaaaacaacaatttatgattttggttttgttcaaaataaatataagatcaataaacaagaacaatgaataaacttgataaagataatatttgaaataattgctattacttttctgtttgagttattcggtatatacttccatcaaaataagttaatatatataaatttccatccggacctgtttcaatatccgtaattcttccatcaaaccctttagcaaatataatcttctctaattcatctttattgtctactactaaatcttctagtcctctttcatttccctgatcaagaacactattatttatatcaattccggacctatttgaatctattttaaagaaatacaagttcccattattaatgtctcctacgaacatattattttccagatcatcacctaacaatgaagaatctaaaaattcaatgtctgtaaccccaacaggcaccctccagctaaattctggatctgaatagtgagagccattcaaaacaacaagatcagaaactgaagtgttattatttctttgaataggtcccattattttagaccatccactgttaaaacccggttggactaggttaatctcatcatagttatcctccccattttcagtattccatagtatcccagtcagcggatcaatgtccaatccgaaactgtttctaattccatatgcgtaataatattctgtcaaattaattttagtattgttaggattgtatggatagaacggattatgagatggtataagcgattcagtagatggatccaccctaataataacagaggaattattaggtatagaaatggattgattttttccttgtggataattttgtagtatattatttatggtcgtgaggtctcctattactgcatataaaatacctgatttatccatatgtattttcccaccgttgtgaaaaggccccggttctgcaggcatgtccattataagccttggatttaagaaagtacctatcccatcccaggtatattcataaaccctgtttcgggtagtatggttcaaatccttttgctgtactccaatactattgttatactccgatttgtatattttctcggtaaaatataagtaaatcacatagttggaattatgacctattggctcatgaaaagaggctgatgcgtctttgctgaagatggaatgggaggttgaactaaaatttaaataacctactggggtttcttttttggattcgtatttgcttgaggaagtaattcccaacaaaccctgttccttttcatttgaaatgttgtttatcctataaataggatcttcttgcagcgtgccattagatataatgcgaacattcccttgatccttttccgataccaatagagtattattgtctacaaagatcatgctagtgggaaacgacaaaccctctacatagagatccacgttgactctatccttgtaatttggactaatttctatttgtttctggttttgtagtggatttaaataactttcaataaatagtgaaaaatcaaaatcaaaatcaaagtatttgaatacaacgactgttatgacaattaaagcaattaagaatataacaagtctcttcatccaaataccgtactaaatatggatatcttatgtatttattttattttattaagatttcttcattatttttttcctttgctgcagagagtaatcactattactattgaagggataaaaaatgaataatgatatgttgtttcataattgagatgctaggtgaagaattctaataaatttatattataatgaatacaaagaatttctaaagtaatagatattcctaattatagtactatattcactatcatattaacattataatgatgaaaaatctcaaacatatttatgatttttctgattgttgttggattagtaatagttcctgtaattagtatgaatcctataaatagtgttaacgctcaatcacaatctgcaacttcacaacaaacttcacaacctcactcccaaaacaatagtaaggcacaagtaggacaagtatttaccttcaacgaaaaaagtaagcctgctaacgatccagaaaagtgtgctgcattagcaagcgaagtaaagggaaaagcaatacctgattataatttatgtgacgtagttgtatatagacaagctcctgcaattgtaagacatgacggcttagtattaaacaacttctctggaataggacactatattgaaatggttcttgcatcagtattaaataatactgcgatgtatgctggtaatagtagtaacagtaatgataatgctaccaatctcaaagctggatttggagaatttgcattgattgattctgaagtaattcctgtaagagaaataatgcaaaaggataactggactgaaaccgcattgcatcaccacatgttaggcgagactccaaagatattgttcctacactggtcagtaaccggagatgcaaatgatctaataaaccaagccaaggagatgatgatgcaaacagcaacttatcaaaatctctcagaaaatagcaaaactcctacatctactggaccataaatccaatttttttaaaaatattacaactcatttaatatcttattagaaaattactattttaaaattcataaatttattgtagtgattctattatttttaacaatgtatacaaacaaaaagataatggtccagtaattcagagatatctaacgattatttataaagaaataattctgtacaaaatattatccaataaacagtagcataaataactagatttgctcggtttataatgtataatttcaatcaattggtataaactgtgcataacagtcggttaaataatatgttatttcattttaagtgtgacgaattcaaacacagataatattaataaacaaaatttactctagaattaaatactgcattagccatggaaaatgctgaattagagcgattacaaacaaggattcaagagacaagcttagcagatgtcaaacaacagttgcaacatcatttacaagaaacaacagaacatcaaaagagattacagcaattgataatcgatatgggtggtcaagcaacacaagaaaaattaggacttcctttactaaaaattccacaagatatgctggagatgatgaataatacgatgactcaaaatgaattggagctaaaaaagactgaagaagatctaattatagagaatacagaactaggatgttaccatatgcttatacagaaggcaaaaattgctggtgttaaatttcaaccagctgtaaatactttgtcccttaatatgcaagatgaggctaaaatgattgactggatctggagcaatacttcaaatatgatgaggcaattgtgaccaaaaatacagaggcccccacgccttccaatgataacagcaatagatgaagagatgatattgattatcatctataacaagtttatttactgactaactttttaaaatctattccaaggtcagcgaggattattagggcggcatgtcttccggaggccagtgaaacacccggggccgaatgacttctggatctacacacatatgcattatctattgctggtatttgtaattatataattgtgatattggatggacgtattgatgcaatttatgaaattaggatttttggatttatttattattattatcactactactactactactatggttatagagttagattcacttgtggaacactaattttaactaattgatttgcctggaattgcggtagttcggtgaatccccatggttttagtccaacgagcccgttattattgtaaaaaacatttgggaaaactttcagataagtgttgtaatctctaactccgtcattataataagtccttgcaaccgttattctattctcggttcctgctaattcgtccattagtctagtcacgacctgatccgatttcaaagaaggatatgcctcataagttaatacaatcctaccaagagcaccttcaatcaaattgcttaactggtttttttgcgagatatcgctgcttgaagtggacatccattgtgttctcaatttagttatttcattgagagtttgttgttcaaattgcatgtatccccttacggattgaaccaaattagggattaagtcatatcgtctttgcaattgtgtatcagtatctgctgccaacctctttacattttcattttttgctaaagcagcattaaatccagaaaagtaggtaacaatgagtatgacaatgataattacaataagtaccactatacctaaggccactgctatactcttgcttaccactttgttcctctgtctaaattgacattaccatgctataaataaacattatcgtcccgcgcctccaccactagagcgacccccaccgcccccaccacctccaaatccccctccaaatccaccgcccccaccaccactactccacccacttccaccactccctccgtaccatcctgctcctccatagcttccccatcttctccaggctcgtcctcctcttcgaaaagatagtattaagaccgccaagaatattattacgatgataattattccaatgtagtctgcttgagactgttgctgtatttctcttgttagtttgtagttcggatcatcgttagaatatccaatatattgtcccaatgaaactaccgtatataaaagaccctgatcgagtaaagtaatatttccatttttagcatagacatcttttgcagggactagataagtgtccaatatttctcctgcaatgccatcggtgatgttaccttcaagtcctctaccaacctcaatcctcatggaaccgcccgctgagtcaggatttgaagaaaataacactaatataccgttgtcctttgcacccttgccaattccctttattccatcaagatataattcattaaatatataatttgaaagtgtatctctttcctgaatttcttgtccgtctttcatgatgccgtgtccagtaaaacctggaatagtatacacaataacttcagctgtagttgagtcatctaattgacgaagataattgtctaacaaattctcatatttttcatttatgattccagccctgtcatagatataatgagtacgagttccaatcggcgatgctccaatttgcaatgattgcaatgttgatcctattaataatgagatgaaaatcagaacggatacaaagaccataagtttggacaattgaacgtttatagccacgtctatttaaaaatgttaattataaagtttgattactgatagattgaacaaaagtgccttacaaaatgagttaaaatgatatcaatgttttatttatctaattgttatttagaatactaccatcggcttttggtaaactaaagataaatgtggcgccaactccatctttattgttaaaggcccatattctaccaccatgtgcctcaactatgtttcgagcaatatataatcccagacctgttcctatttctgaatctgtggcaaacttttcaaataattttggcataatatgaggggagattccttcacctttatctgaaatgcctatgagaacggatttatttaagtcactaatgggtttatcatagttctctgtagtttcgttaggatgatcataatcattgtcttttagtcgaatgtctattataccattgtttggggagaacttgattgcattatcaattaaattaactaagacctgattcaatcgcgctttatcggcataaacccaacagtgttcttctaatgctaggttaatgaaattgattttaatattcttcgcttttattttttgttctagttgtaaattatttacttcattaatttccttaaccaaatctatccttttcttttgaatttgtaaactattgtttctatttgattcaatcctagccatatccagtaaattctttatcaggtcattcaatcgagaggcatttctagaaatggcctcaaaatccttatgaagatggatgacatcgcttgttaattcttgatcttcaattacttttctatgcttcaaaatatcatcaaataactcttgatctaattctgtataccctattatagcttgagtgggagttctaagttcatgggctgcaatattgataaactctttttgcaatttgtcctgaacattcagttgctcattagatgttttaaggcgtatatttgaatcttctaaatcctttgttcttcttttaacttgttcatttagtatgctatttagttttactaaaaataaaaccaaaactaaaatggcagctgtaattcccgcaatcaacaaaaaaaactttgatctttcttcagataaagtctcattgatatcattgtaaaccgatgcggtaggtgtaattatgaaaacaaaatatctgggtttttcatcaacagaaatggggtatccagtattcaatctttctccagttccaaaatcatatatggcataaccaccaaatagttgacccgcaaaaacattttgataataattattttggatatcattgaaacggaaaaagctttgaacttcatcactgaataaactctttcctaaaaagtttgttcgaggtgtggatatataatttgaatttctgtcgtatgttaccaaaaattgagaatcgacattatgtacatttccgtatcgtgcaaagaagtccacagacggtatttccactccaaccattccaaggtattcattactgtctctatttattattggaaaggtcaaagctattttatgtgtgccatcaattcctttaaacccgtttgaaaatacaggatttaaagtactcctcgtttcattgacatactctcttagtgaaatatctatgttgacaaagctcctttgtccttctgatactttattatacgttattatattattcttatctgcaataaaaagcccatcgattttactaatgttgttaatttgattaaagcgttctactactatattttcaactttgtctccatacaattcatcctgttgtaaataactagaaccagataaaccttgtagaatcgatgatatcaacctaagatcggaactaatgtgttctgacaatgcctctgtaatttctatctgattatttctatattcttgaaaaatactgtttctaatattctgctctccgatatattgttgagaaaataataatgaataaaatgcagcaattataagtatcattgaaataatgattatctgttttcttctgccaaataggtatccgttatccatctttaaatcacttctgtaatacttttagaaggatcagaaaaatgagtagtcatcaaggatcttaacctacattattagcaagatagtttccattgctattggaattggaattggaatatctttctggtattttgatattgtcgttgatgatatcttcttttaacagttcgagccgttccttgacgccttctggaaccgcataatcaagattatggaatggagctatatacacgatgccgtctccagaagcacccttttctgattctagccctggtttaaatattttcccagtgaaattgcctgtttgaatcgatttaataacttgatcaaatgccttttcggtatctaatacaaaagatgatagtatagtttcaggggctaacttattctggtcagaaattgcaccaagagcatatattcctctttctttagcagcttcaataaccccgaagccagatgtatcagccacatgtaatagaatgtctgccccttggtctatttgagaattggctgctttttttcctttggtggaattatcccaatcatccaaataggtgacaagtacctttactgtaggattaacatcctgtgcaccttctttatatccttcgtaaatattaattaggttaggataaggttctccgcctacaaagccaattatctcagtttttgacatcatcgctgcaagtactcccaataggtatgttccttcttgttgcattggatagatcgaagctacattactggagttaacaagtcctgtaaaaattacaaactttgttttcggataatctttacctactttaactgatggttctccccattcaaagccatgcgatattatcaagtcataacctatcttggcatgatctctcaaagtttcttctatcttttcaattggaacgttttctttaagatcaactatataagaatatttttcctgtattgcctgtgccgcattgtacccgaatgcaccccaccctgcatcactaaataatccatccgttagaaaagctatttttagttctttttcatgatttgatgtagtctgattcggtaaggaggtgattatggagttttctacttttatcatattgtcaataccaaaagcggacatgctagaagagaaaatgatggatactccaaacgtgatgatagcaagcataaggagtatcttaatttgcaaaggtatttgttatttgtctaattttaatgtattaatgtttgtttttgatttttgacatcatttggacatcctttatgttttaatcttttcccttttcatttgattccacaatcctttatctaggcaattccattatcattgactgttttatccattttatatgggggtagaatccctcatgaacagcttaatatggatacatagatctactatttctttgatttaggtatgcaaaatatggtgggatatgacggcagattttagactgatattttcaaatccctagctatattttcataatatttctttatcttttgtttttttgcagttagtgtcatgtctgtatttttggatactcactcagttcttaaataatattctcacaccatatacgccacctggttttcaggctgacccgaaaactttgatgattttattaaaccaacatgagccaaaagaataacgaaataattcctcaaatcaaacacttaccctacattattcttattcaattggaatagcttttttgaatttataaaatgaaaagaccaatagatcttatatattcctcattcttgttcttcggccgacaattgattgcattcttgtgccataaaatactcactcgtggtttatgaataactctagcccagggtctcagaactaggcttgtccaaggcttatagtcacctctttcagcaatttaccctcagaaaataactaaagaatgacagggttattaataacccttggtagcctcggtaactttacctagcgttttctttttcatcatttaaacaaaactaaaagatacgtgagctgcctttgctatcttctgaaaattattgccctcttacaataatttcattactaacctttgtttgtcataaagaatccatcgtcataagacaattagtattgggtttgtttaaaaagaaaataaactgctacaagaattactgatggatactattactactttagttggtttttatgctgtcgtccacaacagacaaatagatatactgaataatcagttgccttttatttttttatggtccaaataaaataaactgacataacaatcatctgattgaaacgaaaaagtcatttaatccacatattagtagacgagcaaacaagaacggcattcggaggagaatgtctatatctagatatgataactttgactattgatcttctaaatgtaataatatttgattattttgataccatgcacattcattttgtaattatgattaaacagtttacaaataatgtgcagtgtttgtcaaataggtgacacagattataaaatattcggataagagttaccataaatgtcattttttaactaaattataggtttaaatcttatgtttttgttagtagctgtacattgtgataaaaataaaatctgatgataatcctgaaaataaaaaagattctgataatgcaaatgggattgcttacctccatctcttacgaaaaaatacttacaatgattcatcaaaaaaaagtatcaatatattaaaagagacgacgaaagttgtagacgctaacgacgaaaaaagcacgaatagtagtgaatattctaattctagtcttactacctttataacagcagataagtttgacatacttattatcaaagagctcttaaaagacccatctattacaacattagaaatttctattaaacttggaattcctcttcatattgccaataaaaaaagaagactgatagagtcaaaagtgttgcaaataaaatattttcttgacctccaaaaactggggtttaactttcaattcgccgatgtatttgcagatatacagatagacaaggttaatgattttgtaagacaattatatgcaacatcttttactaagaacataatcaaaattatgagagtcaaaggtgaagcagacgggatttgtataaagactttatataaaaattcagaagaattattctttttgatggatgagataaagtcaaatccttctatttctaatgtacgcttttcagagcaagtagaggtagtaggagacaatactttagatgttattttaaatatacttcatacagattctaaaaataagaaataatactcatatcaggctgtaaatacaagactataggattatttttcaagacgaaaactaatttatcttgcctacttgcttgacacgaatatctcatatgtatggttaaatataacaaacgttaatacaataatgagatgttgtatcatatccaagagaaaacttgataaaaagatagacataactgatattagaattattgatttattggtttctaataaaaataacaaagaaatttctaaaacccttaaaattcctttatctacggtacagagaagggttcgagacttaatatctgctgagtatatattttccaaagtggaagtaaatccccacaagttaggattcaaaacagggttagtacatgtgtatctaagtgacggtcatattgaggaattgtcaaagaaaatacataatctagaccacataaagagtgtagaaattcacataggcaattccgatattttaggtcaggtagtttacaaggagggcaaagatttgctgaatttaatttctgcaataaaaaagatggaaggagtagatagaatagtatggtctgaaagaatcgatcaaagtccttctaaaggaatggagatcttgtcaaatgtcttaaatggctaaatgaaccaatttaagtgatataaatttcatatactaaacgattgtcgatgctgcaactatagcgaaaaggttattacgagtaaaatgatattattcctgaagtttaatgtctattgaggataactatacaggattagattacattaacggaacaatcctaatagtcacagacgatgatgatataaatattgtattgtggcgtatttgcattaaatggctttaagtgttttaagtgtcattcagcagaagaggcccttaagactcttgacgagaatattgatacggtggattcgatgctccttgatggtaggatagcagcagaccggggcgccatgataattgtaaagtcgaagacaaaaaagccaagtgtcaagattgttgttgttgcaagcagtgacactgccaagacacgagtactcagttatggagcggatgattttttgattaagccagttagtgctgaggtgcttacaaacagggtaataactcaattggcaagaaggccgatagttagttagtttttatttaatcagttaatgtcttaaaaccgtagcaagctttgctagtttaaaaggcattgtgagaacatctatatcttttagtgctgtggttcttaagcactcttctgataaatgctccatgggcgttgttgtgactaatacaagtttttggtcgggcttttcacttcgtatttttttagcaacatcaaaaccagagggattatacaaatgggtgtcaagcaaaatagcttcatatggtattcgcctctctttgctttgaagaaaatagtctagagcctcctgtccactactagcggtttctgtgcctatacctaatgaagataaataagtcctaaatagtaatagcaactcgttgtcagactctccaatcaaaatttgtggttgtgataactctttttttctttgcgaacaagtgtctcctactttcttattttgaagtaaaccaccattattcaaaatgtttcaccagaaatataattatgtagttaacattacatataaagccatgtttttttattttttaaagcatttcatcatttattaataaaaattaggattaaaatgtcatttttttaattcacatttcaagaagaacaaaaaacttgaccagactttgtatatcaagaaatactgtcttcaattgctgatagatacaaagagcaaatatacaataaggagaagggagacatcacgagaaattaacgtattttgtcttctacgataaatcatatggatatcatttgagtgtctcttcaaccgtgccactctgtacttagaaccgtccatccaattgaatttgggaatccaccatcgatatacgtaaactttgtgctattttgctaataacgattaaatattatccatttatatcaaagtagtgccaagcccattatctattctcataatagatgatgaagaagaactagctactctctttaaacattcggttgaggctatgggtctggatgcagtatcttttactaacccattgttagcatttgaatattttaagaataatgagaataaattttcattagtaattacagatttaaggatgcctggtatgtgtggaatggaattagccaaaaaggtaagagagttaaatgattcagtaaagatatttttaatcactgcttttgatactagggatttagaaagcagtgaagcgtataaatcagcgaagattgataaagttattcaaaaaccaataagactttctattttaaaaaaattaattgaagagaaactttataattaataaaggacaaaaatcgtccaccgacagtgggattaagttgctatccaaatgcatcaagtttgaatactattatttctgttacttagatagacggtcaatgcatttgagctttatagccatgccatgatgatttaccatttctaatttttatctctcagataacctattatcaaaattgagttggttgtatatacaaataccttttagtagtgaatcaaatatgtgggtaatcttaattcatagtatatcagttccttgtacagcatttttaaaaaaataggaacccatgtgtgataatatagaaacaccgtcttttctcttctcaacagcgaacttgactaatttatctttgaattccaccatggccactttcccaaagtgttgatttaaagaatcggcaattatctgggaatatcgcttttatgttgaaattcatccatctagatattatcgattgaaagattttatcttactgatcttactgtttcataaaaaggatagaagagagttatttcattttttatatcaatttgtctttgtataaagagagtataaaattccctgaatgtttgaagatttggatatatgagtatccaatataatccatactttgatttacctattttttctacagcatcttcaattgagaggttataaactttgttggtgactttaataacaaaaccatcctattattcattaacctgtaaaccgaaacttaataggatgagtctttttgtctatctagattattgacttaaccatccatcattagaccaaactacaatgaagctaactaataatattatttatatcatgatagtagagttagataaagtattgaaattagtggatttcaatatgataatcatcattttaccttatctgtagagtatgactattgcggattaaattaaataagcggcaatattaataatcacagataatatagagggatgaatatcctacgtaatcgatgatgattcacacttgccttgaggccaatggcaagctaaacgaaaatgttactccttttccgtctatgttactatcaaaccatatgttacccccatgtgctttgacaatggcttcgcagatgaataaacctaaacctgtaccgccactatcaaatgtggaaaaagattttaaaaagactttggaacgatcttgagggtctaaacccttcccaacatcttttacgctgacaattatttctttatgatgatggcggttagaatcttctacgtgtttatgagattcgtttttactagtagtaacaactattgtaccggcgtcagtaaacttaatggcattgtccaaaagattgactattacttgcgctattctatctctatcggcttctatgaaagtccctctctcttctccctcttctccttctatttgtgatttagtatcacaaaatatatttagattttttttggaatggctaatctgaattttgaaatcctggataatcgaggacaccaaatcatctaaattaaattcctcttttgataatataagagaatcattatctatttttgccatgtccagtatattagaaagaatcttttgaatccggactgcattctgcattataagttttatatattctacgctggtttgtggttgagaaatcaatatttcaccgtatccgagaatcgcttgaataggggttctgatttcatgagctgtaatatctatgaaatctttttgctttaatacaaattgttttatcctttcgttagcctctatgagctcttcggtgacctttagaatttctttattatttatttcgaatctttcattggtttctgctagcttatcaacagcagtaacaagtttttcttctgattctgttaaagactttctgctaacttttatctcttctgcatttatcctaattgcttggtttaaaagacgaagagattcatttgactcctttaaatcttctgtttttgccagaagttcgcctgtttttatttccagcaagccctttatggacatccgatttttgctcgttccatctgactgtgaaatgattattctatgtttattgtgagaaataccttaaatagttaacctagttttcgccgtacaaccaataatcacaaacctgtagaaatatctaatttagaataagttggatttacattctaattagtaaagatgaacccgaaattccaacgaataactcgataggccgctgattaaaataaataattatttgtttgaccactttcgcatccattgaagcaagttgattatagattctacaagttcttgtcctttaggggtaagacgatattctactctaggtggaatttcattaaaatattgtctatttaatattccatttttttctagctctcttaagcgagtggtaagagttttgctactaaagcctttcatagagtttttgaatgtcagatatcttaccggatctgtggaacaacagagaggtatcaagatttctaaagttcctctttttgtaataatatttctcaactcagatgtttctttcattaggctttcaacgctatatccataaaaatcacaagggttcattttatcattatttagaataggtaatttctttgaagtttttactttatttggaagaatcttttctcctattagtttctctgatttcacttactttaccaaattcctcttactaacttaaatagtttccttagtaaatcaatatctatggataaacaattagatttaaagggaaagatcaaggaacaatatggaaagattgctacaaatggcaattccgattcttgttgtatgccgtctagcgattgctgcggtacatcatctgaaattctcatttctccatttgagtcatcaaaagctgttggatatgattcagacaaattgaaactgattcccgaatcttctgtattaggtgtaggatgtgggaatcccactagattcgcagatattgatgaaggcaatgtcgttgtcgatttaggttcaggagcaggtatagacgcatttcttgcagccaatattgtcaaagaaagtggtaaagtcattggaattgatatgacagaaaatatgctcaaaaaagcaagggaaaacgctgaaaaacatggttacaagaatgtcgagttcagacatggcgatatcgaacaggaaatacctgttgaggacaattctgttgatgtagtcataagtaattgcgttcttaacctgacaataaacaaagaaaatacgtttagagaaatttaccgaatcctcaaaccagaaggaaaaggaaaaatggttatatcgaatctagttacctccaaagaaatagatgccgattctattagtacagacagttggtgtggttgtatagatggtgcattaacaaaagaacactacattactagtattaaaaaagctggatttactaatattgagatattagatgagaaactgtacatggagttggatgagacccgggacatagaaggtcaagaaaaaagacaaattaccagtatctctatcaaggctgttaaagagtaaaaaaagtaataagagaagtggattgtatgaaattttcatttggcaaacgcaaacgagatcatgatcgtgacattgcaacaaaaaccatactctttgtatgtgttcaaaacgctggaagaagtcagatggctgaggctttcttcagaaagtatgctcaaaaagactacaaaactattagtgctggtacagttcccacttctcaaatcaatccaattgcagtagaggttatgaaggaagttggaatagatataagtaaacaaaaacctaaagacttgacagaagacatgattcgaaatgcaacagctattatcaatatgggttgtatggatgacaaattctgtcccgctttatttgtaccaaaagttatagactgggctatagaagatccaaaagacaaaccaatagagaaagttagagaaataagagacgaaattaaaaaaagagtgttggaaatagttagcgcctccgaaaatcataaaattccaatctaagataacggttcatgtaatccaactaaacggatatcctataattaatcgattttcatgtcaaaggaatctacttttgaatctgtagtcgataaactaactgttaatcaaaaaaggtttgttgcagaactcataggagcatttattgttgttgttttagctacaggttcagtagttattgatgcaaagtttaatggtattcttggtttaccatttgttgcatttgctcctttcgtgggtgttgcaataggcgtatatctttttggaaaaatctctatggctcattttaatcctgctgtatctgtcgcgtttttgataacaaggcatattacaagaaagctacttgttttgtatcttttagaggagattattggtgctttgttagcaagtcttttcgtaagtattgtaataggcaaagaggtaaatctaggaatcaatgtgccaaattatttatatcctttacctttgatatttggaatagaagttttagcatcagctcttttgatggcggtgatattgactgttgtttatacaaaaggtttgaaaagattcggcggaatagctatcggaggtattgttggattagacattttatttttggcgtttatatctggagcatcgatgaatcctgctcggtcattggctcccgcaatgttatctggagtatggaccgatctatggttatactggactgcaacatttgtaggtacctctgtgattgcatggatatatagaaaaaagatttgaataaataacaaaatttgatgagttatagatttaaaaacaatgctagtagaaaagacgtcactagctcattttcatctacagaataggtttaaagaaaggttaagaaacttttaaaaccggaatttaaagtctctatattataatattttagaaggtaaaatattacattatttatactatgtacgatagttgatttcatgataagaacaaagacatatttagcaattgtcattgctactattatatcaatgacttttggaggccttcaattttcaaatgctgaacccgtgactatggatattaataaagcaaaggatccaggtcctggatttggcacagaaaagataggaacattgtctattgatgtacagggaaaaacgatagatacctctgttaacatgacggcagtacctaaacaagataaagtttttgaagcatggttagttgatgccgatggatccaactataaattaagcctaggtacattggctggaaatagtttaaatacttcagaccacttggtaaatccttttacctatacagagttcattatcactgaagaaccagttgacgatgtcgatcctaacgcagcaggtacatatggtggagctgaattacaggccccatttggacgataataacctttaattttttttgatcctattttcaaaaaggactagcaaatggaaagacatctttaacatcgaatttactgtctgtaggtatttcacaattttaattcctcatttcttttttatttcactcggcaatatcatactgttatttattttgtgattttttcatatcttaatagttgaataaaacttttgatacgtcataattaccatgcgtctatttcaaataactgcaaacacaattggaggagtcgagattttcacagaggtcgggtgtaacgaaatcacctttgtcaattgataatattgaaatatcctatggtgagaaatttgatatggatcttacaataaaatgtaagtattgtggctttgaatatacctccaatttatatcgagaagataaacagagcgttgaaaaaagacttctaatcatgaaagttgtccaaactgtgggctggtttctacctatgatgagttcgattatgaatagagtatatactataatacttgtaatctgatgtatcatattaaattctatcaagtttcagagatgtaaacgcagtcaatttttaaaaatagtttctcatttttttcgcaatcattataaaatacgtaaaataagttccgataaaagataggaataattctattgttgttctatgatggatctgcatcaaatcttttcttgtacttgtttattgcttcatcctctgagatagcaaattttaaaactttaccatcataactttctactttgtattgaggaatgctaaaaatttccttgtttcctatacctctctgagtcaagattaaaccgttagaaacttcttggacctcgccgaaatctgcatcgctaaggcctctggcctctttctttattacattattccaatcaatctgttcaagtgtaatctcgccttgagaatcatctccaaatcttttcttgtacttgtttattgcttcatcctctgagatagcaaattttaaaactttaccatcataactttctactttgtattgaggaatgctaaaaatttccttgtttcctatacctctctgagtcaagattaaaccgttagaaacttcttggacctcgcctaggtcaaaatcattatcaccttttgcttccttctttattacatcgttccagtcaatatccttatacatacatattcaaaagaaacatattataaatacctccataattaaaaattaatttatcctctagttttccctttcctcaatagtcttgaggaacgatattagagtaaatctaagaatatgaaacaaacaaaatggaaatggcgaatgaagaaacttggtcttgttgaattttctgttagtgaactaagtagttgaaaaaaattattaaagataaaatttagaattagtaaacattctatatcaattcattattgaatttacaatcaacaatttgaaattatgttgtaataccactataaaaacaataatcatcaaataataatgccgtgccaatacgtaatagtgatgatttagatgctacttcgacaaaaacagtagttattataggactaggccagcttggtcttccagttgcaaaatatgttaaagaacatggttttgatacctatggatacgatataaatcaaaaaaccatgcaatcagctgagaccaattatggaataaaacaagcaacaaactttggtgattttgacgtattaattatctgtgtatccacacatagaccagatgatatgtttacaccacaagtagatggtttgatgtccgttgttgaaaagatatctagagaagcaaagacaggtgcactaatatcagttgaaagtactataccaaaaggtacatcaaaaaaagtatttgaaaaagtagatcatagactacacgttgtacatgcaccacatagatggtatgcattagaagaagaaattcacggtgtaaatcaattacgtattgtaggaggtgtaagcaactgttgtctacaacatggtcttaacttttatgatggacgtgaggtaatcccacaacaaacaacaggaacagaaggaatgccaactacaagagcaggaagaatagaaggaatagatacaactacaactacaactacaactacaactacagcgacaaaagaagggctaaaaagtctatcaattccaatgcatccagtatcatcagttgaagtagcagagctaaccaaaatagtagagaatgctcatagatatctccaaatagcatttgcagaagagctttacctttattgcaagtctaatagtatcagtttttcggaattacgtgaatcactcaatacaaaatggaatgtagaagtactagaaccaagagatggaataggtggtcactgtcttcccaaagatacaaagatgtttattaattcatctaatacaataaaaagcaagattttacaagcagccatggaaattgatgaggactacacaaatttcaggcgtcaactaaatagggcgaaaacttctatttccatttaagatgacaattggtaataataactcattgcttttattgataaatcaattcatatatactactggattattctccaaattccgagaataatgatttaccaaattcctttcttattttaggaaaatcttttttcttaactttaaaaattaattgatttaagataatattaaaaaaaattatgctacgctattggaactccaaaaaagaatgaagattttactttgataatatttttttctataggattcacaaaatagagtaattccaagtgatcattgtcatagaaataataatagtaaacatcactataagttaaggaattgcgtttgtattagaaccttgataccacagggaactaatctccaatatgagaactgtaactaaattgcgagttcagagattcaccatgctattgagttttaacatcttttatatttgattgaattgtttattcatcagtaaaattagtccctattaaactccaaactttatttgactatgcgttcgtactacataataagattataacatatcataattaatagtaatctgcaatggtcaacgcagaatcatctttttcacactcaaatttaggatctaatgtggagaaataccagatggagagtagttccggatggagagaaatagacgaatggggccccgaaaaagtattgcaggtatatgatcctgacaccggtatgaaaggtgttttggttattgataatacctctactggtcctggcaaaggaggaataaggtttgcagaaagtgttactcctacagaagtgtttaggcttgcaagaacaatgacttggaaatgtgcgtcagctggcctgccatttggtggcgctaaaggaggaattatagcaaacccaagtaaagtaaaccaagtagaatggattaaatcttttgccaaaatgataagaccatattgtcccctacaatatattgcagctactgacgttggtacgaccgaattggatatggcagtatttgcacatgagatcggagacatgcgagcatgtacaggtaaaccacaggaactaggaggaattcctcacgaattaggtacaactggctatggggtaagtgttgcattaagaactacgctagactttttaaaagacatcaaacgtaaaggattaacggcttccaggccctttcttgatctcaccaacagtttagataaaaaaagcaatgatattaaagtagtaattcagggatttggtaatgtaggttcatttactgcaaagtttctaaatgatctgaatataaaagttgtaggcgttagtgatgtctcgggatttgtatttaatgataacggcttggatattccgcaattaatgagtgatatgaaagacaagtctaaattaggtgatctgctagagaataaacagcatcaacacctttataatattttggataaagacgaaatttttaatgtagatgcggatatttttattcctgcggcattaactggcgttatcaacgataagactgctcccaaattattagaacataatgtgaagattgttgtagagggtgcaaatattcctactacaccatcagccgatcaatatttagtgaataataatattttaatcattccggattttattgcaaattctggcggtgtgatcggatcgtttgttgagtatcaaggccgaacagaaaaagaagcctttgatctaattgaatataaaattacaaataatgtcaaaaggacactttacaactcactacaattaatagaccaagaaggtgatacttcacaacttaatgttagaaagactgcaatggaaacagcaaaacaaatagtgtatagagcaatgttattaagaaagggggcaattagtgtagctagggaagcctatgcaagaaaggaacgagttatttattaggtggattaaattgttgttactgattcaaaaagattagaaaagttattgttagattatttattttatcagcctcgttcatctcttttacaatatgaatgaatcaatttctaattctcattaatttccgttgtggcattctgcattgtttttgtaaggttctcttgccagtcaatcatgctcacgggttttgtaatcgcaatgtcttttccatctacgaggttagacgtaggctgggacacattaaagtagcccatagcgcctctgtcctcaggaatcccatgttggtgaaatacatattttccctcccagggccatttcatttcaaatattgctgcgtctcctgaagatgttgcccatgtttgagtgtgtactggttcattcatccagatacccgaaatccatgtcttaaagagagttccatgaacgtgatatccatatgcgggcagttgggacagattaatcatatatactcttgctgtttcatttgtgtaaactggtaggggattatcgtagtaaatgttctcgtagccattgtagaaagcactttcaggatctgacgtgtgtatgtccttggtatcataatcaccaaataccactacaaactccttggcgggtggtaaaggtgtttttggatcaacaataaaagccccatataatcccatcctaacatgctcaacaactggcattacatggcaatggtacataagggcacctgatggtgctgctgtaaactcataagtaaatgtcttatttggcgcaacaatctcaaatactccatccattgtgccattatggccaccatgaaaatgaactgtgtgaggtaaatctagcttgtttataaaatggactattaccttatcaccctctgttacacgaagtgttggtccagggatacttccattgtatgtccaagccttaattttcttacttggtgatatgtctagtgtagtctcttcggcaatcaaggtaaattcttttgtatttgaatcggaagtagatacataggtctgagtgtttgtttgattagtaattgtagtagctattgctttatgattttccaaattattaagcgagaaagcaactaaataaaaacctagtatcatgatgagtgtcatcgattttgacttgtgaggtggtattgatagaaatgtattgttcatccgaacaattgaagttctaagttaataacatagacgtattgtttgcgtgttgatgtattcaaatgtatttagatgtattcttatattttcaaaatttgcatcgcttattatattaatgtagtttttaaagatcaaacatcgcattaaggattaatcgtgtataaaagcgcaaaggctggatgtataatgtatatgacaatgcaatagtctgttgaatatttaccccttgaagtaacatattctcgaagtgatttccatgacacaagactcaatgataaaggacatgaaacaaagctcaataatactgcattctttgaaatactgagactagtaatattgaaccatggacctgctaaccaaaacttggattcataaatatgaaggttaatttaactactgataaaattaactgctagtttcttgatttagaatttttttatattccacagtatctgttaattgttttgtcttcagtaaaaaaagatgataattctgttacacctgtctatatactatgttaattaataaataatgagtagatattattttggataatttattaaaatctgtattaaaacgtcaaataccctttcttataggtggtacaataactggcacaattatggcttattattatgggttcttgttcactattatagtaaacagtattatctggtttgctatctcaacacttgtcaacaaattttattggaaatataccggcttcaaagaagaatttcagcttgtctcgaaatatattggacgtataaaaaagagaaaatctaaaaataattttaatattaaagaggataaacatacagaaggagagaatgtcaaaacggatttctccttaaacaataccaatagtaacaatactgatactgataatttgggaagcccaataaaaatctaaaatattggtatactatatccatgtcaattttaaacaaacgttctattccttcagttcaaagagcattagttttgcaaggaggaggggcactaggagcataccaggctggtgtttttaaatgtctttatgaaaaaattaaaggaagtcaagcagatgataacgaaaaagatgttcctttatttgacattgttgcaggaacttccataggtgccatcaatggtgcaattcttgttagtcattttgttgaaaataaaacatgggaaggcgcttcagaaaagcttgaggcattttggaagtatttgtccacccctacaccaaatatttcagaagcattaaaacaatggaaagtcgagaatgaaaaaggaaatcccttaatagcatctgaagaatctgcacgaagatattattcagcaagagaattttctaaatcaggtgtagaaaaagtattcaagcctatttacccaccaaaacaagataatagattttgcgattcgcaaaatcaatggcttgtgtacgataacaaaccattgagaaagagtatagaaaaatttgctaaatttcctattgcaactagttttgataaaggggaaccgagactgcttgtagtaagcgtagacgcgacagaaggaacaacagtcacatttgatagctatgagagcgaccaagggaaaagagaaacagaatatggtgtttcacatttaggaaaatccattatcatgcaatacaacgaaggcattagtatcaattatcttattgcaagctcaagcatacctgaagtctacgcttacgaggaaataaatggacgtaaattttgggatggaggggtattgagcaatactccaattaaagagttgatagatgcacatcaaagattctgggaaaaacgaataggttctaaaaatctcgagaactctgtccgaagaaaaatgaggcatgatgaaagggatgaggaaacgaataattacaacaacaacaacaacaacaacaacaacaacagcagcagcagcagcagcagctcatcgcaagagaagcaacagatacaaagaattccaaatttggaaatatatgttgtaaatttatttgatcctaaggaaaataatagcaatactgttaggaacgtagcctcatatgattttgaatggattaaagacaggagtattgacataaaacttggtaaagaattcgatacaaaaacatatgaactatgtactgactatgtgaatttaatcgaaagactgattagccttggagatgagaatgaaatactaaaagagaaaattaacagaatattagaagaatatacgccaagacgacttatgacagaagaaattaagagaaatatcgatatactaaagaacacttttaaaatagttaaaattattcaaatacaacgtaaagatgacaataatagtatttcaggaaaacttactgactttacctatgaaaccatagatagattgatccaagaaggataccaggacgctatgagtaaatgatttacctgctaataggggcgcgccgttaacttgataaacgcctatagttaggaacagagcacctgctgctactgctctttatgtggttctattcgttgaatgtattatataaaaataattacaaaataatgaataaataaaaatcaaattcaaggcagtatcgtccttgtaaatcttattaattattgttactaaggtatataacgggtctgtgattttagtaatagatatattatgagtctaatttgtggtaagatatgataagagaataagagatgaagttactaaagtaataatcaaatattcatttttatatacatttaataattaacttgttattaatgggacttgactaggtcaaggtttttagataaaataaaaattatggaagaagttagttaaggtattgtagaattatttctgaggctcatattcagagattcgttggctatcgattgatttgtcaccgacttattcgagatatttcctgcatcaatttttaatgcattcatcgtattttgtaacattaagggaatccatttgtccataaacttggaatcctctgccatcatattgacaatctccatctccttttcaggggttaattccaggccataaataggagtatcgccaaagtgatggttaatctttgatgggtccatagatattgcaagtatattgttattatttattgtccagttagtaggcacatttgaaatagggccatccttcattgtcactgtaactgaccctttcaaaactgtgttgtttccatccatcgtaaaatcatttatagttgtatttgatatttgatggatgtggtaagcagagccattctccattaccatgctaaatgtagagtgaaaacctgaatccgaaagatttgacggattaccataacccatatagttacccgccagaacccaatcattattaatactggctataggaccataaccatattcataatcagtcactgctggtatagttgatgcataggcatttaatcctgttagagataacaaggctccaacaattatagaaggtataagaatcttgattgactttgtgttaatcattagactaatccaatcataatgtggttattaaatttaaaggtaaaagtaaacctgattatcagacaaactgtgaaaaatgaggtacttattttgattaatgaaagcaaaagaaagaaagaaaaaacatcaaacgggaccggttggcttcaggtgatatcagtcctttacagtaggttctaatgtttgtaaaagattttaagattctgtatatcgactcaaatcgtaaaatcaattcactcatcattgtcacactgttccgtgcatatttcacgtcagagttgaatttctaacttttccttaagtatgggtctggctttgttctctgttaatctgacggttatttgacgattaccctatttctttcgggatcttagagtaaaagataggcccactctaatattatcactattgttactcctcatatctaaagtgactaggactctgaagaaagattgtctttaatatatcatctgtaatagagaactaatggggtcagaaggcctgtgttgtgaacaatcttttccatttgatggctataccctgcttgacttctgttgctttatttctaatcttatccggaaggccttaatcccaaatgctacatacaatattatgattacaccgaatatttctaattatattaaggtcaattacttgactgtaggggatataaattacaaagatagatgtaatatcatcgtctacttcatctaaatgttttattttatatgtcttgtttttactttgctcttttgtagtaactactgctgattatatgaataaatcattttaatttaaatttattttattcatatatttaatatcttttttaaaacttcagttatttttaattaacttttaaaataattttttaaagttaaatttatatccttcactttaatactatattatagtaaaggcgtgttattcaagatttgttataatccttattagtatttgactctgttagattgttggttctttcagattcttggtcttctagtcccattttttttcttaaatcctttctataaggtattggatctttcgatgtatcagctgacatttaacaaatatgtcaaacatactatataatatatgcacgtaatattaccatactgataacattagtgcgttcctatagatattacctaactaaattgaatgatctattaactctgatattcaatattcaaaaaaatgaagataggatatccctatgacattaaatgttagtattggataaaaatatctgtgtactggctcagattcaaatatgatgtgtgcaattttatccattcagagcagtcccttaatagcgtgagcatccggggattgtacagcaatccaatcgaatattctttaaaacttattagccacacgtaattgattcttctttccatttagaatcaaactaatctctccactttttatactcgcgagttagacaactcaacaattagaatgaatttaatgaatagctttgatattaaaacgtctaatatgactcctggaaagatattctaataccatattgtagaatacccaagatatatgagtcataaaatgtcttttgaatgctggaatttatctggcttatccaacttaacagcggcataaaaggtttgatttaatgcctgatgaaacaaagaaaagattctaggctgtgactaacctctcttatgtgttgaaaatgaatcccgccaagcagattagtatttcatgatagtgatactcacatggagaggctaaacattcacaaaggttgagcaaaagaaagttgaaatccatctggttcacgtatatgaaagtatcgttcattccaggatgcatcaataggctcattttcaagcaaaattagacttgaaattgatttgtcggtcttaaaataagaatagagtctgttaacatcatctgtataaaaaataatcctaacgaaattattgttattgttctcatgaccaacatgatcatttggtgaattcttaagctccaagttcaaatatgaggtatttttatatttaccgatccgataagtagtaaaagaatctttagaatctccaccataaatgagtttgaatcccggaatattagagtaaaatctgcaagacctttccatattactaattatcaaggttacagcagatagcatagttatttgactcatttcatatgcgttaatacctaataccaatatattttaaatatataatttcctacaacaacattagaaaattgatatatatctatgaatatttaggttttaaatcaatactagtgaatttcaaaaataaatggatgtttctcagtcaactatcttcaaattatatcctaaagtcataactatcaaaaatacgtcttctagatttataacaatggctggtagattgacaaggcctaatgaagagtagttaaagatctgtggacagataggaagctatattctaaaaagtttgagttggaaagagaggttgaatatatgctaaaggaattagataaatatgatgtcagtctaatagataaaagtcaaatatatgatatgttactattttagtttgatgataataatttatgttgaaatttgttcaccgagtacaaatcaaagcctgtcatatgcctgatcactggataatcaaaatacgtaattgcacctgtcgaaccgaaattcttaatttgttaatgttcatatattgtagggttataggttaactccatttaatttctgtcagttttttgcatgacacttttatattattttgcaaatatctcaaaaagatattccgttttttcaaaaagtcattgttctattgataatatgtaaaaatgaggaaatggaattgtattttcgttagttctcagggattattaagtagatccaattggttttgcaaaactttcaattctaaaagcacctcagtcatattttcttgttctgttgcttttattgcattatttatagtactatttaattcactaatttgtgacgaagttataactatttgagaaaattcctctgtatttaattcttctatgttagcaggtgtagtcatattggagctgttatcttgaggatagacatattggttgctaaccactaatgtcataaatagcattaggattggtaaaaccgccacaagtaatttagaataggaagaaccattggttttgaaactgaaatctgtaatgtttgtcatactctataatattatcatattttatatacctataataccaacaagttgaagacatagtgactcgttatgcctgcaatgagaataaacatgtggatagtgttagtaagacttaatgtttctgcagaaatagtaacttgtctttaataagtaaaaatttaagaaagatgatattgttcatacctaatgaataatagcactttctatacgctatttgcagctttagcacttttagtgggacctttagtagttgacgtttttgcccaaaatgttaccatgtgggaggatcatgctcaaaataatactcaagatacgatcaaggagactaatgaaaccactggcaatgtaacaataggcttaattggagtagcaaatgggactggtaatgcagcgggcaacataactgaaggattgggtgatgcagtgaatgaaactagtaaagtcttcttgaacactactgaagttgtaatagaaggaattaaagacgtagttaatggatcaagtagataactaaatttaatctttttttgatcaaattcaatcaaaactaattaaacgaatctagatatattgcaaggataatttgcatacaaaatttttatcatagcgaatagaaaatattcaatagattaaaaaatatcagggagcattgctatcagtgtgtttatgatacctacagcacgacaaatcatatattaacttctaataaaaataatgtgccctctgatggatgtatttttcgtcttcactatgaaatactgcaccgcaaaaatcacaaaccaatattcccaactgtcttatatcaccagcttttaatattgcaatggtattttctttttccatgtcttgtgctatgacatattcttttatggaatttttaagcagtatagaagttaacagaccttcaaattcctttatggagccatggaattcaaaaacagcggatattgtattgatgttatccttatccttgtcagtaacatagttatccttaattaaaaattgttttacctctatcgattctgtaataattggtatcaagtaatcaggaaaaaaagataaattcacatgaatcctcatagttttcttcttttcttatgattttgtagtattatgaatgttgtagtctgattaattttaaatgatgtttttgagatttaaaaaattggtaagatgaaacaaatcaacaataaatggtgaagactattctatggagattattatatgatgaacattatccttgtctgacattaaatattttctgaaatattctactgactattgtaattgtacatttattatgcatcacatagggaattagtgaaatgattgtgattaccaatcttgagaattgttaactctgattcggcatatggttatttctatctctgtttattcaattctgagcaataacacttttactctacaccttgatctttaatggatgctaagtaaaaatagaaaaaagttctgatttcattgtgttcatataaatagaataaatcttattctaaatgacattgacagtttaattcagatacctttatttcgcgttgtgataaaggattttctttcatccattgcttcgattatgtctgttttactgacaaccccttctactatatcaatgtcgttgcacacaaaaatcttgtcctgattttctttaatcatgacagacagtgccttttcagcagtatcatttacatttaacaactttatttcactcttgggggacatgatatttcttacaatggtggtatctctttctatttcgggaacatttaaacatcttttaagagtgactattccaacaatctcgtagtttaattttgttactggaaaagaactcttcatataaatattaaagtagttcctcaagatggtatttactgttatatcttgtgggaccgaaataatattagttttcattagctcttctaatcttaccttggataatatcttcattatatcatactgatacaaatatgattgagctccgttctgcaaaaaccaaccgatcaaaataatccaaagtccactaacaaatgatccagaaagtattgttaatattccaaaaccaaagaatacatatgacataattacacctattcttactgcaattcgtgtagatttgtcgtaattcttgtttctgctaaatagcagtgatcttaatattcttccaccatccattggaaaagctggaatcaaattaaaaattcctaatatcagattcaatattgacgaataataaagtatcgcatttaccatagttaacactgttgtggaaaaatcgtcagttggtgatgatgattgtatgattatgacattggtgatccaccaaaagagggcaaaaaaagccgagagagctaaacttatgagaggaccagctattgccatcttaaactcttttttaaagtctttgggttcttcctctatgtctgaaactcctccaaaaataaacaacattatttgttttactcggattccataagatcttgctactatagaatgagataactcatgtatcaatacagataagaataatataatggatcctgttatacccataatccaatattgtaactgattcaaatctggtacgtatcgaggcatgaaaccggttgcaagggtccatgtaattaaaaaaaatactaaaataagtgaaaaatgtaatttaatcggaatttgtttaatttctgcgacttgtaatgacatcgaatatacatttataataaatctaatatactagtgccctaaatctactaatatttattatttaaaatattgtaaggtcaatggtaagatggttttctatgcatgactttgtgtgttggaagaatccctatcaccacatcagcacctatcatgatatggtgtagaagaaatatttacaattttcaatattaatttaaaacgagacaataacataaaattacaattagatcttatgttatttcattgttgtagttatctaaatattatgctgattacgtctactcgtcctgattaaaatattaacatcaaaaatgaccatgataaggacagagattaataaagcaaaaaaaagtaggttatatagttttatatctttgtattaatatgaataggattctgttaatttccatcgctgcagccatatgtacaggtattgcaggaatccttcatttaagtatgttacctgcttttaatactcaaacgactattttgtttctagttggaggattagcacaagtattctggataattcctacagtgaagaattggggcaaaatttgggactatataggtatagtaggaacagttgcatttaccctcatctggattattacaagaatccccggtaatccaataactggaagaggaggcatgataagcgatacggcaattgttatcgaggtctttcaaatcgcatttataatccttatgggaagtctaattgccatgaaatcatctaaaaaaactatcagaaattattctgaggaaaagtcttagaaaaatattaccatactattttttttcaatttgaataatatgattgtaattttctgttcaagcggtgtagcttcaatcgatatgaaatatgttaccatacaataataaacatggagaggacccggtgggcttcgagacgatatcggcactaaagggcgattccgattcttaactgccggataaaaattatctcctgctgtctagattatgtacttttttcgaaatcctccaatatctccctttttagtgtatattagacgaacaagataaattcttaattcttcactttcgcgtacattaggaaaagttacgcaatgactaaatcaaaaaaatttactatgatttatcctcgtaatgtgattaaaagtaatcaggatttaaaaatcagtagcatattatcgaaatattccaagataacaagatcggatataaaatatcgcttttgtccaaaaaattatgattttaagaaatttcaacaaattaataaaaattgtgtgttattggatggtattgtttagttgtggagcaacctcattaactcttatatgtatggtggatgtcgatggaaaaacaatatcctcagtagagttgttgtatattgcaatgtccgtaatactggtggaattatttactaaaatatcacctgtgtacatacaaaggcctccagcttgtgaaagcaaaggcgataaagctaatccaactataggcattggattgtctggcccaattaggaaaataataggtgtggtaaagtcctcattacatggaatttttgcagtaatatgactattcataatattgtatggagatgagtcataaagatgaagataatttccttcaggtaatgttctatcctctagtaataaagtttgagaatcactcataacaaggttttctgccacatttgtgctacggggttgtatttcttccttagacaactcctggctttgagaatatgataattgtatcccgatgggagttatcaccataaatgtagaaaacaataaaataaatgtgttatttgctattttcattagaaaatgattaaaatacatgcataaaaacctatcttaatgtatttctttagctatatttgttgtgctaagagccacatgatagtgacaaagcttctcttattcattatgttgttttagcaagaattatttgaaatcctgtgattaacgctcccggtgggcttcgagatgatatctgccctaaagggtggattccgatatccttattgactcatttatgattcatttgttacttcaagtaagtaaatatgattcgtagttcaaaagcaaaaaacttttgatagaaatattggaaacttctaaatatatatgacacaaaaaaatctactaaaaactcgaccggctaggtttagtaatagtatattatgagtccaaatttacgctgaccctatcaaccaatattcaatacctgcaattctacaccgcgggactttgaatccatgaggttgatctaattattggttatccaagaaaccgattactttaacaatgtcaaattatttttctcctgacgactaacaataaattgagttttaatttcctatgttatctatcattcataacctctgccttaatattttcgaaatagatagtagaattagtccatttcatatcatacagaaattttttttaagtttggaataccaaaagtaaagttaaacaatatgccaattattcccgaaatggatctgtttacttgatgtgacttttagaatagaattattatattaaataatcacagagagaactaatttccaaatagtcatgatttaaaaaataaggggtgtcttacagttcaactcacatagccttgttactattaccagtagaagatactaatctttataatttataaaatgaatatatctgttatatattattaaaaattaaaagatgatactgttgtgttagttgtatccaccacctgaatatcttaaagattctttttggtgttccgtctttacatctcctatctgattctttaagccttcaatcatctcatcaaaaataggtgcaagatcccacttgttggatgaggaatatgaataaagcctatgtgcagtgtagatattcgcagatacctcatatcttcttcttccgccctccctatctttaatttttatcttgcaacgtgcctcttgaatttggggagatattttgcttagatgttctacaatattatgaaatttagattttacaagttctgcttccgtagaatcatccggcattcccattatataaatgggtatttcgcttgagtttgctctcctgataccgaaattatatccctatatgtaattattcctaatggcataccatcgaaggattgaactatcgcgtatgttgaatttgcattcaataatgactctattatagatatgaaggtgtcatctggtttcactgttaaaatattttttcgatctgccaatctgattatttccgtttcagatgctatatccagtgatccctctccctcaacagtcccattaggtaccaaggtttgtattaggcggttggatgttactactccttttattaccgtctttccatctgcttgggtttcagcaaccggtagatgatctattgattctttcatcattgtaatgttggcggcatccaatttgcctgtgggatctatgattattaatccctgagtcataatatcggatgctgacatcatagcttgatcctttatttttttatttaaaaatgcatcataaatataatttataattctctttgatgaaatttgtcctatcacctcttggctgtttgaatttatcactggcaacgatctcaatcggtacagactcattattcttgcaacgtttcctatgctgtcatcctcagtaagacttggaatagttacttttatggatgaggattttaatgattcattgtttgttgctaataaaatatccctgatgtttatacatgaaacggacttatcatctggtagttgaataaatacttcatgagcattttcttttatcattattgcaataattttgataatgctgcgtcctcttttgttaaaacaggattttctacaagttcctttatctccttaatgcgtatatcttttagattcatacagatttctgcttgtctcttgagaaatcattacctatacattacaaataataatttataaataagtaaaaaaattttaatttttaaatgatatgaaatgataacgaatatttgcctattctttggcttgtaatattctttataattgctaagagtccttttagataaatattgtgagtgtttatgagactggtctattctattcttttttgtgtgcattcagaaatgtaatagaaaagacattattaatgagatggttttgaacaagttctttaatatcatcatgaccagtcttattaatctcctctataatggggtagaattctgatgatttccacccaatgaaaatacttgttggaagaatccgatctgtaagtcattggtatgatgctgattagaattgtagaaaacattgttatcaaccatagtaaatcctctacttactttacagaagaatgtgaaataaaatcaatagtcagtttgattcgtcgcaatattttccataattttgatagatgaaacccgttctggtctcccactagataatcgggtgacagttgaccaaaaattagattggcaaaaacattaaaattgattcaataattagtatcgacatccaatgaaactcgtagtcgaagtacctgtggcacagaggaattatttatagtatgttttctcaaataacatgaagattattcaatggagatgtagatatataaaaataataaaagcagctcatttgtttgatggtattaatgaaagaaaaaacgttttcataggttttgaaaatgatgaaataaaatatgttgatactcaaaggcctagggaagaggatggagaattaattacagacggtgataatatgttcgtaacacccgcttttattgactcacatagtcacattggtttacaacgttctgccgaatatagcggacaatacgaagaaaatgaacaaatggatccttttactcctttagcaaatgcgttacatagtgtctatatggatgatccaatgtttaaagagtcgatagaacatggagtactttattcaggtgccttccctggcagcggtaacattattggagtaaagattgttctaataagaaattttgccaaagatattgaagatgctttcattggtgatatagggataaaagcagtattaggatttcatccaagaagtactaccacttggaaaggaaaaagatcatcaactcgcatgggtcttatacctctactaagagaaaatttaatcaaggccagaaagacacaaaaccttttgaatgaaggatcaaaaaaaagggatgatatcgatcccataactgaagtattgatggatatcttaaatcaaaagtaccccgtaatgatgcatgtacatcgagaagatgatgttcgaattttaattcaattggtaaaggagtttgatttaaaagtagttgcaaatcactgtcttgacgttcatagagtcgaaatttttgaagcattgaaagcaaattcaatacccatatttacgggccaatggactctttttccaataaagatgagttaaggcacaatagttggagaaacgctgaacttttgttgagatcaggagcaaaattttctcttatgagcgatcatcctatcattcttcaaagaaacatgttttatacagtgaggcacttgatgcgctttggactgtcaaaaccagatgctatttcaaaaatcacttcagaagctgctgacatcattggtgtacagaagataggtcaggtaaagccaggttataaagcatcattaatagtttggaatggagatcctttttcatttacaggttatccaatattagtaataggtgaaggacaggtggtatataaggactgaatttaaattttattatagtgggtatatcaggtaagaagcacatggtgcttatccttaaacatatgttctgcttgagtaacatgttttttaagaagaaatttctgcatatagtccagccaatcacgtactctaaccataatttgaaactatagaacttaaatttcttgaattagcttcccactgcattgcgtacaataagaggtttacaactatcagctattacgctactattacactacctgatatttgatttatcttgtccttactaatattggaccagaaattatataaatttcgatgtattgtctaagtgtctttaatttaggttttgattctttcatttgttatttttttctatgtagtctatttactttgtacaccattattacttatgcgagaatttaaaaagcgtggatatctgtatgttactatcatattttttgcagtttcatggctaatacatggggtaacagcattcaaccaatttgttgaagagcaaaatcaacatagccaacccatattaatgaatgttttctggaatgagtttattagacaaactacagaaaactggcaatctgaatttctacaactttcttggcagataggcggcctgatgatattatttgcggtagcatctccacaggatagactaggggatcaaagaaaagaaaagattttagagaaaatattggaattaggaatggacaagaaggaatatgatcgatttatgaaaagccttgaggaaaagtatccagaaaagtaggctagtggagacagaaaattatgcacatatattagctggtttaaaagacatatataatcaaaatattaactcatagaatgttatatagtacttaatggaggaggcactgtaacagatcagactatatgaggaagtttagagattccgtagattttttaaaaaaaataaccaaatcaatcatagaaaatattttagcttggatacaatggggagacttgtgtaatctgggtaaaagttaagtcaaaataaaatgtaaagttaggtatgaaagtaaggacgttactattctaagatttgccgccttcgcgtgctactcttttgcgggtttcttcgtccgctgcttgcaatcctctttcatcatgtggtgcttctccacctgctcttgctactctttctcttgtttcttcatctgctgaggctaatcccctgttactattgtcattattatcgtttttattgttaccttttgtcattgtaataattattaaaaaacagggtatttaatgaaaagataatgttaattagagtgtttactgctatggtatcataagtttttttgtactcagatttaagcgtcaggatgttaatcgtcaacgtattattaattaattgcgaattaggatagagcaagtattgctgattaaatactatgttagaccagattaagtaatgtcaaacaatagtgaaagcactcagttaaggaattctacatacaatgttctatctgcattaggtagagaggctgattttctgtattccacggttaataagtatatacaagatgctcaaaatgacggaaatactcaattagttgatctctggaatcaaataaaacaagataagcaaagacatctgtcaaggcttatggaatgccttgaaaaagaagcgaaagatgaaaagttgtctacatagtaaagtcaacttttcattttccttatattcgtagtttaactaggtcctaattgttactataatacgactaattctacctagtgtcgtcatatagcacttaaaagatatcagtacattctttcaatttagcaagatgaagaacaataaaaaatccatatcctgtcatagaatggattgtttacttaaagccgtttacagatgtacgagcgctcatcctatcacgattatgaatacattcaaacacatctacatataagacagatagagtcatagaggatacaactaagtaatttttatagaaatttactcattgttgctaagatattcatttataatataaccaaattcgaatctattatgatttcattctcttgcctctaaaaaatcaaaaggttgattaaattatatgataatgtatttttcaattttaccttctcaattcgatgctatttgttgatcggtgcaaagcggggaaaattatactgctgatcgatatttacattatatatcaacttgtttatgattaattgaaattgtctcttatagtttgtgtctgaaaactggataacagaatcacttattctttgcctttcctcattcccaacatccagaacagaggctactatttgggatgcttgctctaacgaattatactgatacattgttggaacgaactctgcttgtcctccaatgcttggtacaacaggaaccaaacctgcactcattgcctctactactgaaattccaaagtgttcgccctctcgaggatgaaaatatactttacctttcttcattaactcgagtagctcctcaaagctggcatttatcttaaaagttataatatctgaaacatctttatctattatgagcctctctaaactttcatagtaatcttgataaaatggttcccaactgcctactataatcatcttcgtttcaatcttcttttcctttagtagttttgcgaggtaaatagcattttcaattcttttgctaggttctattctacaaattaccaaaactaggttatttctatgctcagatgaaacttttgtaggggaagaaaaacctaaactatcgcgaatattattaactgctaccggtgggcttaggacaactgcctcatcaataccataagcctcaataattgctttcctactatattgcgaattagtaatcagaaatgaattcctaatcatcttatcataagtttcttttacccatttgatatagcaattcactttctcaagggtatcaattgttgaatccggatcagttcttttgttgacggaagacaaataacttatggattggtccgcgttgatgatagacactgcatttgactttagcgacgaggagtgcattctattgactttaaggtgatattcaaaataatttgaatccttattttcaataaatgacttagccgatggatagtggcaataagtaactactattgtctttgaaagtttaggactataatagggatcaatatcgccatgagtattaattattaaatcataatcgttatcagtaatattgctatcgatactttcctgatcaaacatttgtaatacatttattttccttatttgcttcatgatcgaagttaaatccttgccaaatgcattctctaatttagaaagatttggattctctagggtagtcaaatcaacctttattcccatctctactaccgcattcatcgtaacaagagtaaaacgctcgccacctccacaagggtttaaatttgaataaatgaaatttgctttcaattatttgcttgccaccttaattaaatgtggtcgtgaaagcagttgtacgtgaatgtcggtaaagacaaatagtttgcttgtttgaatcaaggttgttttttattattgataatattttatattgatgatacttttctacagccttctaagaatcagattaacgcccatgatcaagtgttaaagggtttaaatgggtttgataacgaatatatcgatttaccggtgatagtgggttctaattcataaactacgatattatagttttagacataattaggcttacaagacagaactacaaaaatgaaccatcgtataataggtatatcatgaagcaaaaaaataaggattatgttagagttattgatggactaatcctgctgaagtagttacctccgatacattaagatgatgcttttggatcgcgaagtttgttataatctgattgatatccattgcaacacccatgcggtgctattataccagatacttttccagaaacgtcaggaccttcatcagatacaatcatgcattttccacccatagaatcaatccagtatatacaattataacaaaaataccctgaatgtagatcagaatccttaaactcttcgcgttcgacataagccgattttaatttagattgcttttgaaatttagttatattcccaacaacatctgcggccttttcaattatgtttttatcagacattttactttatttaatctccttttcatttggtgtccaaagtgagcagataccatatggtgctattacattagatacattaccgtctacatcttgtccttcatcagtaacaattgcacagtgatttggcttcataaaatatatacaattatagcaaaagtagcctctatgtgtatcagagtttttaaaagcagaaatttctaaatatcctgaggataccttggtcaatttattaagctgtaatgcttcctgtggtattttttgggtagatttaaaattagatgatgtcgcactcattatatttcttataaaacatactataaatagataaaactttgatgaataaatgaaaaagtagtctgaattctaggaaaatattagaacaactggcaaatcttaatatagaaagtgactgtttattatagtttgactgatgaattttattaatttcataatcggactagaatgttagatatttaagcaaacaccaatgttgccttgatgccgttactttacttatagataacaacttactttagttttctttgattctagtgttattgttatacgttatataatttgttaattaagattgcatatgacaaattcaaatgataaagagtatgaagaaggcgcagccggcactaataaagaaaggaaaagtgatccgctaaaagaatattcagacaaagaacccatgacaccagccaaaataaatgcgggtgaacctaccgcagtaaggagagatccaagcgatcaaagtattgcatcagaaggtcaaactggaagtaatacagaacaagctcaagaagagtatcgcaaacgtggtatgacaaaaatagagtcggattcatccaaagattaatctaataattattaaatggaaagggggggtttacccctctacagttaaatttaaggaactagggaattataaaacatcagataggcaaggtctatatcaatttgaaatggtaaaacattgaggatagacgtcacatttcctacaaaaagtgaatatttgattctatcagtctaattaacattaattacttctaataaatgtaaacgtgccagtaaatttttacgtagtcgaatctactcttttggacgtagatattgtcagataagcgtaattataacatgagagatttactaataacgagataatttaagctctttaagataaacttagttacaaaaacaggaactcaatccttcatattagaaattagttttatattttatgtttgatttacctaaacgataatgccttttatgaatttttctagatttacccaggcagtacttatctctctttcagcccaaaattcttatcaaacatattgaaccgccaattaaaagtaacaaataattatcttaactatcctgaacaactgtttttctaaccttgtggatagctgaaattatatttaaaaccttaattgctactttatatgaataaaatcgagtgagcggaacattccttaaacaatagattacttaatgtagacaagatgagacttttatgcatgtaaaacaatataattgactttttatcttgtaactaatgatagtatcaacgatccaaagtccaactatgatgttttgaatcattatatagtatttgatgagtggagatatcataaaatcaagaaaaagtgagatatataagcaatgttgaataagaaaggagaaggcaagagacaatgttcactgaatccaattactccgagatgatccaaggattaagacgaagacctgaactaagagatgtcgggctaaacccattttatgaaaatcaaggaggatttttggtaaaagttcgtagcaataatcctaaaaatacattaattctatatcaacaacaaaaaaaagagcaagatacatttacaaatgtaaaaaatgatcaattattttcaaaattaataaattatactcgcgttttactggcggaatctgatacagaaatacttttactattcaaagaatttttcgaattagttggtattgaatcaatagcaactgacaatggagataaagctctgcatatcttccaagaggataaggaagaaggaaagaaatacaatgtagtcattttaaacactcagttgaaaggcacacggggactagatgttgcgaagaaaatacatacaaatagcccaaatcaacgtatagttttgttaacaactacaataaaagaagaattattacaagaggctttaaactccacagcaattgagaaaaaagatatccttgtcatgccattcaagctttcacaattgcatgcgataataaatcagtaagcaacattttattcattttgttaaaggtattcggcatgatatttcaaatataaaatcaaatgtttgatctatgagtatcttgaattagtaataaactttataatacatttttcgaaagccattttagataaataatatcttcaatcaagattccaatagaccttttcgctaaattggcaattgtgtacaatctaaattagagatgtaaaataatctaacttgtcaaagtttgtttaatcattggttttaaatccttaaaatgaatgggcttttcaaggacagcggatacgcctacttcctttaccaaatcctgatctagattttcctctactaaaaatccagtgattaataagatcttgacagttttattatatatccgtaatcttctagtaagttctaatccatcaagtccaggcatccttaaatccgtaattactaaactataactattaaaattcttagcaaagtcatcgatagccgcatggggatcagtaaagtacatacaattaaatccacttacctctaaaaacttgctatatagttctgcaagttcatcttcatcatctactaccaaaactgatggattagaggtggacataattatatctacgatgaacactatttaagattatgcgctagaggatctaaaattctaaataaatgggttattctatcaacagtacgaatttcaaggtcattaaaacgttattaattgactagaggcattaaagtaatattttaaaaaatctagtggatattgaattataatttattgtagacatgaattgtattaaatacaaatatgaatcaatagtaaaatttcgatttgaacagttcaagtaaacttgttgactctaaccctttcaaatgtaactagaatgtttgttctataatattctgtttctctacaaataaaatatcttgtaatctctattaccttttatctagtttatatctcttttattacacgagaatatctcaattgccagcaacaccctttcttttttccatgtatagatttatcttgcaagctggataaaattaaagtgttcaaatagaatgcatttagtaataaaagataagctaaaatttaatatctaaatgattgtcatttattcgtctctttatacaagaagtaccaattttgctgtatttgaggtaattgtttttgaaaaatctttataacagtcttcagtaagataaacattgatacttttaatcatactatctcttggattgcttgctggaattaatttgataacatccgatgcgttggctatttttcataaggaggatttccagataactaattttgggttaaaagatggtaatccatacatccaagtacaaggtcaagccggccgatcattttcaacagactgtggtgatgaatgttattactcttatgtgttcgtaacagatcaaggtacacttgcttcatctgtagccaatgatgatgacaccaaaccttattatagtgtagatcattttggaaacaaatcttttaaaatcggagactgcattatacataagacggctactggaaactataaattttcaggtaacacagctgaatatataccaaaaaacttgaaatttaatactgttttgaatgtatataccattgagataacgctagatgatcctgatgatagatgcagcaccggtgaacatgtatacaagatattctcttcaaaataatttattttaaaaatcaagaaattttttttgttgtattattaggattatgaatagtaaaaggccttaaggtttcccgatgtgtcaggacggaatattaaaaaacaatatgttattcactagtttcgggtagcgtttatggtaatcttcgctttggtggtttaatcattatatggtggtgaagttgatttgctcaattggcatgagccaaccaacaatcgcgatatatctccaattctttatgagttataaaaaaaaatttttgaaaaaaagataaaaatagtcctaagaatttgagtagaaaagaaggaaaggtacagcaatttttagcaattctataggcggcacaccagtgaaataataactgcatagtattaccatgcctatttgtttggatggattagaaccaatgctctcctttgactttagaaatatctaacaattcattatataagaacaagaactttctggtcatctggatatgagatttccattccttgataaggaattactttcccatactcagacaagattgaatttccatctagatcatgataaggcttcgtgtaatcgatgctttttcctctaggtaagaataatccatttgtatgaatactatccttactgcattaaaaaaatcaaaaatgattaacgctttttgagaattaatttatttgaatactcgatttaactcaacaatctaataaagttaaaatcagttgataaataatttttggtctcaccattgtacgttactatgactttgttaataaaaaaccctaaaatattgtgattagcagttcagtctttgtcaatcaacattacagacccgacattaacgaaattattacaaaaaggataggctggtgtcggatgagttgagtattggattgaggataatgctatttaattgttatattaattgtgaatcaaaatattatgattgttgcactatgtgggttggtagcaaatataaaatatgagtttaataaatattttacttaaattacccctaattacatttcgcaaaatctcaatgaaatatgatataaataacaactataccaataagaaatgatgatatgaatcgactgtatgtattttcggtataactctaatctgtttaacggttatatattgcactgctatattattaggagtgtcatcgccgtattcagtgatggtggtggacgatgaaccagagatcgcaaatctttatagagactttctacaaaggtctggttttgattcgacatctttcatcgacccgctacttgcccttgagcactataaccaaaaccctagtcgatactctcttataattacggatttgtgtatgcctagccttgacggaattagatttgctaaaaggatacgaaaacttgataccaaaataaagatactcttaagtacagcattttatttcaatgacatgatagatactgaagaatatagagaagccaaattgtctggactaattcaaaagccaacaaagctctcagaattaaaacagagaatagttgagctgttatcaaaatgaccattttaagcatttgctttcacataatttagaatccaatttatgtaaaacaatctgagtataattttaaaagttctaatcaatattattttgaaaatcaaacgggcctggtggacttcgagatgatatgagtcgtctaatgtgggttctaacatttcattacccatgtattattatatattgcaatgcatgttttatactaaaatctatgactacagtgatatccttaaagtctaaagatggaattattttagcgagtgacagccaaggcacatcttccaaaatcaaaaccaccataaaaaaagttttcaaaataaatagtcatgcaggtataggtgcttctggagatagttctcaaattgaattatttgttgatgaacttaaacaaaactttcggaatgaaatcgaattggaatcgggatttaaaacccaaatgtatagtattatgataaatttgcatagaatatacaactataaccactcatttttgtgcggatataatggaccacgattgttctttaccccaatctctatagtagccgtaaaaccaaagaacggcgattcatatctttaccgtatgggttttggaacaatgggaaaaaacaatgaaatatctccctatatatataaggtaaatagtgatcatgtgtcaataggttctggttccacatatgcacgcttgattcttacacaacaagacagactttattctgcaataaatatgaaagtatctgatttatcgacggaaaacaatgttggcatagcggcatacattattagtgaaataaagcaattggatctagaaacagggggaaagtctcagatcgcagtaattaaccgtgacggttataaggaactttcatatgatgagcaaaccaaatgccatcaaataatgaccgataatctttcctcttctttaaacgaatattattctaataaggataaaataagtaaaattgttaagtcgctttttccatatgagtaacctattttcaattggtttgtatttttgatcctaaaggaaatgaccaatactcctatttcctcattcgaaattttctaattgtctatattccagaatttgcccgcctgtgaaagattacaaattatttcagaatttctaaaagcttagcattatgccggtagtaaattctcctacattcatgatgtatataattatcgagcagtattttgttatagaatattaaacatcgtatcaattgtgaagcaatcaaggtatttcgaagggatattgcaaactccttattggtggaattaggttaatggtaattttttgattgattaatatcatttcaatctggcttaatcctgttataatatgatagtaaagataaaacgggcaaggcgggcttcagaactatatcagtcctcagatgtggattctaatagtcatagattgaaatctgaagatcgtaataaagattcagtttaatactatcttacaattagaatttcatgagatttatttaatatataaagtacaagtataatgttagaagtctttttaacagtataaaaaggattataagagttatagttgattttatttccaaatgtctaaatcatcactttcagtatctagtcacacatttgtcaataaactgcttagtttagataatgaaatgaacgctgagatttgtggcaaagataaaagtgctgatgaaatttatcagatatattttgatagattgtcattgtatgaaaaattatctatcctacctttaaatgaaagtgacaagttactattgcaggataagaaagaagatatctatgtagagttgaagttgttcaagtttaagcaagatatgaaagaacaattagacgaggtagtgactcaattaaatgatttaaagaaaaacttgggtctaggcgaaatgaattagtgtcttaattattttcagcaaaagttaacaagatcggggattaaatagtatgttgtctaaattgtactaccttatctggacgacgcactgatcaacaatctgtgataatccaaataaggtgtaataaggctacaatcatgtcataagtttacctctagtaggaaaataaaaacatgagaaggtctgaggcattctatgaaatagagatgccaagttcatcatcataagaaacaagacctttattgaaaccttattgcaatttgcataaattgtctttgagtaatgattcgcagatagataggaaattaattttctaaacgaatctggaaaatccttgttatagacattctctatacgaattaaatgggaacatacaacagaatattaattcagtcggcttcgaattcataaggtatatgggatctgttacctttatttattgtttgaattcgatgatttggttaatgaaaatataatttctgatgagcgtggcagttggggatcgattatatagccatgaggagttttaatatgaatgtaaattgggtatagggctagtttcataataataaattaggtggtaaagaattaaagtaatttattggttgttagtcatttataagcatatgagagatatcaattctatattgaataaagaggacgtcggctttaatgcaaaaaatatagttatctttgtgtcctatttctggagaacacatttctatgagatgtagtacagtatccacaaaaatctacgataccggctttgccatgacacatacattcacaattatttcctaatgaaaatctttgtctcacaaccatatgtaccatctataccttataatattatgtaatgatttggctttagtatattagttatatcaggcttgttttttaaaaaaagaatgttgtcaaagtccatactattatctatcaaaatagaattatcggatactcaatcagttagtatacgttataaatttaatattgatcctaatggcaaaggatgatcattccattctataaaaacttagattatccattgtcttttgaaaatcttcttcataaatatcagtgtactcttgatattgacggactgctattatgatttggttgcatgtagaacattcttgatgatagatcttatattctcctttactttttgaaaatgggagcgtaagattatttgaatctggattaaaatctgcattacaattaggacatttcatcttcatatagaaattaaagattatgaactatattaatcgatttaaattagctatttaaatattacgatagatctacaaacagtaaaatgatattggaattgaaaatttatctaaacaattattaatttagctctaaccataatttgacctcattattatgatccttatcttgaatattacttatgatatctaaaacctagggggggggggggttacagctgggttatccttgtggtcttcaatatattttacaatttcagcattttttttggaaattggtagatttttaacattttattaaatgactgaaaatccaataataaatttgatttcacaactaaccaggaaatattgctacttttagtttttgaacgatctcttcatttactttcccatcatcttccttttaccaaatctatttattatctaaataattttatctcgagtttgcttattgaataagatttttaccccgtcactatgaggagttactaatataattttttttgcagtgtctatagatttttcaaacgtatttctaataaaaatatctctgaatgagtccaattactatccgaatcttatttttctcaattctttttccagataattgaataattgaacaaatggagctggataccattgcttttggctccatggatatataattatctcttctctgatacagtcctcccattacttatctcactactttaatagattcagcaagacgtttttgaactaaatttctatctttatctttaatccaattattagatccgcaattgatcaaatagtaataaaggaaaattggtgaagaaagaaaaaggaaagttagtcaagtcttgctactggttttgattgatcctattcagtacgtcttgataatcggttaatggcacaatctttacggtattagttgaagatattccagattcgatacaaatctgttctacatcatgagcgctatttgctttaacgagaattatccattcgtgttctaaaacagacatataaaatccgttaatttcttggactccatatttggcagaatttgatttcagtttattgtatatctccttaaagatctctttgcttttgttattattgagaggacaagattctggactatgaattgcaaatattccaaatagtttatgtgatgaactcatcgaattttcaaaagaattttttatatataaatttaagccataataaacatacaaaaatcacaatcaagcgaactaaattttatatattcgaaaataaattctcgaaaggatgatatggcgtaaagtaattaaaccttctaaaaaaaatttttgaatactctaatgcattcaaggggatcaaagtatatttgaaattctaaatgatggcaaaactatctactatgatcgtcatttatttagaccatgatgtcgtcaagttacatacctgaatttttcatatggagaaacttaggggactattcagcattgtcaaatcttgagcagaggttaaaggagtcattattgttggatatactataatactggccctaaaaaagcaagagatatcaaacgggcccggtgggtttagtaatagatatattacgagtctgaattttaggtttgaaaaagacatgaactcattgttatatatcgctttgagaccatatttactgtaattcatctatgatttcaaagaataattatgaaggacatcttacggaagaatcacgatcaataaaactgtttttgataataaagcaagagatctagtccttataataaaacaaaagcaataaatcaatcaggcatattactcttcggtatacttattcataatcaaaagtaatgacttttaaaagataacgacaaaaaacccaagaatgtttattttcccaatgctattaactaaatataatcagaatgaattatcataaacatactatagtacaaaaaattagcattttaataatacccacattattaataatcttatttgcagtatctcttcccgttgtctatgcacagctgcaacaggggcccgtaggatctgtcccaccattacctgatagaataaacctttctatatcgaacataacagttatcgaaagccctacaggcttgacgggtatagatggcattgttttaaacaattcaactgaaaatgtaaaagatgtcaaagtagatattatcttatttgattcactaaacaaaacaatagaggatacaacccggtctattacatctccactttctacaatggaaccaggctctacagaaggttttagtttccttatgagtacgaaggatattgatcattatgatgcacgttcatacggtctaagaacagaataaaagacctgacctgaaggattttgaagattgaacaatagatttgttacaggttctcaacaatcacattatatgatattgtataattaaatcaatagaaaattattattaaatctgtatctatcatgtgaattcatagaccgaataattttacaaattattggtcgtcaactcagtatcgatggtcaacatagtttacgtgaaaacagcaaagcctttgtagactatagaaaaatatgtatttaattttgtaataacttgtaaaatacaagtcctgacgaataagtataacatatttcttgatacagtactactttgcatttaactttgttcaaatcttagatcttaatggcttaattccgtttcttccacttatactagtgaagccacagatttctcttcttcctattaccttatctaatggtctcggtacaaaggtcatcattctagcaaggaatatgccaaaaatggttgctagacctatattactcaatacgagaacaccaaacttgattatcttatccaactattccatctggttataaattttagtaacctaaatcctcataatagaacggtgacctataaggattagtttactaaatattttgtaaagttattttatttatataaaatattgaaatatgtatataaaacttgtataataatctaaactataatttaaactattgaataatgtagtatattttataaatgttgtcatactaaaaaagagtggctataagatgttttgtttggattttatgataatgatcttctctaggggggattatcaggaaaaatattactttcctagtaagactatatggatgatatacaaatatttttatgtgatagttgaataatacatctttagacatgacatgaatcaggaatttgtaaattatgtcgatacagttaaaatagaaaaaataaaagatggacttgaatggttttattcaaattatgaatcgtttaaaaaatattatccgtgtaagcatgttgcaataaaaaataaaatagtaatagattgtgatacaaacctagatacattactagaaagattgcaaataaaagattataatgactctattgctattgagtttgtttactcataatatggaaatttaatgtatcaatggcataagaaaaagaagattgtttcacaaaattatattaaaggtgaatctgttcttatggcaaagtaagcatagctaaaagaaatatgctgaagtttatcctatgaaatcctctagccctcccacatacctctagttatctataaattgtttgtatcaattctttcagatgttacttcctctgtaacttctttggtttctgttactggtttcttttttatggatacctcttctttaacatatggagttctagttacctcaatatcttctttaatggaatttttatttcttcttgtgatgtgactggtccttgtgaagtttctgtttgtccacctgcaggttgtctcctttcaatagatacttcttcgtgaactactggaacctcaactgtttttgtttccgttacaggttcttttgtaattgtagcttgactatcttcaactttttattttatctagtttttcttcagttatcggtaccgttacttcttcttctgcaccctctggagctgtagttgcagatttaggttgtgtcgacgatgatttagaagaagaatcaggataagagtctccttgatactgctcggttacctcatcctttgaaatactgaatctaaggatgtcaccatcatagctttggaccttatcttgaggaataaaaattttttttattgataattcctttctgaactagaacatatccatttgttgattaatttcatatttctaatctaccggctttgttaaagatggatctgctaaggagaaagccagtcgataaatgttggtatgagattagatgtaaaagctcagaataatagtgcacgttctcgtttagttcataatatcatcttaacatggactgtggatttcttttgttctttttgtttattgggatgatgactttctgacctttattttctttttttatagattaaagaataagaattacaccatctctgattgtatattaagtagttactaaataagatatctggatcggtggaaatcatgaggatatttaaatgggtttggtaaagtattatttagaaaatgaatggttttagtgtatagcccaatactactactaccaatagttccattagctgcaagctccagtagtggcccaaatattttaccattatctgtacctattcttcattttttcctctatctgctttcctaatttttggtatgtgtgaaataataacaacgaatccgattgaaacaagcgcaataaaataataattaaaaccaattgccattccaatggctgccgaaaaccatatactcgcagctgttgttaaatttactactttatgactgctctcttgtacctctgatttggttttaccttcaatctcgcctttgagtatcactccagcaccaagaaaacctattccagtaataatttgagcagctattcttgaagtagaggagggatctacttgggatgatatgaacgtaaaaatcattgaacctcctataaccaaacaatgagtacctattcctgcaggtttaccttttaactctctttcagcacctataacaactccagcgagtaatgtaataccaatatctattaaaaagtccagttcatttcctttaagaatagtctcaagcataaaatatcatgaagacaatgtcttaaaatattattaagtacaccaaccggcttaatttaatatagatatgaatctatattaaaagctgctacggccgaagttatctttataatttattgaatggattattgatgaaacaatttggatagattaagtttgctgtataattatattacacttttagataatcaccaattttgatacccgctcttgaaatacatgggaacgtactatttttttctaatcctgtgggcttcgatcccatgatgtatatgggatttgttaatattaaaaggtacttgagaattcatggatgattttaactcggactatttggaaaaacaatagccatggcattatttttaattgttactaattacaaatacaataaaagaaagtataggtacaaaccatagccaatgtattctaaagtttgttttatttcttttaatatacataagaaaaagagataggtcatatttagctatagaattttctttaagttaagagcctgagccctacatttcctacttttatgcttttcagtacaaatcaatagttgctgttgcaaaaaatttggaaatatttttattaattttcaataccgggataagaatttaaagttcaatagttaaaaacatgtaacatacactagaagctcttaaacaagatgcatctgtgcatctattatgagtctcaacattgcggtaattattaaattagagccggatttttcagatggaaatgtaagttataatccggatggaacattaaacagagcagaaactaaaaccattttgggacatcatagtgcaattgcatcacaagctgccttttatgctaaagtaaagtatggtgcgcgtatatgtattgggactatgggtccgccaatggccgaattggctcttgagcaatccctattattatctgacgccgaagaattacatctatacagcgacagatcgtttgcgggtgcagataccctgtctacagcagaggttctaagagcagggatatccaagatgaatgatggaaaatcaatggacattgtattttcgggatttagagcatcagatggcgaaacaggtcagaccggtcctcaaacggcttggaaattgggttttacttttttaggtaatgttattagctacgaaatagacaatgaaaaacgggtagtaactgctttacgccttgtttcatatggaaataataacttgatagaacaggttcgggcccctctacccgtttttattgctatagatccatcttacaaatctacttttattacagtttctcaaagattgagcgcatcaagatttcaaaaagaagctatgataagttctagtaattataaatctcttttgaaagtatttaatgccaaagaattgggagttgatccaaaattagtggggttgcctggttcacctacaattgtatacaaagtggaaaaaattccaaaaataaaatcaagtaggagtgcacaaaccgttgagaatattgatcctggtgaaatctctaacattcttgagaaaatccatgaaacaattacatgaataatgtctgggtgtatgagtgaatgagcgtgaataaaatgaatgaaaatattaacgagacaatagatcgtaatgcttgttcgacagaggataggaagaccgaggtgctagacaccatcgataaaaagaatgagaccagtaaatacagaaacctgtacgttattatcgaacagttagatggtaaaattgttcctgttggtcttgaaatgttatctgaagccaggaggcttatagacgattttaataaaaaatatttactaaatgagaaggtaattgcagtaattctaggtaatggtattaaacatttatgcaaggaattgatttactatggcgcagatgctgtcctttatgcagacgacccaaaactacaatatcatataaataaaatatacactaaagtaattgttcaaatagcaaccaatgcaaaatatgtcgaaaaaataacaccagaatattctaaacagtttaaacgacctagatacatgttctttgctgctgatggtacaggacgacacttgtcatccacagttctcgcagagctagaatctggattggcatctgatataaataaacttgtaatagaagatatcgactttagacatgaacataaaacgaagggacaaatattaacatttgaaaaaacactaatgatgtatagaccagatttctccggatttctttggaccactattctctgtctagataacaaaaatccagaaataaagagggattatcatcctcaagcctgtagtattattccaggtgtatttgaaccattagaaaaaaatatgtctaggactgggataattgaagaatttagtccagaatttgatacaaaagatcttgaaattaaagttctaagtagaagtattcttaaagacatgatcgattttggcaactataaaacaataataagttttgggaggggtataaaagaatctccagaacagaacataaagttaatagaaaaactcgcaaaattattaaatgctgaaataggtatctcattgcccatttcaaaaaaactatttaaattgagtgacaaaattaattcgcggtatattactccagaaagagtaataggaacaagcggtcaaaaagtcgaacccactatttatattgcgttaggtattagcggggccactcaacatctagcaggcatgaaaaattctggatttatcatagcagttaatcctgatgaaaacgcgccaataagaaatgaatgcgatgtattcattaaaggaagaatagaggatgttttgcctattatgatagaagagcttgagcgggaaaaaatgacacaaacaaaagaaggaggtagtgccgtagttggaacaagttgaagttgttataattggcggaggttctgcaggtctagcggcattaaagcatctatcttctatcggaattcagtcggtattgatagaagctggatttactataggaacaaagaacgtctcaggcggtatactctattcaaaaaatcctcaaattggtaaggtttataatgttgatgaaattttcgagaattttctacaagaaaaaccgtgggaaagacaaattacaaaatatatcctaaattgtgtatctaaagacaaagtcctgtcaatcgatttgaccgattcccatgaatatcaatctaattttggttgttctgtgttattaaacaaattaaattcttggtttgccaaacaatctttggaggttgcagagagaaatggtggagggatcataagtggagttcatgttagaaatattagttgggatgatgaaagaggcaaaacaattatacaaacagatgagttagatgattttgaagctaaagctgttattgcttctgacggagtaaattcagaggttgcagaaattacaggagctcgaaaaaaattttcgccctcagaattatatcagggagtaaaggttgttgtcaaactacctgaagaaataatagaagaaagatttagtttaattcctggagaaggaacggcccatatttttgctggcgacgtaactctcggtcacattgggggaggttttttatatactaatattaattctttatctgcaggagttgtatgtcattatgactctttgatttcaaatccaaccggaccaaacaaccttgtaaacgcattactaactaatccagttgtcaaagaatatatcaaagatgaagtagccttagaaccttattccgacaaaagtttgtctaagatggaacaattacgtattaaatttgcagtcaataaacagataaaaagatgggagaaattaaggtttgagtattattcgcatgagggaaaaaagagatttcttgaagataaggaattcaattctattgaggatgtaaagtcaaaaatagatgctattcacaaggaattgcttgaaaaatataatacaagatttgaaacagattatgtagaattagaatatagtacgaaattaattccagatggaaaacggtgtagaatgaaaaaaccctatatcaaaaacatattattcataggtgatgccgcaggaagaggcctattcattggaccacgaatcgagggtctaaatgtaggtatcgatgatgcagcaagagcatctaatgcaataaaacaagccttggagaaaaataatcttgatattacatcaaactatttgggtgagctttattcacaatctgtccaacaaagtccttatacaacggacatggagagaattgataaatattatatcaaaacaattgttgatgccgcaggcaagcaaattccatcgcaaaaaataggcaagtatggattactattcaagttattcctaaatgaaaaattaagaaatgtttctatcgacattgttaacaaaataggatataataatatgttatccttaatagaatcagaagagacatatatacgtactccaataaatatcgcggataaactcggtaccaaaatcatttctgaatattcaatatctattccagaattgtctaaaaggatatcaagtttaagttacaatgatgatccacaaagtcatatcaaagtaacaaactcaaggagcgaatttatgaaaaaaatggttacactgtgtcccactaaatgctatagtcttgaaggagaagacgtggttttacaacatgaaggttgcatagaatgtggtacatgttccctagaaacagaatggagacatcccagaggagaaaaaggaatacaataccagtatggataaatcgatcaatcggttctattgcaccttatactaaatttcgtcttctaatcaagtatatcttgttttattattataaatcttaattcctgcgtagcgagggattttatatttttgacatttcatcacattccatacaaagtattttaatggagagctcgaaaatggattgattgtcgattgcctgaacataatttaaaattaataacctcaggaagcctattagtcacaattatcgtagcatcattaatagcatcttctatttcccaagtagccttgtcttcactttcatttacagaactatattgggatgtaggggcgtctatgccaatggcaaggtcggaaattgctagtgctgtactaaatggcaaaatatacattattggaggatttgataacggtggtagcagtacgactactgtacaggtgtatgacccagtaactgataaatggactcaagcgacttcattacctcaaccattagaccataccgctgcggcatcgcataacgggaaactgtatgtcgtcggaggaggctaccttaatagagatgcattatcagacaaattgtacatatttgatcccgataccaacaattggactgagggagcaaatcttccgaatgcccgtggtgcattaactgctaactttatcaacggtacactttatgtgactgggggggtggattccgaaaaaacattgacaagtacattagcatacaatctatctacagaccaatggacagaaaaagcacctatgccaactgcaagagaacatctaacctcggcagtcattaatgataaattatatgttataggcggaagaaccaatggaatggcttccaacgttgatgtaaatgaggtgtacgatcatgttactgataagtggaccacaatggaaccaatgccttcaaaaagaggtggcttatcttctgcggcagcagaagtaaacgaatcaatttatgtctttggaggagaacagccaacaggcacctttaacaataatgaaaggttcaaagtgatttcaaatacatggacctctgaaaagagtatgccaacagcacgtcatggattggtggcagtagcaattgacaacaaaatttacgtagtgggtggtggaccacagcctggagggtccactagtaacctaaatgagatatttaatattagtataaaatagacatagaatgatatccacctatttgttttttcaaagtggacccgctgggaggaatggtgatatcggtctttaaaaagtagaagttatctgaagaataatgcttgaaatgatttccattagatttcagaaagaagatgagatattattcagaaattggtatttacagattatttaagtaattgtcaggtattctagagtacatggatgtcatcataagacgtctacaagacagcgatcttgaggaagcagacaaaatactgaggctctcttttgggacctttatgggtcttgctgatccaatgacttgttttggtgatgcagattatgttaaaactcgttttcatgctgatccggatcttaccattgctgcagaagttaatggtagattggtggggtttaattttataacaaattgggggagtgtgggattttttggtccattgtgcatacatcctgagttttggaataaaggaattgcaaatatacttcttagtccaacgatggatctgttcaaaaaaatgaatataagatatgctgggctgtttacttttgcccataagtacaaaacatgttcatctttaccaaaaatatggtttttggcctcgatttcttactgccataatgtcaaagaacataaaagacgttcctgaaacaaaagaggaaatagagaataatactacaaagggaaaacattttatcaaaagattttctgaaatatcaaaagacaaacaagtatctgttttagaagactgcctacaccttacaaacaatatctatgagggattggatttgcgaaaggagattagagcaacacataatcaaaaactgggagatactatagttttatacgacaatatatacagagatgaaaaagcatttgggttagcggtatgtcatcacggagcaggaactgaagcgggaagtgatgtgtgttatatcaaatttggagcagtgttaccaagtgaaggtgcaaaatggaaatttgcggagttactgtcggcagttaaacaactagcatcagaaaagggtatttcaagaatcaatgctggagtcaacatggaacgtcataatgcagtcataacaatgttaaatgacggatttaaaacagatttgcaaggcgtatcaatgtacaaacccaatgagcaaggctacaattcaccaaatgcatacgtaatcgatgatatgagataaacagtatatccctactcatgcatgtcataaaatacaaataatatacttgagacttaatttttttaacaactatgaatcctgcctctagactatcttatcaatcggttatacgcggatatcattctcaactattaaaaaaccatttgatctgtagtgcaactagatcatactagatttactattcgtcaataaactgttactaaaatgaaggcgggcccggtgggtttagtaatagatatattacgagtccaaatttcgaaattagttattctgaatttgaaggttgttggtatgggccgggtcggatttatgttgttaacggtacaaaaatagggtttgtgaaacgtgtttacggtgcaaggatatgatcccagaaattatggatttattgcaatgaacaataggaggactcatttgtcagttctttttatcgaccagatattaacgatattattaaaaaaaagataacctaggtattggatgagttgatagaggatcttagaggaagaaatcttaggataatatacttaacatcataaaggtctatgctgacctttgttataatcagattcagtggtacacctatagaaccaattgaaataaggtaataatcccgaatagtcgacactgtaattagtaaaatctatcaatgctgttgtacttttaattaattagttttaaactttataatgaaacaatttatttcatagatgtaattataaaaaaataatagtactggagaaattttaatccttaaagttttttttggtattttttgtagtctttttagaatcctttaaggaaggcatttttcctaggcgtctcttaccttgagaggttattgcaaccgatgatttatcaggtgccaacataatgaactcatctacaagtaagcattgcaaaacgttatgtctcaatcttacattgtctggagaatattttccacttacttccttatataccgcaatgaaatttacctcttcccattcgtctccttccgtagcatcatataatctcattaaaagcttctcagccaaatcttgaacggtttcatttgaaaaagtctcgatcaataaacctattctgaatcttatgattaaaaatatgtcgtttgagtaaaaatctattgcactttacttaaaaatatcgaaaactcaatatcttaatttaccatgtgtctctgtagttaagagaaaacaatagagcgaaatcaaaggacgaccgtattccctcttttgatgaatggtggatatttttttaaataccactataggtgacaatacgggtactctattgtaaatttctttagacatgatttttgtatctgaatacattgaattagaaagggaaggatggagatgattttttgcctggacattgcagtatcataaattcagatcatacaacctgggtataggaaaaaatgaatggagtgttggtaacgttatgggtaagatttcttatcaaattatttgaaaaatccatgccatttggtcaattagaagaatcataattaatttatcctttaagagggtttcacttgaagtcctagttattttttactacgatgaattcatttagattacccttttagatagatcttttctatatttgtaaacaagctccgccaaaggatgggcagaccacttttcagctatgactaacggctttgagtatgagataacggagtttaagtaatttatatcacagtttcagtctatttatctttcaaaacatacaatcaaaaatgaattatcgaatccacattgaacctaattttcgatttgatccttataaaaagaaagaggggttgttataaaggtctatagatttattctatcgaggcagagaccatcaatttattggagtatcttaaaatctttaaataacatattgaattgaagacaaggattcaaatactcgtctatcggcaaggatgccaactatcacatatgttaaatgattgaattatcattattttttcctggatttcaaaattgtttgtatacaacattttattattttggtaaggaattataattatccacttcataagatacaaattctttgatattcatgtttagaatgatgttatctccaacttcatatgtttttgattttggaacatcatatctttgtacataattcccaaatacaacgatcgtatcttttgtttccttcattataaagcctacaaagtcgtcatttaatgttttgactcctttgctgaacaatgaattagggtacttgcttggtaagctatggtcaatgtatgtgggaagctgtcgtgcattaatttcataatcaacatgtgacagaccatttctttttactagattctttcttgacattttcttaattgttagatccgttaacagatttctggccgtagttttaatctcagaaaagtgaatattatttctcccattttgttcttcatgtatgaccaaattatcaatggtctctttattttcatgcactatatagggagaatttaaaccccattacacctcgattaaatatttaataattgtcataattacatatatctattgtatctattaagggtatcaatcaatatctcgttattaatgcaatttaatcactattatatcataaattatgaattattccttctatagaatcattaaatagtcattaaacatctccgataaagaattagatcaagtacttcatgaattctaataaaaagaatcggtcatctaagtttattcaagcctaatttaaaaacgtataagtgatgactagttatcaagcgtcgaatcagttaggactctacttgttaatgattgcttctggctttcatattttctctcctggtaatttattttgtaaagtccatttagtatgttgtctaggggtgtaggaatggagatattatacttaaaaccaactagtatcaacgtcaggttaatgatcggctttcaaatttaaatgtcctatttaagtgttttcttgcccttttaagttcggtagagtacatcttctatatgtattctatctttgatgataaaaacaactacaataatgagaaggtagttattataggactaggccagcttggtcttccagttgcaaaatatgttaaagaacatggttttgatacctatggatacgatataaatcaaaaaaccatgcaatcagctgagaccaattatggaataaaacaagcaacaaactttggtgattttgacgtattaattatctgtgtatccacacatagaccagatgatatgtttacaccacaagtagatggtttgatgtccgttgttgaaaagatatctagagaagcaaagacaggtgcactaatatcagttgaaagtactataccaaaaggtacatcaaaaaaagtatttgaaaaagtagatcatagactacacgttgtacatgcaccacatagatggtatgcattagaagaagaaattcacggtgtaaatcaattacgtattgtaggaggtgtaagcaactgttgtctacaacatggtcttgatttttatgatgtccgaccacctaagatgatgataaaaccattaccgtcttcagtaaatttgtctaataatttacaagacttggcaagtaaaatggactatagaatcactacgactgttacagtgcccccaataaggaacctatcaattcccatacattcagtagcatcagctgaaattgcagaactaacaaaaatagtggaaaatgctcatagatatctccaaatagcatttgcagaagagctgtatttatattgccaatcaaacagcatccagtttcaagaactagtcaaatcaattaacacaaaatggaatgttgaaatccttgaaccaagagatggaataggtggtcactgccttcccaaagatacgaagatgtttgtcaattcatctagcacaataaaaaataagatacttcaagcagccatggggattgatgaggactatagagaatatatccaaagtagagaaaagtaaggagttagtctatttctcaagtaaaccctggactagttgttacatctatacaaatgtattataaatagaatatgtagcaattttttaacaagcaattatctgaaacctgtcaacattaaaatgatattgatcaaaattttgaaaattatattaaatgcacaatatgactccgattatctaacatacaagagaaaatacaatacattttcagtacaaaaagcaagggaatcagaaaataatgaccgaatagttctgctttcctcatatcaccaccatcaattagaccttttattagaaatatttttgttactaacaacaagaagcgcttatataccattacgtatattactatattaggagaatattacaaatgaataataaaaatatattaccatatgattggtttagcaattttttcaatccacttaacagcagaggattaattgatagaagcgaggtattcagggactttgaggacaggcatagagggatggatgccatgctcaatgtatttaatgacatttcaacgaatgcaccagaggaactagtaagagagtatgagacagaagaaggtgttaaagtgcgtgaagtaggtcctatagtttatggatattcaatgaccattggaccagatggtaaacctcaagtaagggagtttggaaatgtcaggtctcttggagaaattggcggcattgtcaaaaaaataggacaaaacattggtaaatcttcacagatatctgcagaaagagaaccccttgtggacgttaatacaactgacacagaagtcaaagtagtagttgaaatgcctggtatcagaaaagaggatataaaaataaatacatatgattctcaacttgagatagcaacatcgaaggatgcccaacgaaagtatcataaaaatattgaacttccagagcaagcagaaatcgaaactgccaggtccgtctataacaatggtgtgttagaagtaacttttaatgtgaagaagaaagaggcaaagtccaagagaaaagagataaagatagagtagaatcaatcaactcgtcgtatctttattttggtcctgtcttattaagatatataaataataggatttaaattgatactcaaatagagatcttattaagtggatttcgaatccgaaccttataatgtggattatttaaaaataaattttttattctgttgaatgcctatatcatgtcaatatttggcaataaacataaataatactatttaaaaaattaataccaaatgtcaaactctcgttctattatcgtcgtagatgacgaactagaacttgcatctctattcaaagcatttttaacaaatgaagggtatgatgtagtttctttcaccgacccggtattggctttggaatattataaggaaactgccaataaacattcgttgataatttcagacttgagaatgcctggtttatgtgggatagaccttgcaaagagtataagggaaattgacagcaaaataaaaattttcttgatgactgcttttgaaactaaagatttagaagatagagaagactttaaaaatgcaaaaatagaccgactgattcaaaaacctattcgtttttctgaactacgagaaatgattaatgatgcttggaaaaactacacatagatctatatttttactgcaatcatgtgatgattaagtaatttttgcctttgctcctcggatactctgttgaaatctttttcatgatatacgcataccctctttaaatcaatatcatatttagaaggaagcgataattcaaaatttacaaggtcgtctatgcgatgtttaaaaggaaaggtgcctttatcggctatgatcgatacaccggattttcccatcgccttagcatactccaccaaatttttgttataatcataatcagtatctggtgatacgttattacctatgtacttttttaatgaatcgacaattattagtgacttttcggccttttcccatttttctatatccaaagaattgtgtccttcagatatatacttttcttacagaatcttcagtttcatagaagggggctacttgaataacttcgtttctttcctcgattcctttcttaatatattgagaataaaattctcttagtattgccaagtcttcatatacaactaatgaatgaatcccgtaatctaattctgatatggtattggacgcatttgctgcatccatctgaataatgttattttcgaaagatatgtagtaacacctacctatcctatttgtgcagaatacattataaacttcgtcaaagttgcaagaaattgctttaaaaaattaaatcattctcttttattttagttagtgaagcctctttgatgtaatatatttacaaagatctgcttatttgattgatctgggcttggtggagtgtatcttagctatagatttattccgtttctcaatctcaatgatcatatgttgaacgttcagatattaatggttaaacagaataaaatgaaaagaatatgaggtatctaagaatttaatatcctttgataaagtatgaccggatggattgcttatcctctcttaatggtggtattgttatatgatacaagagacccaggctcaagttctttgttactaatgaattatgaatcgaaaataagacgcataaaactatattttaggtagtaaatgacgaaagaattacgaaaataaaaaagtagatatttaggtaataatacacaatctcattttcttacttaaaagaacaatcaatattgtaagtaatagggtatgataaatatatatcggatgttaattccacatttaataaaactatagatatatcagttaattaaataagataatcattttatatgatattttgaagatattattgaaccttaaacctccgtcatgaaggattttccatatattaaataacttgaaaagtaataatcaagaaaaaccaccaatgtttatcatagcgatatttcatatacaaataagtggctcggagataaaacttcattatatttgtgtacccacatcaaagtaaatcattttttcggtcggtaagaaaaataaccatgagtaatcatttttgatagatgtagttacctgctaccatttactttggtatttgttagtatcgaaccaaatctaaagccagtcttaatttggctatttcttccattagaacatcaatttcctccccatcctttgcatattttaataatctttcacaagcttgaatttgagctaacaataattcacctttttccagacaaagactatgagaagattcaatgaaatggtaggaaacactatgtcctctctctttacatccacatgttcttgcttctaccacatatggtatttcactttcaattatattcatgtctatatatcgcatagctgactaatattatttctttaatgtaaatgatattagtggaatcatatagattacaacccaattcgcctaaagagattaaggatattctgatagatgataacctagacaatgaccaactggtttgtgaattaatagattcggatgatgaaaatactatatctaacattagggaaatttttaattgctaattgagaattatttgaaagtcgggtcttgcactaacagcgtggaactagagacgcaagaccctcactatggaattatggtggaaggtgattatcactatcttgatgggtttaaaaacatcatgcattcgtagacaaccgtcactatagtcacagtgcacttttgaacaacaataggaaaacagcgagggctgtttcagaaatcaacctgagagtgtcatgaaaaactaccctaaccgatgtttttttgatagataaagtccaatactactatcgatatacaattaacatataggacttttaatgattggttgaacaaatgagatttttattatatctcaaattgacctatttttcctctagaccataataatataatttattggtaaagataataatttaagtatagaatgcagttaagatcatggataaagtatccagtgatcaggatgacaaaggtgcccttcataatgttgaaagctttgttttggatagattattaacccaacatacttcagcaggcggtgattattcaatcaacattggagaattgatggattcaatagataatacaatgtcccctttatttgatcaagctgttgaggatttgattgctcaaagcctgatacattcttccgatggtgaaaattatcaaattactccagatgggattaatgaactagaaaatagaaagagagaagcaataccactttagatctaaaaattacttttatataatctaaatcaaaagttaagacaattaaatatggtatgtgaatagaaatataatatcaagtaggatgaaatactattctcacatttttttgaacaaacttagttggaattaaattctattcgtcattcacttttctcgagtctatcattagccgctttgatcattttctctttctcttgattaagttcatcatcagttaaattaattgcagaaatgatagtagaactaatcgcattatcaaagtcttcagtaaagataattgcatgtgtggatgctctcaagatgtttattacagaattatcataagacagtagatttaatcttagttctttcatggggatgactgagccaagttcaactatatctaacaatgtcacacttactttgttttctgcttcgtcaattttatttactctaactagcattaatcataatatacataatcataactaatacattttttgtttggccaggtaggctataacctaagaaatgatatcagtaagcgagtaactcgaggtaaattttcttaacactgttgaaagaatatcgccgactcaactaaaatatatactatgaccctaccacacccccaaatgaattagaaaaacaggatgcgcctctctataccggtaattattatgtaactgctttcttctccctttgatcaaatatacaatcaagatggtttatgtggttatgacttaaattcactgtttaatttaatatggaaattaaataaaatcatacaataactaatccactaatagatcgactcattactatatattggtaactaatcctctattgtgtcccttctttgtatcccatttccaacgcataagccaatttttctcgtttatttcttcacctgcatcttttctgtattctatccattttactaattcaaggtactattcgaaagtgatgaaggtaaaatattcttctggatctcctgcatatacaatcacctttgctgccacaatatttccatctctcttaacaggtctaacatgaccccaccgtagataatcccacgcactgagccttattcctgatgatgccatggtatacaacaaagccttcatacgacgatccggatattcggctattttttgaatctctgagagagtgggtgctctgtcatcggcataccttcttgtttttggtaatccacgagttatccttttccatcctatttcgatatctgtcatctcacatagcaacttgatggattttacgaaattttttaatgttgcaggaaatatctctctcctttccaccctctctttttgaaattgtagaaagttcaaaatttgagaaaaagcccatccaggggtggttcttgatttatccacaaacaagttacaacgaacattcatgggttcttcattagatagcaattgaatatgattaaagaaaattcttaatcgtctgacatacgtatctcttgtaacaggggatctcattccatataaatacaaagaataagcgtcactttcttttggcttgtcttcttgctcattttctttatataattctgtttccaactacttttttctcactttttatttattttgagtcctaataaagtagtaaaattacaacgggcccggtgggcttcaggacgatatcagtcctttatggtggattccaatggcggtcatttggcaatgacgatgaatctatcaatatgcgtataccgttgtgtctcagtacgtcacaggaaatagaattaaatgtatacattatcttttacaaacgtttttaagatttcaaatgtctgttctaatggttgtaaagaactaaacataattaaagtatgatttccgcttttgttatctggccaatatccttctggacaataatcacatctagaataggtaaaattgtattcacttagtattttaattccattttcattaaacgcttgtctataatatgctaaagaaccgggatgcgagttaccgtcattatcctttgtgtcttcaacttgatttgtgggggtgtagaatcctccaacaattaatttgttgttaccgctgccatcgatattttcttgattgtttttgagcactgtaattgttccttcttttatttcataatcactatcagttattgaataatttccaacgggaagtgtaaatggttctgaattatttgtataatctaagataccagttgaaaatgatgaagcatcgcttttttcctcattattgacattgactaattctaaatcatgtggatggggggtatcccatggtgcgtcggcgtccaagaacactaactttgtaccttcatagataatgagatttgtaggaataaaatatgcattcttatctgtaattagtttatgctgctcctctttccaactttcatgtgcctcatttgcaattaacattacaaagatgtttgtgttagcaggtagtttcaacatctcagtggtatgtacggattctgcagaaggaacattagaataatttgtagtaacattagatgcaatctcttgagcatttgcaaaaaataacttattaattgcattactctcaaaacaaataactgatagtgccgatacagccagaagagcgaataaatacactctgagtatgttcccgttagattccatatctataagatagagagtgcattcataccttatcgtatttactatagtctattgctaaaacgattcgattcaaatgaagatgcatttgaaaatacgcgtgcatcgataaatgagcgaatatgttttagatttacaatgatttgtgtttcaacttacagaagcgtttagaataagcatgacggtggacttcgaatccatgaggtatatgggaaatgttaattaataaggaatcagttttgttattttacaaagtaacttaatttacaacgggcccggtggtttccgctgtattttcacaactaaaaaaggactcgattatgtaaaccggatacatacttaaacctttttcgatttctgtaacgaaaattaaatattcaaaatgattacttcgatactacgagtctaaattcaattttattataaaaattatttttactttgtagtgtatttacttgtcaaataattttcatacaatcgttcgaattcaccgagagaaatatctataattatagttcttggggttgtgacgccatcaaatttactacaataaaggagcgatagatagatataatagtttcctaattatttttatttcgcgtcgaattagaaattttcttcatattctatactactaagaattgctatgaatgaattctcaattcttgcacaagatattatttattttttcaaatggatgacgttcctcccctattagataaaaagtgaaaagaatatctatctttgagctccactatcttgcggtaggttttcattgttactatcctctgctgtttgtggttctgagactgttggattttgtggtacaacattcatcaaaccaggatttgacgggttagtatccgctgattcactattttggttgtttgatgaatcttctaattgttctaacacaccgacattaccaggtggaacacgttggtcggttaatggtgaacttgggtttggttgttgttcatctatagcgttactatcgtcatttggaaatactgattcatctgtcgtaggtcctgtgcgatattgaagttcaggttcggagcaattaatttttcctcgacttcctccatcctcacattcagaacagtattcttcaacacttcctcccccgaatcctgtccctggtttaacgaaatcgaaccaacagcattcaactatttctagaccattcgcggattccttacctgtagacttacatgttgtttctttatcattggatttattgggaactgcatcaacatttgacaatgtaatagatagtaccaaaacaatagtagctatcatagttactcttttcaaatatgtttttgcgcttgtttgggcattaataatattattcatatccttgactattcgaacaagcatatgaggttgaccctaaaattctaaaactcttgtattctcatagtttaggaattattattcattcatatagtcaaattagacatgctagaatcataaaccaacagtaatagaacataaaccctttagtccgtatgaatactacagacgtctcttctctcgaaagatgaggttcaatttcttcaatgccaaaaccaagtatccaagtcatagaataagaatttaattggcttattttgacaatgaatttctaattaaggttattctcaggtaagaattcatttacataaagatcaaataggagtctttttgataatctgtaattgacccgatgccagaattgtcataaaggacttaactctagctatattagattgggttcaaaagaatcctccaagaaaacaggactttactgtatgacttgcgatatttactattcccctaacctgacaaaacagtatactgtaatgcaaaaacagtatacacttaaaagttcaaatcaaccttatcttccaaatcaaacgggcccggtgggtttagtaatagatatattacgagtctaaaatcatttcaggtaaaaatctatccagataactagtgtttgactataaaaatttcttaaacggatagaatagtttgaaaggatcttaatcttaaacgttttagacattctagtgattagttagccttgtaccgttccattgttttctaaatattcttgattttaagcgggcgtaagtgatctgtaatcactcaaataatctagtttcttatattatgtcagctcgacatttgtgcaacttacagtttcaaacatgccttcaaattttaactcaagaataacttgtgaatactttctttggtaatattcaatttgtacaattcgtttccttttactgcgaaaatctgttgatgggcatcaaatagcactataatgtcagatacagaagaatttaacagatcttttattttgtatggacaaaatacgagaccctctaacttgttctggttataagcgctttcaatttcaatagtctctttaatcgaaaactttgcgatatcattaagcagaaaatcaacacaacataattctttatttttggatttctttttaatcttctgcaatatattactaaaatatttcataacatcaccatgagaataatcaaattgtgtactgttatggtctatatcaatccaattcaagtctttcaataattctacatagttttcatttgaaggtggaataaaacatctgaaccatttgttattactatttgtaaatatatctagggattttaacaagcgtgtcaaatctttatcatcgtcataaaggatcaagtggtgtctctttggaatctctttttgttttttaatccattgatctacggcatcttttactatcgagtttatagatacccccttctgtctagatagatctcccaactgtgagtgagtgtcattatcaaatccacgaataactagagtatgtgacatttacttattatgtgactactataaatataaatgctagcacgctagcgatattagcaatccttaaataatgctagcgtgctagcattattatgaatcaaatatcaaaagaaattgatcaggaaaaattaaataaatttattgaaaaagttgtaatcgattggggtgctgcaggaggcgtcttcaatacattcgtaggagacaagttgggattgttcaaagcgatggcaggagcaggtgaattgacacatgagcagatagcagaaaagacaggaacacatccacggattataaaagagtggctggcaggtcaggcagccggagggtatgttatttacaatagcattaataggacatactctcttcctgaagaacaggctttggcactcaccaatgaaaatagccccgcgtatgtaacaggtttctatcaatctttggttagcctttttaaagatgaagaaaaaattattcaagcattcagaagtggaaaaggacttgggtggggagatcaccatcattatctttttgaaggaacagagaaattctttaaacctaactatgtggccaatctaacaaatagttggattccttcgcttgaaaacgtagaacctaaactcaaaatcgaaggagcaaaaatagcagacgttggatgtggacatggagcttcatcaattctaatggcaaaggcatatcctaactcacacataataggatttgattctcacaagccatcaattgattgggctaaagacttggcgaaaaaagaaaatcttaaaaacctaacttttgaagtggccaagtcaactgactaccctggtgatgattatgatttggtcactttctttgattgcttccacgatatgggtgatcccaaaggagctgctagacatgttctccaaacaatagagaaaaaaaatggtacttggatgatagtggaaccattcgccaatgataaattagaagataatttaaatccgcttggaagagtgtttttctcagtatcttctgttgtgtgtgttcctgcttctttaaacgaaaacggtccaggtctgggagcacaagcaggtgaacaaatgataacagaattgataaagtcggtaggtttttctaaagttcgaaagtccactcaaacaccattcaacttgatctttgaggcgaagccttagagggtggataaagccatgtcggctacaaataatgaacagtataaacactacgaccaaacccttcaatcatatgatttggatacagccttaccccgtatagttttgattcacggtgcttttagtgatggaactatatggcacaaggttgttcctattctaaaaaaagcaggccataatgttagggcagtgcaattacctctacattcattaactgatgatatatctacggttaatcgtgcaatcgatttaatgggtgcaccaacacttcttgtagcccattcttacgggggatttgtaatgactaatgctgctcacaataatcctcgtgtaacgggtttagtttatgtcgctgcatttgctccaaaagaaggtgaatcaatctcagattatattgacgttaccaagttgccaaaagattttttgattagtgatagtggtggattcttgtacttgaatcctgtatttttccacggtgcaatggctcacgatgttaatccttcggaggtgaccatatggaattcagcacaaaaaccaattaaccgttctattcttgaagcaaaatcgggtccacctgcttggatagatcttccatcatggtatcagatgtctataaaagatcagttaattccactacaattacaacagaaatttgcagatcaaataaatgcaacaactatatctatcaactctagtcacgcatctcttgtatctaatccagataaaatcgcggactttatcatgagggctgcagaaaatgtacaaaaataatagatgaaagttgtttcattatccttagtccgagtcgctaatctgagaacttgattattctctagattttttaatcaaataaaaattattattataatgtaaaatgggcccggtgggcttcgaatccatgaggtatatgggaactgttaatttaataaattataacttggatgaaatcaaatttggacctttcctaatatggtgataaaattaattcaatgcttttattatattagaagagatcttttctctactaatttgcctagggaagcaataatcataaattggctggaagcaaaaccacattgataggtttggttacttcctaatatccctaccttatttactgttctattttcaacaagagaattaactaatatccctttgaaggtagggctaaggctatgaaaaatattttcaatgtaaaataaagtggttctgttcgcagatagtttgatgatacaaataggggcataggatgtcttttcaaatagaattataatttctatacatgttcagtaactgtcttgcaaaattctcgtcatcttcatccagatgaacacctttatttacaaaattgcgattcgttagagaaacttttttgtctaatgtttcaatatatcctcttaatacgagaatcttaaatattttatctaaaatttcattatctgcattttttttcataaaagtttcatattcatctaatctcatggttgttattcctctagacttaaattcatccgttaagtttgcatatttaatattagctttttctattaacagtttgatttttaacagttcatccatattattcaatattcaatctatctcgcaacctgtgtttaaagattaattttgaactaatgacgatggtatttagttacattcaacttgggaatgctctagtaaaaggcttgacaatttttttttcgctatctagtgtttgttctaataaaatagtagaattacagcgggcccggtggtttccgctgcattttcaccactaaaagaggactctaattctatgaataatgaataaaataaacgtttcatctaaaggaagaaagataatattattaactatcggtatattctaaaatttcgagtgtaactaatttttattctccctttctaaatttattatggactgcgtaaacatgaattttatttttgaataatgacactaattcatcgctaaatcgtgatcctcattgaaataattagtgttctgatattcaaatccctttatagtatgtcatactatgtatatcatgaacttcggattagtcttattacctatattcttcttatctatcgtgcaagttgcacatgctcagagtcttacagattcgataaataatgcagtaaataacgacattgcaaatacatttgactcgataaatcaggcctcgaatagtagcaataattccctatctggaaatgatactggctctcagtctactacaactactacgactacaagcgggcctggcaattcaaattttactactacaatgaaaaccaacagtcagtagtaggttgaaaatttatttctgattgttatagcatacgtacatagattttatttatatttcattgatttttctcatatcataaacaagtatacgctattcaattctaggtttaaagaaagccaaaaacgaatgaaaagcagcgttcattgaagccaccctcaaggtatttgaccttttgatcgaaaatataaagttgaagaaactccacaacttaatactccttaattatgcagctaattctgaatagtccaggattagattctatgttcatagaaatgccgacctaaaaacaatcattatcgaactgcaaaaccagatatttataatttttctgaaaatggaaaataatactaacaagtagtgttattagtattgtatcttgacagcaaagcattttacaaaagaggatgccaaaagaattggtgagtctataggtattgattggactaagtttgacgtagagcaatttagaatggggttagatgtagaattagaacacggaagtcgcgaattatcaacgaatgtaacaaatgatgatgaaataacgactggaaagattgcactagcacatttaaatgaattttctgattattatacacgactgcaaaaaatggaaagtcaagcaaaagaagagcagtcatagagccattattaataattaattttaatttcagaaagactgatcaattgtacggtaattcctaatgtatttttataaatatttatacaagttttcaatattttcatatgaaaaagatcaataccttcaaatgtctttaggagttggtcagcatttaaccttacagaagtaaagaacacttcttgacttccagcagctgatagtggtactcaataggacaacacctatagcacataatattacaatgctaagggacaataatagtacattatttacaggaccatttgttaccgctggcaaatcattgcccttgaaattaataaagagcaataataacgaaacaaacctatatggtcctgatttttgcatcactggggcatatcatatcgatgcaccatttctagaaggtaatggaaactatactataagaacagatgcgacctcgaataattctatacggcccaaaattcccgagtgaaagagttcacgtaacgtactgtgaaataacacagtatgatatcggctggaagcgataatggcatctaatctactactattatgactactacaagtcgatcagtcaaacacgaaaagggataatcaaataagccaaatagattgatttatgtaaaaaagcgtttctaaaactatgattgtcgaatgatatatcaaaatgaattatgacctgtctccattaactacatggcagtgtatcaatggggactagtaataaagaaaccattatacaaaatcctatagaaaaaaatatttctatattggagaaaacgaatttttttgataaatagattttgtgaataaagaatgaatgttactagattaacatttatgcccaatttgtagttctcattgatcaaaccattagaaaagagttaatttgattccaaaaatacgataaagtctgtattgttattaattatagctctaatgtcataaaaatgtgtaaaatgatcgattgtagaattacatacatttgaagtatcccatcgcaatacaacaaatggaggaggggggtatagattcgcctcttattacacataatggattaatattagattgagcatatatgccgtcaaaaagaaagggcagacaaactgttacactactggtcaaaaagagaaatactaacacaattatatatcgtatcattaaactgctaaattaacaaacaaatattatttaaggtagctttgtctcagctaaagcagcgcggtataatcgatagtgtcctcaatataataatagtaaaatctatctcaccaaaacaaatactcaccatattaaactagtataatcatctgatagaatatgaatagattttttattaattattttattacaaaaaaaagatatattttattggctataattgaagtgttcttgtttgtagcatatttttatattgtttcaccgtcaaacttcgggtctttttctgacacgctaagatattatatatctgcattagggacattacttgcagtcgtagtttcatttaacactctagcattacaaaatcaaatgaaaaaccttcctaaagatctatcccaagtacaagaccaggtcaataatttgaatgatttgctaagacctgttcaaagtataaaagaaagtaattctagatcttctatgaataacgttaatacaactaaaaattcagataagattaaaaacattaaattaaatgataatgaggagaaagagattttatctcgcgctgctgaaaatttaacagacgccgtcaggggtatgattatcatagtcagacttttatcaaaacaggctatcgaagataaaagcaatttaaaagagggagaacatgataggaagttatcctctatatatgatggcattattacagagtgtaactctcgattatctttatacaaaaagaccccacacattttctccgttatcgtcatctctactacagggttcattcagagactcaattttagtatgaattcagataaagaagataatgcaaaagcagtttatgaatctctgaaaagactacatgttttaaaaagtattggttattctatttttattcgaaatatgctagcagatctatctaaagaattgttaatttcttccattccagttatcacgtttatcggcttgatagcttccatctctaattatgaaaattacgatatattgatgttacgagttctatttgcaattagtattacaatagcatctattccatttatactgctatttattagaacaatgccaatactctatctaattaaggcatcctctacaattcctttttctcggtaatacatgttcgaggttctaaaacggaaaatagcatcaattcaggtcaggattgtagagtgtgttaatagcgacctccaaaaaaatcgagcagcactcttctgtaatcatctagaattctactattataataaatattagggtatgtatttaataaacaaagataattcataattcgtataagtggcatcatatgaattatccaacattcctattgttattcgttctaaatggaaggtgtttaccaagtctattctgttttatcctgttctatttgcagttgctgcattaatactattcttaataacatccttggttgacaattcttttcctaccggctacagcgttgatatagaatacgtggatcctttagtatttactggaagtcctggtgcggccagaagtatcctgtcagctatagctactggatgggcaactattcttggagtagcattttctgtaaccttgattaccttgcagctttctgtttcaaaatacatatctcatttagtaaatcgctttgaggaagataaaatcaatcaacttgccttgagttggtttatctttactgttacttattctcttttggttttaaaaactgttaggaccggagaatcgtctataaatttagcatcaatgatgaatatgtctagtttgtccgtaagtggcaatcaacaacttgagttatccgtcttcactccaatcattggagtaaatttggctataatcatctctattgtagggttgtttatgcttatattatatcttcataatatcagctcttatcttaaaccaaatatactcatatcaaagcttattgatcaaatcctcaatgccctaaaaccatatgagaagagaacgtcaagccaatcatcaaatgacaagaggatttacaaatcaaaaatacttgaaataaactctccccgtaagggcctacttgcctttatagattggagtaaggtttcagaaaatctaatggatttagcactaaagaaacaaaagaatctgtggatcgattattctaaatcaattggagattggattgaagaacaggataacatagctattgtttacgaattcgatgagtttagtacaagtgagaaaaaggcctggagtcagatatccggagaaaaacggatttccataggaaacctaagtcagaagaaggatagaagaaaccaacacaataaagccgatatcagcaaaaccaaacagaagtttcttcgatgtatggaaataactgatgatagagatttagcacgtgatccattatttggtatagaagtactaagaagtgttgctgtaaagtctgcagaattgggcgataccgatgtaattaaatcttgtataacaggtctgtttagggtattacattatgctctcatacataaagaaataattggtattccattcactttaactacagaagattccaagagaacggttaataagataaaattccaagaaatggaaaataacaatagcgaagaaaatcatattcgtacaaacaatgaatcacttcagacgtctacgttaaaagcaataataaatccaaaggagatattattagataccataattctagtagaattatcgaccatgatggacaaaattctaacaactagaaacgttcctcttgtttatcatatggttagtgaatacattgcacagtgtaagaaccttgttcgtcaagataaacacgaagaatttagagtgctcacagactggtgctcgggtcagctatctttggttttaaagaccttcccaccacatttaacctcttcctttattaaacaactactaaacttcaaaaaggatttagaaaatgatcagcctcgatttgcaaaattatttgacatatatatgaaggatattatttctaggccatgagaaaagaaattcaaaaggaaaggagaaaggaaaaccgagacggactggcactcaattaaattaagtcagtcaattaaagaagttatagaaatcaatttaacaagattattaaattatcaaaactaggaattttagatttaagaaaatgcataactaatcaacaagacatcttttaacattttatccgctaaatttacattaatgatggattgttttcctaacgagatacaatgttttaatagcgaagatgatgacctcaagatactatttgaataacaaagttaataatatcaaatgattggtaaatattaaaattatatatcgaatttatagataacatacaagaatatattagaaataattccctcttttcattttggtagttatgtatcagtatattttattatttttacctatatgataaatttgctaaacaggaagccggtgctgacgagaccaagattatgttgtattttatgtaggacgttgacgagtaatctcttttaagcaatattaatcattagcatttacagtacatgttagacgccatcctaaatgacattctaaaagtttatggacaagatgaggttgatgtcggaatagaaactggtggtgggggcggtggaggagagccatccatagtgggggaacaatcagaatctgcatcacctcttcgatccacagaagcaattgcaggtattggcagttattgggatagtatcattttttccattatagtcataactgctgctatagccgcttattttgtcatacgatttttcataaacaaatcggccaactccttaaatctcgatagaagacaattatccgggattaattcaataactaagatggctattattgtaacagccgttatcgccattatatttcatttctcttcattaagcggtgtagcagctggagcaattagcgtggcagctggaacaattatcggtttttcttcaagaaatacaattagtaatgctattgcggggatattgctgttatccgctcgtcctttcaaactaggcgatagaattagaacaactgaggatgaaagcctaatcggagacgttgtggaaatttcattgctatatacaaaaatcaaaaccataagaaatgagcttgtagcaattccaaatcaaacactattacaaagacaaatagtaaactatagtggactggatgtcctttcaattacggtgaatgtatcattaatttataataacaaccgaaatctaatcgaaaaaatattgatagattgtgcaaaggatacggaaggaatagtaacatcagatgattttccttctgatgtagcaaagacttctagatctttccatactgcagataattttgtaacagatccgtttgttttacttgtaaagtttggagattatggtgcagtatatgacctcagggcatttacaaacaaaccaagggaatttctaaaaattacttctgagattagaaagagaatctatgattcatttcaaaggaatggtattgatttaaccgtcccacaagcacaagtatctttgcaaaatgatattgacaatgataacaaatttaacaaaagtgtgacagacaagataacataaacaatcttccagagtttaaagatgacaatctgaatttctgcataaaaattatactaacaaaagcaaattgaaaagcttctgaaaaaccagattattatatatgaaacaactagctttagcaaatagccgacgggtcattcttttatttttagtaacctaatgttttgcggtgtatggttgtaagtgggcatatatacatagagataatctctggtgttatatgtaccgctataaatcgataattatattatcgtaacttgttgtttccaaggacctaatagtaataaatattcgaattcatttaataaaatgttaaacttgagcggctgttaacctatcactgtacatttactctaaagatgtatgaaacatatcctgagctttccaaataattatctggacttggtatccaggtcgctatagtaaggataagatactgacctttatccaaatctataatgaacctatctgattttccatcctctgatatcgataagaccttaacttgagtaccatttatgtggtaagctgtagctgatagagtattgggttgattttcaggctttggatttccttctattacaagttgcatctgttcatcttttgaaatatttatagtctgttctggaattatagacgtgatgttggaactattgtttccaaaagattccaggttatcattaacatccccgtaagaaaatgcagctgatcgtaattctccaacataggtattgttatcatgttttattgaaatagatggagcaccttctgtagtactaaatggattgcgaggttcgggatttggctggccaacttgaagagcggatgttgtattctctttgtaaggaaacgatgctataacagagattaatacaacatatgttattattagaatagcaaaaatcctcttttttttcacatatcgatatatttaagaaagtatatattctgtaataatttgtaatattttgaagctttagtggggtatcatatctattcctaatctccacaaccttatccctggttaccggagacctcattccaaataaatataaggaatatgcacttccttgggtcctattttccactggttcatgttgtaactctaaatccaactaatcttttctcactctatatttattttgagtcctaataaagtagtaaaattacagcgggcccggtgggcttagtaatagatatattacgagtctaattttaaaagtaaaatacattaatcaaataaaaaaattatttaattcaaaattattgcgaatttatttctccttgcagacaccaggttttccaggaacttcacctgctgttccacccttgcatcctaccacaacaagttcatctgcttcaatatctactgaactatctgtcggtgtgttactgcttgtagattgatcgtcttctttgcagacaccaggttttccaggaacttcacctgctgttccacccttgcatcctaccacaacaagttcatctgcttcaatatctactgaactatctgtcggtgtgttactgcttaagaaattactttctagaactaacaggcggctgtcgcttgggttatccaatattatgatatcatctggaaaacaatccgtatctgtttttggattacatccagttttatcaggatcatttggcttagctgcgaatatatcacttgtaggcaatacataacatgttagtaatgcaaatgtgactatcatagcaattattgcatgttcgtgtcctttcttttcataatgttgagttgttattttgttactcatatcatcaataaggaataaaaaatatattggatttgctaacaagttgcaatactctaatattctaatacttttagaatggaaagcaaattataaaaacatcataaaactccatccatggtataatgattattaacaatattcatgacaacctaagtttgtacacgccttaggagttgacgaaagaatgattgagttagatagagtagtagatccaattagattttgaactattgactttaacttaagcgtataagtcagagtaggtccgaatcgaacttatattgcatgaatcaaaagtaagaatatttcttttattttgagtagaatttaagaacttttgtaaatgcagttatctaacggggcataagatattggatatcaagtgaaaaatttccttaaggctacagagcatagttttcaaataaatactcattatcaattgtagaaaaaggtttagggacacggaacaataataatggaagcgagcgacctaccacccatcttcgaatctatactcaaaagatgtttgagtgatttcatcttcaacaccgcaaatctctccgttaacaataatggttttttccaacttgaaatcatcatcttcagccgcagcatcaccattaccttcgccttgtaatcctatatagggatcttggggcataactaataattctctatttgaatcttcatcagctattttgaattaaattttctcccattgcttcatgggtgtttaataccattactgatattgacccagttattaggaacgctataaaaagaaaacagcctcctgaaattgtcattatgtttttgtgagttatgatttttttcatactgcttcttgataaagaaaatatattggattttctaactaggtgcaatattctaaaactctcatactattggaacttaaaatttataatggcaagtcacacgcaaagacaaggtttgaggcggtaaagtatcacatggtctttgtaattaattttaaatagatttcatgttatttagtatggtattacattatacgagttaataaagtaacgtcatcaaaactaatagtgatgttataatcagggagaatataacttttgtaatatgaattgaacttgtttattagatattatttcgtccccactaatacgataaaactatcattttcaaatcttcttagactattagaatattgcaatttaaggataaattctaaataatttggctttctatcaaagtgtatgagtaaaagatcacatattaaaatgaataaactgaatcaagatgggaagctatttcatattttcttatctgtagtaacagccctaactcttctagccaattccccaatgattatggatgtagcaatagcaactcaaggtgaaaatcagagtaattttattatacgggccactctggttgacgatttggatattgatattgatcacgttttctctgatttagtggatatatacgtaaaagagcatcctgaatatggtcattttaacatagatttatctgatgcactatatagtgacacatctaatggagaatatacgacagatatagtaatgccatctggagtgttagaggtaaacgagacatttcacatctgtatagaaggttctgtaactggcgggggtaatggaatgatatgttataatctcttaaataatcctcaacaaggaccagaggagataacaataaggatataaatttgaataatctaatagatgttaacttgaaagtattttttctttattgttcgcattaatctaaaaaagtaattggatccaggttatttgtttttcgatttctctatcctgtttcacctaactatgcattgtcatttatgatggttattaggctggatattttttcgtatatcattttttcagccattttttttgtattgatacatatcgagattacatttgtctttatcgttataattttctcgaataaattttaatctatacactttatagtgttatcttaaaagtttgcctttggattaattcttaatctttgtctgaaataacctttacatattctcctttttccgttcaatacctatcatactccattattctacttcgatgaaatttttccttaattttactatttcggggttttgtccttaacatacttttacaacaaggacatctagtatccttatcccatttcaaaaagatttgacaaatttgacatcttttatggttagatagataatgtgaatagtgactatttttaagtgatctactagctttgtgtatgatacatttacctttacaatttaacataaataaatagatcaagcttagaagtcaatgtatttaaaaaacctataaccaatgcaattgacttctgtgacaaaacggtcgacattagcaatccagtagaagtccagtttcttatatgctatttaattcaataaataaatacgatgagagctttgtattacctctatcatgtctatttcaaaagatttagacgaagtaactacagttatcgtctgtcctttttgcatcgagcagggaccaaaatattggattactcgatatatgaatttcccaggaagacctcgcaaagcaagtccactaaaagtatactttttatgccttacctgtggccataaaactcgggttttagataaaaaactgattcagttcatagaaaaagaatttgaaaatcgatataacgaattagatagataaatgagattaagaggcacactaactatcatctatgcaagatttcgcactttcgacgtcttgagttaacagacgaggtcttgatataatgtcaactcttccaaaatcatttttataaacatacactttaattttaaaatcttcaaaacaactggtattaataatggaaactgtgttatcatcatctatggtttcgtctacatcgcagactggatctttctttagtcaatcaattatattcctctattgtgaatcaacatttcttcttgcttatgacactaatatggtattgagttaaattatattaagaactactttgacttgtagatcaaggtctatttgatttgatgtgctgtggtagaatgctcctctaattcctgttttgatttaagcgtctgactacacttttcacatgagaatactgcaccaacatttgatgaactttcatttgaattttttccaccatctacttcaaaattgtcgcttatagtattaatatgactgcaaattatatacatgatttctcgtcgaaacaaaaagtcaattatagtttatccagagaaatttattaaaggtgtttaataggattgttattaagacattttaatattaaaacatattgataggaccgcgaccggtgggcttcaagacgatatcagtcctattcggcggattctcaagcgagtttgaatcatagttattgaaccgctggatacaaaattttatttttctgactgctctatacatactagttttaaaaatataagatactggctaacagatgggcattcatatatacagatagatttgaagaagcaaaatatcaggcgggccactatgattgaccatgagacatatacatgtgtgtcaatagaagagaaatttaagaagtaatgatgtgagtcaacaaaaaattcattcaccaatttccgttacccaaaatttcacccgctttcctacccaagtttttggcattgatattctacctgagtttccatgagcagttacaatggtctccctctcatgtagttcatggtttaatagatagttatgaataagcgagtattgttcatcataagacattaatgatgataaccctatatcactttcaaaatctaaaacttcattcggatactctattacattattttcatctgttttttgtatccttccgttaaaatagaagtatttaggagaatcaaatttaaacttcgttggtgtattcccttccttttgaaccttgaagtaactgattactatgtataaacatatgtataacgaaggattatacgactaataaaccttactacattagttaatgtaaaattgtgaaagtgttagaccactatgaatgtgcagattattatggaaaacttattgaattcaatctaaccatacacgaatgtgattcacttagaagtttcacctaattatccctgtcggttctaataatctgtctagcttaaatcctatctcttttaattttcgttctaagttgatatcgattgggattagattgcctgaaacatctaccaataactctcgctcaatattccaaatggctgttccaatttgtttggtgatgctaatgttatcttttttcataagataaaagaacctataagactattatttgtatttattaatgatatatcggattcaatacttgattctgtcataggatggattaagaatatttctttcccttcaaatataatggattgaaatgaaaaatgaattaacggattattaataatatatatgtgattatttaattatgtgggagacgctacactgtttggttataaagcaactagaaatttgatgcaagttactggagatacaggcagtacgccaaatatcgcctcattaagccaaaaattatttggtgcgttacctgacgtctattatccgtatacaaataaagattttgacagggagccaaatacctttcattatttcctagctcaaaattttaaggatgcaagaactaaaagaatagatgaaccaggtatggatggaatatctctcttggaatccatcaaggaacatttggtcatgactaaatctggattgtcttttggatttattgtatatgattcaataaaacaagcaaagaaatctggaaagattccctttccttgttttggtgagaaacccaagaccggacatgcagtctcagcgataggatacgatgataacatgaaaataaagaatgataaatgcggaaagattacaactggtgcaattcatattcggaattcgtggggagagaagtggggtgaaaagggatatggatggctaccatatgattacatactaaaatccaagacaagagaatggtggactcctcccaaaatcaatgaattctattctgatgcactttttccattcttaatgcatattagagattctggaaaagttcaatcatgagccctcatatggaagtagatgagaagatagttgactgtcacgcatgtggtaaaaagcataaattaattatctcggttcattatgaaataatatacttctatactcctgagactgactctcctaatacattgtctacagaaccatatatcttattttatatttgtcccattaaaggagcagatatgaagtatgaatattactatgaggaaggattaggagctaaatttaagtacgccagtataagtaaaattaaaattgtcgaaagaaaatgaaaatatggaagaagggtactcaaatcaattctgaagagcgagtcatattacaatatggcttagattcccttatcaattctattactgtaattaaggattacaccaaattaatgattccgttaactacgggtttgattacaacctattttgccatcttcaagcttattgggattgatttcattaatgatacaaatgatgtagcttattcatttctcccagtacaactaatgctagctgcattggtggtatttgttacatcgtcatttcctgttccaatgaggataaatgtaggaaattacaatagcattaaaagatatagaaacgtctctctgacaatgaaatacattggagccgccttaggttcggtcttgtttctattgggcattttttttatgatttataccttaaaccttaacatgtagaatttgttatttggctagttctgtttctgattcaaaggaggaatatttgaattaattgtctctatgtattctgtaactcataagcttatatccataagaaattaaatcttaaccatatatgattgactggagggaatactgctcgaatattaaatcccagcaaaatcttgcttgtgctccttccttcgcaattaccgcattatatgagtttaggttcaaatccattatgaacaagaattgtagaatgtcaccattatttcattataaggtgactcgtaatctattgaatcaaactggagaaatgggtttttctattaataaagctatgatgtcgttcctcttatttggtacaacaccagaaaaatactggccatttgatgtaaccaaatttgatgtggaaccttcagccttttgttatgctctagcgcaaaactttaagataaaagagccgattagactagactggcacggtatatcacctttctatcttttagaaagaattagaagctttctaaataacaaattcgctgtatgtattggcgttcagattactgaagaaccaataaatcaggcttctgaagatggaaaaatcccattctctgattctaaatcattgtatggacatgccgtattggttgtaggatatgatgataatattaaaatcaagagtattaatgatgaaaagacgactaccggagccgttctaattcagaactccagaggaaaagcttggggagataatggttttggatggttaccctatgaatatattaatttgggtcagattcaagattgctggacaatttctgattcattctttatagacttgggggagtatggtttatcatattaaggtatttgattacattctattagtttatctaatagaagatgtatatatgcaagtttgattaaaatgaaatttcagatatagtacttttacctaacatatttttcatattctaaacgagaaaggtatcggtcatattacgttggtgtcttatgtagacagcgtaccctaagtaattaagataaagcgtatctccttttttcttaccaagtcaaattctctaatcttaatcatttttattttttcttcctcttttttagtaatcgatttctaaatgactgtcacgaatatatatttcattttacaaaagaaggtaatacaactttagaaaagttgtctatcggagttccatatcaggataaatcaaatattaatagatggaaaactgcaaaggaagatattagagatagaggtaacacttggtttatttcctataaaactatacaaaaaagagaagaaagacctcatcctgcaacctttccaataaaattgccagaaatgtgtataaaactacatggcataaaagaaaatttagttgttatggattcatttctaggtatcggatcaactactatcgcatcacttaggttaggtgtttcctttattggatttgaagttgatagagattatatggatgaggcaataacaagagtaagtctacaattgaataaataaaataattaaataataccggaacaaaaaataatttggtaacaagaataaagaaaatttctctaaaccctgatatctacctagaatagactataattacggattaattgttagaattttgattaaaatttttgtagaaaatatgaaattatacctttttttgcatttatctttgtaatcagaaacaaatatgaaagtttttctcctgacttgatgtatcatcgaatgtagttttttaatccacacttggacatgctcatatcttgattatatggtttatcgcaattagtacaaattatattgttatcttaaaatggaattaaaattacattcaggcattaccacattggaatatttgttcatctggactatagtgttttttatcctctaaaaatgaatttgaattaaaagagtttgcaatttgtactgagtagagcggataattgataagttctttttaaaattttacggcatctaatattctcattacttcaataattagagggaacataatagtttcggttgataatcgaatctatagcatcatctcctaattcttttttgtaatcccccacatctacaattttgatatttctggagaattcttcaattatctgattgtcattcacccttcccatatccttataataaggacaggtgatgacacattgttccttattacatccatagccctcaaatccgactcgaccgtcctctttaaaaattactgaaccatgataaaacatgtccttttttcttttctgatagcgttcttctggggataacccgttatttggttcaagactaacataatattcaaactcttcggtcgtgctttcgaaataatcgagtctctctaactctggattcccacccattctaaccaattttttaagtctaatcaacctatattgctggaacctttcttctctctccctttcgtatttttctgactctgattctcttcttataccatgcttcttttccagcatccctatttttttagagatgctgtttagcgactttgccattttcctcaattctttctagtctttcctccagttctcttatgtagagcaaggatggaccttctgacacaagtttaaacagagactcgttacattccttggccagcttcaatgagttcagtttatgaagataggttatggatgcattatcactctgataaatattccagcattcttgtaaaatattcttaatgccttcgattgagctttgatagagaaatggtagggtttccttaacaatggagtttaaattgttacttgatacccttgataaatattgaatgtctctgctaatggtagccggatcgacgtcgagctcatttgcaatctggtagcccttgagccctttggttaagagcaccatcaccttttctcttctatcgactatcattttgcaattcgatcgaataccggactttgtcagttgcattgcagatattgcatataatcaagttcaaagctaaaaagatattgcacgatgataagactattgattttcaccgttttgtgagaatatggaatatatcgtagtagccgtagtatcgtcgtatttctcatatttgattttcctgtccttggctatgatcacgggacaactctagatgtctttttatttcttcaaaatgtatattttgcactttggggtgttgcttacaataatagaaagggtagtggtatccgattctatgttctgttcttaacagggtatcaacattattattaaacatgtcaaccctattgtcaccatttttctcatttactatgtctttgattaaagatttgtcgtctatatcgattgtctccatattttctatcacgtgaatgtcaacactagtttttccatcctcctttacattactactacgatacgacgataacgacggtattttctctatgtttctaacaacgattgtcctaccttttttgtagttatcatatttatgagaaatatcaattcctttttctttcaatgtagaggctagctcatttaattttcttgacaatgaattggcagcatttggccatgttctacttcttgctagtctttggtccttggtttctaaaaaggaagttaaagtggcctgtaattcacttgccgagccttcccacttttcttggctttccatgaattctaatactaccttggccaatagagatgactctactacttcatcgttttgaatttgaatgttttcaaagtatgcatttatgaactcattttctttatatcccatacatctagatattatctcaccattttcagcaaagtcagccaatctaggatattctggtagttttattttttcaggacttttttctttgtatcttaaggctttaaccaaaatatcaaatatccagcctaatatatcaggcaacagtcgtctgaactcattctttatgtcctgttcttttcttctcttattttttggaatggtatcgaccttaatgatgagagatctatccaaaaagtcaggccttgcagaagctatgttaataccatttattcctatacatctcttataattataagagatgtcttcatcatcagtatacaattttcgttttgaaaaccctgttcctgttactgctctacaaagcaaatctgaaagcgtatcaggtatctttgaaatattgtcaaaatacgctagataattatgactcaacatctgtatcaaatcatttacctccttaggaaaggacgaggtgtcaactatggtcgggtccacaatgtttttgattaattcaaatgttgtagtttttgaggctcccttactaccatgaattaacaagatgggtttagaaatatcaggtataaataaggataagatatacaccaatactaataatttgtctttatggctgtgaagattgattaattttaagaaacgttcgatacaatcatctgaatactgtcttttaggatatacttgttcagaactatttttgtatcttcgaaaaataggtttattgtcagatacaacatcccaaccttctgacgatatttttataacttcccactttgcatttgtaagatcataatagtagtagaaattagtatccccacctctagcaacccttaggtttaaagtatttttagcaatattggtattgaattctttccttgactttatgatttcaactatatatttgattttatctttgtttatttttttaatatcattttcaaaacattccttaagtatcagactttgaaacctgctactatctattggaagagtttcagtatgatcgtttatctcaactgaaacaaaaatatcattaaactgatcaataaaaaaaagcatacatctttgttcgacaagggttacaagttgtttatctgaggattcattttcatcgtcattagattccattgtctcatttattgaatcagcttgggtttgtttgatcttgtagtcgttctttcgtggtttatctttattgttgtcagatcttacaatgtacttctttgcacatttccattgtttttcaaaatcatcttcatctaatggtggtatacaatgcttttgattccagtagtaagccagtttttttattatattctcttctaaaatttcatgatttctcttgattaaagactccattgttctaagtaaaaatagatgtctgttgtttccttggtatacttcaaattcatttgtaaacaattctgaaattggaatttgttctttgtctttagcctctttaaaatatttggtgtatattgagttaattgcattttcaagttcacccgattggtcatcattcaaaacagcaggctctctagttcctataatctcataaggatatccatccttatgtatagatggactgacaatcattattccatggtgtccttccgattttacctctattgcaggaatttccgtaatgtctatttcgccctcttgtttaattcctccaataccacttttctttgaaagcggtttttccactatgaagtatatgtgtgctctatagggatcatctttatgttgttctactaaggtgtattgagctagtttttctaaggtatcatattttctaatatgagaaagaaattcttcgactcctttcttattatcgatatctatacaagcaagatatttgcctttattttcgcctctccaaatctttccgcatataactgccatacccttttcaaaaaaaccatttgttttccaagcctcatatacctctatgggaataggctgatcttgccattttgaccatggttcatgggttactttattctttgaatcaaaagggatacaatttacgccgatatatttacaccaaaaatcaaatggcttatctgggtctggtgaagtagacatgaatctcaaatttcttagacaggaagaattcttcctttcatcttctctacaataacctcaaaaccaattttaaggattcttgcaactctttcataaactttgtacaaaaattcttcctcaaagatttgtttactatgatattctaatttagtaattacatattttggtactctaattatgccattaggattgatatcacatactatgtcaataacctggttcactaaatctttgaagaatttatcactggtaatattcaacttattcatggtgttttctgttgaactaattgcgatttgaataaagattcacttgatcaaggtcatcgattaagatgtagtccttactgccccagtctacaaagttaatttttcccataaagcaccagattgcatcaaagacgctttggaatatgtcttcagcacatccttctggtaattttcttatagcttttagtagcggtaaatcttcaacgaaaaatgagcacttgagcagaatctgggtattgttaatagttatatatctgggatttaatacacgattcccattgctatctaatttgataccaaatctgcggatgtaatcatatgtgttattggatatctcaactacatctgcctccatatcgtagggtatatagctacctttgcaaatcttattgtccttcatcatttacccatcaacatttagtgtatagcctcaatttcctttgtatctatttcaggtaccatacttccaatgatctgatttctatgtgtatgacatttacatctgcatagaattctgtgattaagttgcctgtttacatatatttgattacatttcttgcagcttatgggacaattctttaattcgatgtcccgtagtttttcttttattaattccataataatcactctgaattgctgatctttagataacggtcagattgcgagaggtttacttttagcagttttgtgataacatcgttaaatgattcaccagctttgcccagattctttagcttctcataattctccttatcaataactatttgttttaaacttgttgtcaataaacatacattaatattgtaataataaagtatatgtattacatttatcatgtgtacataatcgataatgtcaattaaatattacatgccggatccgaaacttgtcgcctacctccagcaagagttacaaagtattcgagtaggtaaaacccagtctaatgcggaggtgggcgacaaacctcctcacagatcaaaacagagtagaaataagattgctagaaaaaaaacctataacattgattcagtttttcaggcctttgtagatattttgtatttcctagaattcataagagataatcatgaagaccttggcgaaatgttcgaggaagatctgaaagatttgttcggctataataaatactatacacaggatgaatttcagtttagccctaaggattttcaagaaggtcatcgcaacaattcgggtggcccattacaaagattggtaaatgcaatagttttgagaaatccatcacgaccaatttacaatagagaatctctagattttagaacagtgctaattacagatattttcattcatacttgtattatggaactgactcaaagatttactgagcctgaagaacgcaatatgatgattagcgattcaaggagatttagtttctgggctaattttttagcaaaacaagtacaggccagaagaaaaggtgcaaacagaaggataggatatgttccttataaatatacatgatttgaatcaattacgtccaatttaactataatttccgcaaaaatgggattaactggatttaatcaagtattatgggttaccggtatataccccatcttgtataagatgagctgcaatagattgttttcctttttcatccactgaagtaaaagcccgaagcaggctttgtaaaacgctattcatttcccgatattttgattcgagctcattaacctttttattttcttcttctttgatttcatcaaatgcttctggtttcaatggataactgcattttgaacaatatttattttctactgtattaaccaactcacaccggggacaatttgctactgatggtttccttttagatatttcttctgaaatgattccattatgttctaatattttgtttttcaattcgttacccattcttttctttatgtatctagatccctgcttactgttcatactccaacggactttcttcttcaatgcatattcggggagataatctgagtcatgggatatggatgaatggcgaatacaatatgggttccatttcttggtatctagcaaatagcgaatatgatctaattcgtttgaattagagattgtattgcagtcaatcaatctctgaattctttttttaagttgtctcattacatcatatatctggtcaggtccaattgatgatcctgttaagagattgcatattagtcgtgcttcaggttcattcttgaaaggatgttcatttagccaatctctgacatatgggaaagagagagtaagtaacatgggtccgcttcctgtttttgcttggtgaggtatttcaccttctccgtatttctcttttaatcgaatatgcttaatttttaataatgtgatctcatgaggtctggcgtctaaatcccataataatgccagaatagctttgtttctcttatgtggttcatacttgataattgtaattaattcatccttttcccatatttctgtttctaagtatgggctcaatctctttgtccttttcattttaagattgataaagtcgggagtattccatgtgtcataggattttacatttattcctttatctctggcattatgtaaccatctgtaaaaatattttattctccagaggtaatcattccatgttgtaatccattttttatccggatcatctttgtctgtttttctttttgaatctaagaaacctaatatctgtcctttttcttgaatttgataaaaagttgtgttttcacctatatactctgcatatcttatcaagacttttaacagtccattttgatagttttcagaggtatctatgttctgaagatattcataaaagtcataaattatttggctgttggtctgatttattaccttgatttctatatttttgaaagttgtggttaacttagcgggcaatattatacctcctttttctatctactctcctatacaaccttgaattatttgaacccatgtgattaacgggcccggtgggcttcgatcccatgacctgcggttccgaagaccttagtttagtaacgtccacctatcaagtaaatacaaacttggaattaaaagagacaagtccaaacgaacaatgtaatgaagagaatattaaagaatcttattttgactggaaaggatataaagaatatctaacaaatctaaacaaatcaaatcgagaaatacaaaataaaataagctatgggaagacttacttctatattttggaaacaggcaacgcacaggacttgatgaaagtctcgaacggttccagagttcatgccatgcgagcattatcaactctttcgaagtacacaggctgctacgatgaatggattaagataataaagaagtatcagctaaagtggaagaatgaaaattataattcactaaatacctttaagaacatatttggaatagaaaatggaaccgaccaaagcattttacaaatgatgaactggataaggtcgagtatacttgaactccctattgaagttggcaaaatcatattattcaacacacttacagggttaagaccagaagaagcacaaaaagcaatctatcttatcaagactaaaggagatgaatatgtcaataaggacaaaggattattgttacactatcaatatcctaacattttctttaggactacaaaaaagtgttacatctcaataatcaataaaagtattttagacctagtaaaatctattgagctaagaaactcctatcactatgcaataagaagtgcattcgacaagagaaacaagaagattaatatgtattactgtcgcaaggtctttgccacctacttacgaaataaaggtatagaacctgaaattatagatttattgcaaggaaggataagtagttctgtttttgttaatcactattacaggcccgatattaatgaaataataacaaagaggattaggcctgtgctggatgagctaaggagggagttgatcaattaagtacatatttatttccaccattttattatttttcacgttctagtcggtatgagttgtaatggaatatgtataaggtataaagctagaaggaaccacaaaattccatcgagatataaagaaggccaaaaaaggtgtagtatttgcgagatatttataaattggaatggaagcacgtattgtccttgttgtaactataaactgagaacaaggtcatttcgaggttgggaaatgaggaaaaagtatagagaagaaacaataaaacggtattaatgcgcatggtgatctttatggataaagtatgttagacaatcagaattctccttgaatatttatagtaaaactaaccttaatgtataattgataataatacaatctgtcgatagtaattgaataacactaatcaaaacaataaagggacttgggcattaggtgattatagaagtattggtcgagtaatttcacctgtatctgccaaattaataggacttgttaaagttaaacctacagattctatcttagatatagcatgtgggtttggtaacaccgcaataactgcaaggagagtaggagcaaaggtgacaggtatagacattacacccgagcttcttgcactcgcaaaacaagaagaggatattgcaggagttagtgacatagagtggagagaaggaaatgcagagaaccttccatttgaagatgaatcctttgacatcgttctctcaacgtttggacatatgtttgctcctgaccaacaaagtacagcaaaagaaatgttaagagttctcaagaagggtggacgtattggatttgcaacctggccacctgaacttgccataggaagaatcttttccgtcgtctccaagtacgctcccactccggtaacaccaataacttcatcgcccattgaatgggggaatccagataaggtgaaagaacttttgagtggtgttaaagaactatactttgagagagatactataaactatccaattcttagtccaaatcactactggaatgaaatgataacaaaatcaggttctatgattcaacttattcaatccatcaagagagaaaacaataatgaaaagatagaatcacttaggaaagaatatcttaatactgtcgaaccatacatagttgacaatgcagtacgattaggctatctgctagtaattgcggctaaggagtaatggattatttctacaactatttactcatttcattggctagacttttccacagagttatcagatataatgcaatagatattagactttcaacgaaaaggatattacgcctaaaacacaggagggagattgaagactatattcctatttaagagaggaaaataaggtatcggaaataataattggaagtaaggagaccaaaggccgattcatctaatatcttgtacttccaattcattttataaaaacctctttctaaactatcttgtaaattgtgctaattattattggataatattatcataatccagtacacctgtatgtgctatcaacttccattctttatcatttatcttggtatatatcttgcatactctgcccttccaatgaaaatcctcgtccgtattgatattcttccaaagtgtgtcaatgtcaactactgcaaatgcgccgtcgccttcatttgaaattgctatcttttgtatgatcctattgttttgtattaattcatgattgccaaataattcactatagatattactccaccgttgataattaaatcggcctaattccattacccattcgactgggtcatgtgacttcggtgttctgggccaaggccacaccatgtcaggatgaaagatactcagcaacttttcaacatccttatggttccatgcttctgtttctctatttactatttctctaatttctgattctagttccatgatagaacacctaagactatgccttgcaaaagagataagcgttacattaatgactatctacctggaatactaatctaattcatgtatcggtatatcgacccttcagatgattcctttttgaaaaaagatgaaacatatcaaagactaaaggagcaactagagccttttatttctaatcttacatctgaagataaagagacaatactaaaaacaatatctaactgttatcatcaatatcataattctataacagctaaatcaagaggtgatactgagattatgctttctacggtaatgtccttactaataaaacagagcaatgaaattgaaagactgcatttgttaacaaaggctagataatgctaacttctagaatattgatattacattagtcccaaggtgtaaggaaatagaataaatgttaactatagcacggatcaatgtagggcgaatttcttatctattattaagttaatcttggttcaaatcgatatagtaataaaataccgttattgtccaagatgcgactttgtttaccaatttcatatgctcttgattcttaagggcaattaaattagttggtcgtccatgagatatagaattacgttcgactgtatagcactcttgccaatctgaattaaattgatgtacatcaaactttgaatcctttatcttcataacttccgcaatcttatttctaaactctttcgtttccaagtgataggagttttcttcgcctaaaagatctttaatcagaacagacatgctgctaaacagtgtctccaatcgcaaaggattaaagtaatggcttaattgataataggccaatgccaactccattactcctttcttatccgtattaatcttagatagtttcggtaatacaactttcggatcttctttaacatagttccaccttattccaaagcttctaacaaactgtggaatcttgttgggactgtcgaggtcaatgtaattaaaggctttatcatcaataaatgcttcagtattataagcaaaaactatctttgataatgcagtgctgaccaagtacttagcctcattcaatccttccaccattacatcttctgtagtgattattatggatgcggcataatcgtttccatcatgataaaatactacattatcaattggtaactggtcgttcttatctttcaatacatcgtgaaggccatttatcttaagaagatattggacagaacccatactactcattgtacttattgattaaataactaattatgatatctagacgatacaaatttgattataactgaggataaaaggaaagaacaagcatcagggtttaacccctgagagacaagtggctagacctatgacgacgagattgaagcctttaccagttacttagataccaggttgcaacatttaacgccttaccaaacgttacccatctcaccacaagattagctttatcaatttgcttaaaatcatcatatttatgacaaagtattgtttcaattgtcagcataagataactatgcatttagataaagactctccgcctgaacttcgatatagaggttcttgtaagtatcctaactgtgattgtaggcattgtgagtatactttatagaaacagttttgtttattaattattgattctgaattgagaatgccaaaagaagaaagcccaaaggcggaagcctttgggcgacacaaggtaaaggataattgacgatgagatagaagcctttgccaagaattaaggaaatttgattactgaacgcaatcgtatttactatgtgtgtaaacatttatatttagagaacgaatcatgtatgatgataagtaataactagggaaacaggtatcctcatattagtaacgattatatagtatgtatctacagtaaatactatgggcgtaagcactttggtctgtccgcgatgcggtaatttatggaattatacaggtactaatcaatatgtaacatcctgtagtaaatgtaaaacttctgtaagtattagaaagaatagagtaattgaagagatggttcctcttcaactatcgcattaggagttgacgacgagataaatgacgacaacagctaatattgaatatacccatcattcatctaataactttttcgacttcaataatcatctaatgaaggatttaggaatagaattagcaggagtaaacagagtcaatagatgtattcaaatggaaactcatgatagggtaatgtggattcctattttcttcgacttccgatatctaccaatggcagtagagtggggactaagacgattgaaaatttccgaggtaaagattctagaaatacttgcgtccttaagaactcgtttttgtatcattgttcaggagattaataaattggaggagttagtgtaatgttacattgcaaaatattgtcttttaatgactgggcagacttttggagaaatgagtgcggactaaatgctatccccgccgatacgaaaaataagaaaatatacgagaaatggtcatcatggcagaacgaagcaattaacatggaacagcatgaagaatggaaggaaaggaacgcatttgataacggaatggccattatggctggtaacatatggcataggaaagatttagaaaaatattctctatgctttattgaccttgataatcagaaagcaatcgaagagatttgtaccatttttggtactaatgaccttaatcaattggcacagagaactattgtagaacagcatcgggacaatccatacaaagcgcacatttatttttatactgaatatatactcaagaaaaagagcagtgatacaaccagaaagttaaaagataaactagatagtaacgaaatacctgccattgaagtaaaatgtcaaagcgatggactggcatattgtactccttcccttcacaaggatggatacaattatgaaattacaggtactaaagtaattggaaaatttgatggtaagaaaattgaagataggctctttgaagtttatgaaaagtatggaatgtcggtgggaaatagcaataatgaaaataaaggtaagatcccgattgaagacctgtttaatccagaatttatagtaaagaaaggtcacaatagacatgaagcagttttaagagttattgattccctatatctgaggaataaagaatccaagtctttagagtacatttatgaagagtcatggaattggaacttgaatcactgtgaccctcctattagtaaatttgactttgatagacagtggaaggatggtacaaaatttgtagatagaactaacagcggtagaaatcaagaaaccatgttgttacagcgacaaaatcaacagaatcagcaattaaagatcgacccccagctaatctgcaaaattgtgagttgtataaataatattcttaaagcttattacgttgatgaaaattctggacaggtttgctatggagttcttaaggaatacggaataaacttagagaaatgcatcattgatattgctccaaagaagattaggtattataataatcctttattccctattgctgaacctaaagtcgaattggaatattatgacggaaagaagagtggaaaaattggtccatgcgccagcctagctgagctgttaaagatattagaaatcaaaggttacgttctctccaggaacaaagctgccgatgcttttaacagtgtagtgagtgccatgagggaaaaggagaatgacatggtggagtatgtcaatgacgtaactactttagggtactatttagttgatggaaaattggtgaccaaaagtataactcagaatatggaagaaataaagaaagaagaggtaatagaatgctgcgaattacttgatattttagcaacaggatggaagaacaaagatgtatttccaacggtcctaaaatggggattactagctccatatagcttcataataaagtcaaattctgataaatggatgccctatttgcaaatgttcggccagggccagtcgggaaagactactttaggtttattagtattgcaaatttggaataggtcgacaatgcttaagaagggatttaataatattgatacacctgcaagattcggagagacagtcagtaaagatacctaccctgtccttgtcaatgaagtaggctcgctctatgaaacaggcaagtttaggagatatactaacattatagagatgataaagcattcggttgaaagcacaactgccagagcaaaattcgtagaacagaataactttcaagatattccagctttaagtccgctaatattgacctcaaactatgctccacctaatgacggtggatttggccgaagattcatttccattcattttcccaaggacgagaagaaagaagatgataaacgagcattgtttgacaagcttttggaagacaagaaaggatacttgaaaacccttggcgactttactgcccagtatgtttccaaatacccttccgtattgttgagagaagattggaaagtgatttcaaaagaaatattagcgaattttttccaatttgcagataaagaagttccagattggattgaatactttgtagaacaaaaggacgcagtcgatgaaagtaatgaaaatacgatgtttgctttaaggtcatttttggtaactaaaattaatgaaatctattcgagacataaggataaggacaatacagctaataggttaagtgaaagacttgattattgtttgaagaatgaattgataccctttatacaggacatgaaaggcgacataatcattactcatgatattctagacgaaattaataacaggaacagaatcgaaaatatcacttcattgaaggatataggactacaattaggcttagaatacaagtcaaagtacttgaacaataagaaaatgagagtactgtgcggaccattagatgagttgttgaaatttatcaatcaagatgttatttcagaacattagaacacgttctataccatacgctactatatttatctaaaggttaattttttttaaaaatgtctaagcctttattattaatatattgtatttcaatatgatgttctaatgttctattatcatatgtaatctcaacaaatgctcattttggtaaaataagtccaaaatggacttatttttagaacaagttagattgttctattatgttctaatgttctatttcatgacaattttaacacaacttatcgttcttgtctaatatggtacaaaatagactaaattagaatcgcttataggttaacaatccattgatagatcttcataatatatttccctcttttggattctaattgattagcaagtaatggtcagaaataaaagtgataaatatgactatgcatacaattttagattggcatcttatgaaactgcatgaatgtaacaagcttattcaacatatgcttaatctggtggactataatatcgagtcttcaattgccgaaagcgaaattcttgcaggctccggctttaattcaaatgaattaaagagttgcctaaattatcttaagagtaaaggattcattgtcaaagaccccgtagtcccggttaatacgggtgatcccaagatcttacacgacttctacaaagttactacgaaagctatagactatcttgaccaagctaatgttaaccccaagactggagatacctataacgttagcatagctactatgagtagttcccaagcacagtttggaaggggaaatattatggatatcgatcatcttcaactaatagggccatttttggatgaaatcgaccgttgtattgatagttcacagttgcaagacgatgagaaaaatcgtagaaaatcaattattaagacaattagaactgccattacgaataaatctattaaagagatcaaaatgggcttgctagagttgtatggattgataaatagtactacttcatgtatcgttctcgctgcaaagataccagaattattatcaagtctgccacctaattaattcgaacgacacggttttactgtttcatgttacgccaagtattatcatatttaataacattctaagagcttttttataatgaccctaaattatttcctcaacctgctaatttttggtccagggtcttgaatgctcttcagccaggtttaaataaaaagggtatgattttatgcaattcaggtctaacaatgcaaaaagggggacaagatcattgatttaacctttcagtattttacagagcgaaatcaagtagctgagcaaaaagaattgaaagtacaatccatatgaatatgggaagtttttttaagacccccattgacgaccatagaaattgttgtattagactgtcttaagttcttatttactaaatgtcaaaggactcagaagaggatacgactaaaatcttggaagaatggttagataaatataataatttaagaatctagaatatctgtgattgaattctatatcgtaaaatcgaatataacatatatacaaaaagattattgagtggattgattgatagaaacaagttactcttggtggaagattgtgatatttgttcttactattggattattcgttgcttcctcatttcaatttatccgttcatacatgataacagatatggatgctctgagtacaacggatttcagggccatagaaaatcacttccctattgtttcaacagagataacttttcataccaaaccatttcaaacaattaaaccgaatgttattgctgacttcaaactcgagctatatcctaacagtagtgaaacttttagaaatatgtctttggtatttaccgaaaggacgtacgcaaatttggatccattattagtcgaccagattttgaagttttataacgaaacgtctatagtctttgacactactaatgaaacaaatgtaatgaaagagaatgtcctcttaaagtttccatattctggtaacttcgatatgtacatctttgcttttacgaaagataatcgattaattagttatgtttatcatgataatgtatttattttagaatccaatcaattagatgaaaaaatagcgttagacactgtgcgaaatgggattaggctcgaaggactcactttaggtggtttaggaatagctcttttaatgtttttactagaaattgggataaagaaagataactaagtttttatacctaaaattattctgttatggtcataacgaaaaggtaattgcatgccatagaaattaaatgtgtatactgtggaactatgaactattgtgataataaccacataccaaaaatgaattttatcaaaaaattaatatgcgattataaactgactaatacgtctgaacttttcatcgattgtggtacatgtctaagaaaatattacctgactcgtataagtaatttggttgtttggaaaaaaaacttaaattacaacctgaccgtattagaggatatcaagagaaatctaaactccggtgaactgggtctcgaagacattgtgcaatcgctaacgggagttgtgagatatgaaaaacagactaacattcacatatgtttctctttaagaggtgcacttggttattttgattgcattcgctctgaggacaacaaattcaatttgttatctgtttggtggctataatgatgataaatccaaataataacaaaaaaatgaagataaataagtatcagttaaatgatgaaacaaaattaataaactatgaagaggcagctcaaatttataaatctattcagcctaaggagattggaccagaagaaacaatattgatgcttttagcaattacacccaccaaaccgataaaaggcaagacaatgataatcaagcaattattcttgattgaaagggaaatttttcaacaaattcaagatttaaaatttgttggacacaagtttggcccacatagtttccttatagaaaatatcttgaagaatatggagtttattggattaatcaaaaaatcatctaataaatatagaataactgataagggtttgaaaaagatacggccccttatggaacgtctggatagtcacaaattacaacacttgaaaaatcagcgaattgcgtgggatgagttgggaagtgaaggtttgatacacttggtttatgataaatatcctgaatttaccgatcaatcaataataaaatatcgttaccatattatagattggataaaataacatgaagatcgattcgattagagtaaaaaacgttgatacaagagtaaaaccagttcgaaccgcagaaattagaataggtcctgaaacaattacgactcctacgagggcagccaatctgtacgaatataattctaaagccaaaattccttcagatctattaattggtaataaaataagtttaaaatatacaagcttaagttatggtcaactttcaagactattaaccgacacaaaggaatttgaaagcctgcataatgctttagataataccagatacagagtacaacattctcccctaaacatcgcagtttatcaacctactataacaagagataggaaaagaaacatcccgtcagcaatggagattttagagaacgataataatttagtcaaatttgttgacctaattactgctcttcagatatcagcaggttatgatgttattgcaataccttcaatcctgcggccttttgaaaaacttaaagaaatttatcgaaaaaaagctgatgaaatctacaaaattggaaaagagcctttttttataattgatctaaaatataatcatgccaattttcaagagcttttaaagttcctcactgatgatttacaagcaagactggtgggattaaattataaaagatttgcaagtgctgctttgaactacagagagttatcaaattaccacgacaaggatactatattttttaccatccaggttgcaagagcagatttggcttttaatagcatttcggtttcacattatattccttttttaataaatgatatttcttgtgttgccgctcctccgagagtatttgacagtggcgagaccattggcaataattcaaagaataaactagagttatcttaccctgagaaattaatgaaacttaaactttttaattctgaagatctattactagaacctttcggaaatcgagtcaatgccggaaaaatattacaagatctagatcgatcagatgactcacgtctacgtggaatattagataactattcgaactcgggcgatagtgcaaaagaaacagacaagagatatgaaatcttgaatgcgtttacgagagtacatgaattgaagtgtagtacaaaagagtttgataacttttctaattttatcaaaactaatgatattcgtaattatatatccacacattccgtattggataggactgtttcattattggattatccgacttcgtaattcattttgctgcaacgaaaattttggttaaaatgttttattaatatattttggattatatgccaacgtttttttaacttcttggaccaatcgtgttatggttagatgctcaatttgtcatagaggtcttaattccagctacattagaatcgggactaaagaatctttcaagaaagtaggactctactgtatcacttgcgatatgtattattcacctgatttatcaaaacagtatactgtaatgcaaaaacagtatactcttaaaagttcaaatccaccttatcttcttaatcaaacgggcccggtgggcttcgaatccatgaggtacatgggatctgttaatttatttatagtttgtatgttgtactaatgcattaggagatctataagatcggtggctgtaatttctaaaataattcatgatgcatcaccttgagaatgtctttcttttcacatgttggagtatatggctcaacgttagcaagaaaattagtgctttttagaggaagacggtattatggtaaaattttgcaactattattttctttaattctattcttatatgcttccttaatagcctcatcatgttctgcattggcttccttgttcttctggtctaacctgcaatttgcattatctactttattttctggattaatcttttctttataatcacattcgttttcttgatccttcacttctctcttggattttgcagccaacaaatctaatattaattctacatctttttcacgggataacatatcataatattaatgaaaaagataattaaagctgtttattcttgagctagttagtactccaaatccttattgttactacaaacatatcccctatactgatgcatgcattgcttatgttcgaattgatagatgttgaggaatttcgacataaatactaatttagggggtttaagaaaaaatatcattgactgatgcaaattatatagattagtcctattacgattcttgaaataattctggaaggatttaggttgagattagctgaaatagtgatcctacatcccatattggcctgtttttcctcttaatcgctttgctatttacaactagtaaagataataatttaagcgtaaaatgcagttatgatcatggataacttatccatggatgaggacagtggtgcccttcacaatgtcgaaagttttgtattggttagattattaactcaacatgcatcagcaagtgacccttcaatcagcatcagtgtattgacggaattcttagaccctacaatgtctcccttatttgatcaagcaatcgaggatttgattgctcaaagccttatacattcttcagatggtgaaaattatcaaattactcgagatgggattaatgaactagacactagaaagaaagaggcaataccactttagagtgaagtaaccagaataaaatttagaacattcagttactattaccagaatctagttgcatcaacgactattctctttattttatttgatgtgtatcaagatatactttatctctcaaaatatagtcaaaattggaaaggaattgctaatgtctagataattatggataaaaggatgataattttaaagaatggacttgaataaataaatattaaattcgctagtataaaaaagttttagtgataaactctctcttagattataccaaaatcgacagcgagataatacagtgaatagatcagtcgctatagtagtctgtaaaaataacttcataaactattatctcttggcttgagaaatatgacattgacaattctttatgtagaccactgaaaaactcgtaaaattcacaatcatctaaataagttgtttattaaattaatgaattattctagttaatttacaagtaattcatataattatttttttgacagaaagtttattgaatagggtcaatccaaggctacattgtcattatttaatgatgatggctttagtcatggttgtaacgagtatttcaactagttggacattagctcaagagactgatgaaaatagttgtattacttttagtatcgacagcgataggaatacaatttcgatttcttgtattcaagacgtcaaccttactgatatatataacactttacaaaatcctgagatcttagaaaaggaggataatggcacatggactttagattctcgcatagtagttgaaaaaggtgctaccttggttattgactcaaaggatacgagctggctaaaaatgcttgcaggagataaaaaggtggatggtgatagagataatgttaactctataactgttttgggtaatttaattatagattctgtaaaagtttcttcatgggatcctgaaagcaatgattatataaaatttgaatttgatatattacctgatagagaacatgagcataccggcattgatgcggtaccaagaccatatatcaaaatagatgatgaaactacaggtactgcaaatattacaaattcagaactagcctacttaggatatgaatgcggtggtggttgctctggtttaagttactatggaagtaatggtactagtatggtaaagaataatgaaatacaccataatcgctttggattctattctgtgggtgtaggcaacatggttttggaagataaccatgttcatcataactttatgtatgggtttgacccgcatacagctactcatgatatgataataagaaacaacactgtccatgaccatggagctatgggtataatatgttctttggattgttacaacattactatagaagataatgaagtatacaatagcgctggctctggaataatgtttagtagaaacatgtatgattcagtggctagaaataatcacgttcatgatgaagtaaagtgcatattcctatctcaatcacacaataatgaagtttatggcaatacagtaagcaattgtgaaagccaaggaatttacttgtaccataattctatcgaaaataaaatttacaataacactttgattaatgcgacagaaggaatagaatatagctatgattctatgggcaatacggtagaaaataatattatccaatgaacaaaacacctatgctaataaaagccagtgactatatctgtaagaaatcaaataatccaaggtctgcgattcaatgaaaatgagtattcttccttttttcgaacttggtattgactacaataataatagagatcacgaactaaaattgacaaaagtcaaaaggattctcttttgctaaataatccgagtatccttttcctgaataaaataccaaagcacaatagtataaagacaatccataatactgccacagttacttctgaatattctatcatttctgaccattgattatttaatagatattatatttgtacacggctttcctaaaacccaaatcgttcctatgtaaggtaaacaacattcaattaataagcaatttcatcataggtgaggggagtacatgaaccaagtaatttgactaggtatattattcgaggtgatgtctatgaataactttatgctcatcacaataatgagttttacattgaggacattgaattgtaggagggttattgcacccaagcataccacataattcaccactttcagagcgtttctcccattcccgtggatcaatagacattcgatacaatatattgggtctattcacctaaaagttttcggtttagtcgatttatgaatatattaaggattgatggattcaatgataggtctagatttcatacactatctacatcagctttatcatatgctaattttaaaattcgaattcatgatgttacactatagcaggaaaagaaattgagctttctatttcatttctactaaatacagacgtattttcgatgaattggagccattactaaccggtcttcatttgatggtgaattaaatttgaatcttgattcattttcatttagaaatatcatgaatatacaagagatacaatctgaaagatttgacatgtgttccaagacactaacattgactgtaatagttattgcgatgggcttgttgttttccttttctattcccatggataaaggagtattgataagtgattataatgtatatgcgcaatctgaacaagaacaaacaccacaaagtgtagctgacaattcatcttaccccgtaataatcaagttagattctgtatcttttgcaccacttacagattctgagataaatcagctaaaagttgacattacctaccaaactaatgatccttccttggtaaataccatcatggctgacgttatgaaagtatatacagttgatggaactctaataaaaacctcgagcattcctagtggttatgtactagggcaagcaggtccaatgcaatttgcaacatcgtttgaagatcaaactattgaagatgttaaagctgaaattgcaatgactgatactactcatacagaaaagatatcaaacacccttgatgttgaaactaccctaacaaagtgaaaatctatactttggatgagatatctagatattacgaattaagaaaaatcagcagatcctcatttatttaccatattacttgatttaatgccatttaactgataaattgatatctaattaaatataattagatttgcaagttactaatcatctagatatagtgtagtaatttacatgaccgtaatattttatatccattctacgttaataatagatgcatcatttaggctttgatgtttacatccaggatggtctgagagaggcttcccggatgtaattttcaattattcttactgaactatcttttttccttgatttaacatcgtgttttttacttgtctttcatgataaattacattacaatggcaacactttttccctttcaaaagccgagtatacgcaaatctgcggtataataaatattcaaatttagtttttgatagcaggttattagataaccaagattgacaagattatatttttaatattgtaatccccagtctaaagaaaaaaaataagataactacggaaaggttagtctgggcaggataagataaaatgataaatacaaaagggtatttcaaagatcaggtaaggttatagtttcaaaattgatttgcaaagattgttaaagttttacaatgtaattttaatttgttctatcatcagaagaagattgaaatatcattattatatcaattctacaggtagattgataaataatctataacataacaatatacaaagaatgaacattgagaaagagaataaaatttagattatttggtttatctttattttgtatatttttaatactatactcgaacaattctatagttaacctatcgtatggagcatacattaaagcgcctttatcgcctgccggtccaactgtaaaggacgataatctggtagttgaaaaagtgacagatggattattagactttcctacaagcatggcatttttaggtcctgatgacattttggtaactgaaaaaaacaccggtaaagttatgcgggtaatagatggtcaggtgcaggaagaaccagtactggatgtagctgttgctaatagtattgaacgcggtctactaggtattgcagtagcaaagcaacaaccggatggaaccagatacgtgtttctctcttacacagaatctggaaatgatgaagacggtagcgacgtagaagataacgtgggtccggaaggaaacagactctatcgctatgaatttgttgatgggcaactgacaaaccctgtaatacttttagatttgacagcaactccacctaatgatagaggcgagcataatggaggtaagattaggattggtccagataacaacgtttactttatagtaggagaagttggaggacacacaactcaagcacagaatattgaagatggtccagaacccaatggtttaggagggatattacggataactcaagacggtcaaattgtacctggagatgccatttttggtgatgaatcaccccttgacatgtattatgcaatgggcattcgaaacagttttggaatggattttgatccagttacaggaaacttgtgggatacagagaatggacctacagctggcgacgaaatcaatctggtttatccaggttttaatagtggctggtcgttgattcaaggattatcaaagaatgatctattaaatgacggtgcaactcctgaggaccttgtttattttggaaagggatcatatgcagagcctaaattatcatgggtgactcctattggaattacagctttaaaatttctaaattcagataaactgggagaacaatatcaaaatgacatgtttgtaggcgatataaataacggtcttttgtatagattcattctaaatgaagcacgtgatggtttattatttgataaaggatatgcaggaaatatatccctattaaacgatagagttgttaacgatccaaaggaaaatcaaccgttcatcttcgggcagggctttggcggtataacagacattggagtgggtcctgacggatacctgtatgttcttagctttactggatcactctttagaattctacctgcttccgcgagtaccactactaactccgctccttctgctgatacttctaccgcagaagctaaagaagatgatgaccggtccataagcgatgatcgatctacttctcaagataaaaactctattccagcagtcatattaggaattaatggtgacagttcctactctccaaatccagtcacgatacaaagcggtcagacaataacatggtataatggtgacaccatttcgcatactgtaacttccggacaggacaacggcgagaatgcaggtgaagcgtttgattccgaagcaataataccaaaccaatactatagtattacattcgatgattccggcgaatatcaatattattgcttttatcacccttcaatggtaggagaagtaatagttgaataaacataatatttttttttaatatttaatttttctaggatataggatttggattgttaactgaatcctaaagatttctgtaagaagatatattttgtatcattcagactgaattgttgcaaatcaactttttaatgccaagtatggagtctgctttccgcagtagagattatttcctactgtgaaaaacctacattttgaatttctcattattttgcataaatcaatatttgatattaaatctggatcatactgaactatcataatattgggaatatagattaactcgactttatgaattcccatcttaacagatccactactaaataacaggaagtgtatgagagtagaacactgtagttataggcagctagagatcaatatcgaaaaaatcaaatactattaaataatttcaaattgttaatgagatgagttactattgatgttatatatgttatatttgtgaggctaattaattaacttatatgcataatgggctctgttcatttaccgaaatcttatagcttgaagatgctttatctcctttatgattaccagaaacaaaacaccttcagagtatgtttgttatggtctgtatttgtacttttcaggcttatcgcttaggagaacgtctgcaagattatcttgctttatcaaacgaaaccacgtcactgtctggaattggattcagaaataccatccgcaaaagatttcctcaagaaggaataagatatcaaagttcatcatttataagacattaatcaaggtaggttccgaatacatatggttatgggttgcaatagatgcaaaaagtaaggaaattctcgcactaactatctctaaggaaagaaatatgtttgttgctgagcggtttctatcagacattgtaagagattatggaaagcatcacgtttctacagatggtggtacatggtacccaatggcatgtagattccttggacttgaacatcacattcattcccctatggagaaaagcctgattgaaagaacgatgcagtacataaaggacaggaccgaatgctttgatgattactttcctcgcagactgaagaattgtaaactaaagcatgtacggaacgaatggttgaatctatttgttgattatcataacagtgaactaaaaacgcttaagtgaacagggccgcataatgctttattacaattctttacgattaagaattaggtttttggtgatgtttattatctattaaaaatgtattcccgtgtcttcatcttctataatgccataacataaataacatgcataacataaataattctgataggccgaaatgataattatttatttttgtcagcaatactttaaaaaaccacttttttgtaatagacacactattcattatacaaaatagattttctattcctaatctaggtccatattatgatggcttcggtaggattaggttcctactgataatcggatttagatacaaataacaatttatttatttggaaaagtcaagataatatcagtctgatttcataaggaatatgcgatccgtatttttatgtaatgttatctaagcaatttataatgatttgtaatccaattgacataagggtaaagaatcatcgaggtagttcaaatcttgttcttaccaaaagtagccgttatcaacaatagaataataaaatctgcgataacatatgttaaaacagcaacatatttggcaaatacctgaatataagtatccaataccttgaatacgaatatattttttttgaaataaatttttttaataaattagtctctcagatactacttttaggttaaatttagtcgatgcaataaaaaatgttaatccgattttattttacttgagaattatctaaaacaatagcatttgtcgttatagtgtcttctcttttaccttttgacctttgagaaatttcgatttccttctcagctatatgaataagccgataaatatttttaccttgattaatctctttaatgatcttttttcctttcatgtctcgcttactggttagatattgcatagcaaatgcatgatttatcctagtaacataagaaaagtctatcactacagtgttaacgactatattagatattacgttagtaaaaaaccatttagcactttcgccatttaataattctgatgacgaaattgcatccttaatagatatgacataaatgatgaccatgttgttgttaaaaaatattagagatcggttctaatatcctcgcagttattggatgcgacatctttagagggatcaaaatctattattatgtcatagtcgtcaccacaatcaaaataattcgaacctggccccccttctaatatatcttcacctgatcctgcatataattcatcattgccctttccacctaccaagtagtctccttctagaccgccataaattagatcactaccgtcctctccatagatgctgtcactcccctcgccgccttgtatatcgtcatccccatttcctccaaaaatatcatcagaagaagctcttccttgcaaagcatcatcggaacctttgccttctataaagtcctcctgtaatgtgcctattataatatcacttcgagatgtaccttcacataacggcgccttcacctcttgattaaaggtacagtaaattatcttttcacgagaatctccctgatttatgggcccagcatatctttccccgtcaccatcaccgccagcatataccatccaattatgattcagaaaaacacttgaaaataacaaggcaattaaaatattcatcaacataaaaacatttgaaaataatttcatcataatattctctctatattattacttataaaggattgataaataaattatgagaaacatttcgctaccatttttaataattgcttcgtgtgatactttgttatacgatcagtcatcaaaaacccttatgttgatttaataccattcaaaatcaattgattaatttgcacccatacttttttattataagtttcaggaatacctaagattcttccaattgttagtccatcgaataatgacaaaactccggcagcgattaactccaggtttacatcctctttaaaccatccttttttaatctgaagttgcatatgatcataagttattttatataatttctttctgtgatctctcaagatcttttgaagtttaggattccttgaagactctgctatggcttcaaaaaaaactttttcactgccttctctttgtatttttcgaaattcatcgtagaatcgttcagtattagatagtatatcctctctattttttatgaaggtattagtaagttgtaagttaagtaaattcaaactatcttcagcaatagcctgaaataaatcttccttgctgctaaaatagttatacaaagttcctttgcttaattcggattcattaactatgtcatccattcgtgtcttatcaaatccgtattttgaaaaacattttattgctgagcgtattatctggctctttttttcttttttgtattcagtggtaactcttggacacaaatctatccacttttactatatcatggcgatgttttaaactcttgcgataatacattgggaagatcaaatttactaacaaaatagtccgatattacatttaaaaaaaataactccgtgtttctaaatatcttaacctatttatacagttctgatatttaaatgtgtccgactggtcagtttactttattaaggagattgattgatactgttgtattagagatccaatgaatatcagcagggctcaacataatcaaaataacccaaatcaatcaagagatgaagatcatttggttaatttgaatttgaaaccttcttatagtaatcatcaaactcgtgttagccaaaaagatttacaacacaatatggtagaaggcaacaatattggtatggttgattctacacattatcagaacgctaagcaaattaataggactaagattgcaatggaagtgagaaatcttcataaagtttatcaatcagaggctggaaaggctgtagtattagaggggattaattttatcataaaaaaaggcgaattcgtttcaattgtggggccctcaggaagcggaaaatctacgctattaaatattatgggtgcactagatactccgtcctcgggtaaagtttttatcaattacgtggacatattcgcattatctaaatcacaaattgcagacatgagaaataagttaatagggtatatttttcagtcctataatctgataaacagaacaaccgttcaaaaaaatgttgaaattcctgcaattatctcgggtatgggcaataaacaaagaaaatcacgtgctttaaaactattggacttgctaggaattaaagataaatcgaattacaaaccaactaatcttagcggtggacaacaacagcgagttgcaattgcaagatcactgatgaataatcccgcgattattctggctgatgaggcaacgggtaatctagatactaaaacgggtgaagaagtttttgagcttcttagaatgttgactaaaaaatataatcggactattgtttttgtaacgcataatcccgaacttgcagcaagaactgacaggacaatatttatcaaagacgggaaagttgaaaaagagtcaattaacgaaaaatttgcattagcaaagtgatcaaattccaaaattttgtgagataaaataaatggacactaaagaattattacatgagaagaaaactctatgggcttttgctttgattttattgattcttatttactagtttaccactttattctaattattttgtacatggtcaattcctgtctacttcggatattcgaaatcctttgtttcttgattcttactggaccgatactccttccacaaattcatcacccatggatttaaccaaacctaatagaatagaagtggggccaggcgagggaccttccacccttgcggtcattattgtaaacacgggtagaacggatattactggactaaaaggatatcttgcccttccaaacgaatttagatctattccgggccaaaatggtgtaaatactaccaaagtttctatagctagttataatgctatagttaaaccaggagagagtttcccattgtatttttctgtcgatgtgctaagaaatgctacggtaggaccatatgtgtctaacttagagatagtttattcaaaagttcaagaagttggacaagtctcaaccaccttggaaattccctttagaataacaggtaaagtaatattggatgctacttcacttactcaaaatctcaccacaggtactttaaacaatgcaattattgccataaagaacaaaggttcggctgatgcaaatggtgtgatagccaccattacaaatctaaatggtaacacagttacaaatttgggagatagttctaccaaccagcaaaataacaatattggcaacaacgaagataatgctacctcgtctacagcacaaacaggatctcaagagttaaacgaaataaatcaaactgattcgaatattgcaacacttgaggcaaacacctttgacatagggaaaattcgagcaaatgagttagtccagataaggccattattgtatgcggattataatgctggtggaacaattcaatccatgaacttggaaatatcctataatgatgcatatggaaataaaaaaactcttgatacctcagtaggcttggtagtttcacctaatcctcctgaatcaacattgagcattcgaccggcagataatagatcctcgttatcaaatacaagtttcaacaatggctcaacaagtgaaatacaacaactaccgcaaaataacgacctcgattcaagagaatcaattacgattagttctggtaagattgaggaaatgaaatttgtcataaccaacactggaagtagcgctttagaaaatgccatactatcactttcctctccttcagattcggtcaaaattctaggaaacacgaggtggtcggttcctctttttactccaggaatggaaaaagagatatctacgttggtttttgcttctgaagatatgataagtaaacccatatcatttacaatagatgcagaatatattacagggggaaaaacaagatctgatgttctcaaccttggagcatatgttgaaggacaaataaaagtagcattatatgatctagccataaatgagatagggggatttccaaatttggttggtaatctactaaacgaaggaaacaccatggcattttttactcgaatacaagctgaaaatgacgcatccctcacttcaaaattagagaataatacagtttccacttctgaggctggcttacaaaacgaaagttctaaacttgtaaacagagttaatgaatcaaatgctgaattgttttcaattcttcccccttcccaatatttaggtgatcttacggagaattcgccacttccttttggaattccaatcaatattacagaaagcataccttccggagaatatcctattacgttaaaagtaagttttaaggacaatttgagaaacgatcatataatactgcttaatgataacgtaacgttcaaagctaatgctcaagaaacagaacagaatgaccaaaatattcttgggatcaattacaatctatttgtattgcttgtaatacttttagtaggtataattttagctgtattcttcataagacgaaggaaaagactacaaaaaaaatctaaagatccaacaacaaatgactcgatgagtgagggcgatagcaatagtacaaatgattctttatttgatgatgaaacatgactatcaggatacaatgagatcgcgaggaaaaatttaaaggagtagtaggattcaaatgaactttaaacaaatatttattttatcttttgatgcaattaaagaaagaaaagtcaaatctatattgactataattatggtaatggttggtagcagtctcatggtagctgtgggtggaattggagctggattttctgaattcttcaacaagcaaacaagcaacctcgctggaaatattatgttcattagtcctgcccagcagacatcaggtggcgctacagctgggccatctacaggtgcacccgttcctccaaagattactttaaatgaagctgtagaaaatcgattaaagtctttaccctatgtgaaagaaactattcccgtataccaggcttcagtgacactaacgtctcaaggtaaaaccaaggattattcagtatttgccattaatccagaaaaactatcagtgttgtctcccacattagaatatgtagagggatctgctgtaagacaaaatgatccatcatcggtcattatatctgaagatattgcacatcctcctggagatccagtaccgtatttaactttagggcagacagtgaggatgtcatattcttttgtagatcctgtaacaggtgatgaagatgaagaggttaaaagcttcgtagtaagagcaatcatgaaatctactggtaatcccaatatagataacgccgtagttattagtcctcaagtagctaatacgttattccataaatccggaaaatttgatgccatcattgttgtagggatgaccgcagatctaatagatacgatcgaacaggaaatccgaaaactatatggaaacaatattggcgttacgaccgtacaagccattatagaaacaataaaggaatttactagtggtataagtgcttttttgctaagcatagctatagtatctttaattgtaggagctgtaggaataattaccaccttatatacatcagtagttgaaagaacaagagaaataggaacgcttaaggctattggagctagagactcttatgtcttgtcactatttctagtggaagctctactaataggcatattgggtgcgtcatcaggattaagtacgggcatagtatttgggtatttgttaagttcaggaatgggatcaggcgaccaaccaccaattaaccccgtatatactataccagatttaactagggtatggcttattacagtagcactaagctttatggcaggtctttttccatcgctaaaagctgctagattactccctgttctagctcttaaaagagattaaaccaatagatgaaacggtaattaaacaagattacttcttaatatcataaaaaattagatacccctggagaggattttcaattaccgacactggataggatctcaattgtcatatcaaaaccaatcgttggttaactcattgtttgattttgtttgctatgaagatactctttataatcttcatcaatttccatagctgcttgtaaaatcttgctttttattgtattagatgaattaataaacatctttgtatcctttggaagacagtgacctcctattccatctcttggttcaagtatgtctacattccatttggtattgagagattctcgtagttctgaaaatcttattccatttgatttgcaataaaggtaaagctcttctgcaaatgctatttgaagatatctgtgagcattctctactatctttgttaactcggctacttcgacagaagagactggatgcattggtatacccaagccttgctttggtttaatttcttcatagtaatccttgtgctctttaactggctctgtactgattcggtaatccattttatctatcaagttgattttattttctgatgttattacggtcgatagccggtccttaacagcagtatcagtagtggtgatactaaccgctgcagtagtattgtctattacattagtgccacctatatgcttccttgtcgtatcgccataaaaatccagtccatgttgcaaacaacagttgcttacaccgccaataacacgcaattgattaacaccatgaatttcttcttctaatgcataccatctgtgaggtgcatgtactacatgaagtctatgatctaatttttcaaaaactttttttgatgtaccttttggtattgtactttcaattgaaatgagtgcactactctttgcctcttttgagatcttttgaacaactgacattatactatctacttggggtgagaacatatcatctggtctgtgtgtggatacgcagattataattacatcaaagtcaccaaagtttgttgcttgttttattccatagttggcttcagctgattgcatggttttttgatttatatcgtatccataggtatcaaaaccatgttctttaacatattttgcaactggaagaccaagctggcctagtcctatgactaggactttctgaaacacattttgagatgcgttatcattcttggttgttctaatcatgtccctcatcaaaagagtttgaataatgtaatgttgaacattataatcatgtccctcatcaaaagagtttgaacgatatgacagatatccagatgataaattatcatatttcatataataaataaaaggatataaatctaatatattaaactgactggtcgggttatatttatgatctcattaacaaatgtatattaaaaagaagataatcaaggaggttactaagcgacacctttttttatattttgtttagagaaaaaactaaacaagtgaggcgatatacaatctaaacctcagcaagatggatttgagctagatcatgaaggggatgtatgctagaaataaaactataacagaaattagtcacgctttatctttttgttatacaaaaaaatttaaaacaaagggagaatgataaggtattacaaaattaattttggatttcttcacagtttccagcattgtcatcaccctcgtctatattgaaatcagtgataacatctattccctcaccacaatcaaagtaatctgctccaggtccgccaactaaaatatcgtcacctacatctccgtaaagtttgtcatttcctgcttctcctactaaataatcatcatctataccaccggcaagcacgtcgtgtccttcatttccatttagttgatcacttccaattcctccttgtagaacgtcattaccctcttcgcctgataactgatcagcaccttcatttccttggattttatcatctccggccattccgtgaacattatctgaaccatctaaggctactatcaaatcgactccctctgttcctgtaattctatcattaccaaaagaagcaggcataaaatttactccactaatttcatttccttcttcgtcctgtggtattgaagaattagaaataggagatgaaatgctggtatttgacgacgaattattaaacggcattgattgattgccgccggaattaattgctggtgagctaattctagtagtagcgtaaatagcctcataaccaatactgttagagagtataacaaaggacaaaaatgaaagcattagtaaaatttttaaaaccatacttaagaatcaaccttctccttaataaaggaaactgaccggtcggacatgtataagaatactaatactacatttatcctctgtaacatcagtatcaattactcacttttagattatattaaatattaattctgatttcctcacaattgttttgagccacatctccttcattttttctaaaatctactataacatcatatccgccaccacaatcaaagtaatctttgcccatttcgccctccagtacatcatcaccttcatcaccatacagacggtcattacctaaacctccattcaaataatctccttctgttccggcaaaaatgacatcatcgccttcatcaccaaatatgacatctgctccagaattgccttgcaaaatatcattacctctatttccatacaaaaaatcattatcctgtcgtcccatcaaaacgtcatctgcatcttttcctttaatagtattaacaatactatttcctataatgacatcacttttatcagtgccctttgtggtatttgattcacctggctcgggaacaatttcaagattttctcttgtgtcttctcccataacaagcactgaattagaattaacaaagaataatattattaatccaaataaagaataatgcagtataggacttctaaaagtcttcttcatttttatgttaaaagtattaaaattctatttatacatttgaaagaaatgttatggtgtgatttatgtatctaattatttaataaaatatacataactgctaataaaggaaactgaccggtcggactatatagaaaattgtaatactacattatcatggagtaacatccacatttttgaaattctttttaattacattcgcttttattttaaattcttagagcataattaatataaatacgtctaataattataatccgacaataattaaagttatgctcaaacagtggcctttaagagtgtcgcgttagtcccttttttgaaattatcatacgccatcttcaattgtggtatcataaatcatgcaatatatttacaataaaataaattgcaatgcttcagccattagttaattattagaaaattgtatttatactctgaagccatttaatccaacaaagagaattggattggtgtacttcatagtatctatcgccttagtttgagtgccgcgaatagaatggtcaattaaaaacccatttatcattagtgagtgttaagagtattacacaattttcagattctgaagtatcaccttcgtcaattagctttccttctgtaatttctaatcggaccttcaggcttttaatgcggtcattgaggctcatcatgctgatgaagttttttgtcctatgaactacttttttaaggtcatcttgtgtattggttgatatatagtgtttagttttcaatttttcttacttgagatatatcataccatataattgcaaaaatatttttttatgaatgtgtgtccattccttaaataaaagtaagaatattgagcgtataaaagaagaccaagaattgtcatttataaacaattcggctatgttagaagattagttctatatgtaacatcttacgttcaaagtgagataatcaattgtatttcgtatacaaataatttatatattattaattggcatatgaattgtattgagtcaaagtaaggagaaaattgactttgaaaattccattctatttataattaacaagactgcaaaagcgctaattcatacagttgatcaaatgttgcgtgccaaagttggcataacatatggtcaatggagggtcatcacagttttagctaaaaatgacaatgaggataagcatcaaaacaaaggtttgactcagaaagagattgcgtccatgataggcattgaggattctaccattattccgattattgataaattagaaaaaaatggactggtccttagacagtcagatagttacgatagacgcaataacaggattttgttaactgagaaatctagtgaagtgctagacgtggtaatcaattacggagaaaaagtaaaaaacattttattgatgaatatttctgataacgaattatcaataaccaaaaatacattagagaaaatgtggaacaatatacaatctagaagacaacaagaatgtcattctgatatagcatcaaaagagaatcctagtaacaaatctaaattagaagtaaattgctttgaagaaggcacaaacaacttaatacagtagatctattaccttaagaaatctttagaattatgtagttgatatatatggtttcgaataaaataagtcctaaaaataatagaaaaaatgaaatgaaaaaaaatcaatctattactaacaatattgcttccatacaacatcaagaaaaagttcctttttcgtcttggaaagtcctagtcatactaagctgtattgctacaatggttatgtacgcagaaacaatgctgataccggcaatccctacactcgttaatgattttcacataaactatggattatcgtcttggcttttgacagcttatcttgtatcagcagcagtcatgactcccatagcaggaaagctttccgatatttatggaagaaaaaaggtgttgttaattatcatggcaatatattctacagggatagttgttggagcaatttcaaatgatatttatttaatgatatttggaagagcaatacaaggtattggaatgtcaatgtttccaatagcgtttggtatggtaagggatcagtttccgcttaataaattgtcaatagcacaaggattgattacatccatgtttgcaataggtgcggtaataggtttatcagttggaggtatcattatccaaaactttggatggcggatgacattcataacgataattccaatttcgataatacttttggtagtaataaagaagtatattaatgaaagtacttattgtggctatgaaactcagaatttgaaatcagaaatcaaaatagataataaacaaggtgaaataaaaactaaacatcaggatttaaaaaggtcagaaaaagttagtaaaagtcaaattgatattaagggttcggtattgcttgcgatatttattacgtcgcttctccttgaaataacgttattacaacctgactcctataaacacgatgtctctccaagcggagatgctgccttaactgttttacctatttttgtagtgtccttagtatcgctcatactgtttatactagttgaaaggcgcgctatgcatccacttatgaactttaaaatatttttagaatccaagattttgttttctagcatcataataatgatcgtaggattatcaatgtttatggtgtttcagactattccaatccttgtacaaactccaaaaccaattgggtttagtggaaatccatctgacacaggacaaattcaattaccgtttgcgatcgtactattaatatttggaccaacatctggactaatcatatctcgactgggttccttgaaaccaacaatcttaggctctgttttgacaaccaccggatttacaataatattcttattacattcatctgaaatattgatatccgttggattagcgatcgtgtcagcaggcttatccttagctgcagtcggcgctatgaacatcatccttgttgctacacctagagaattttcgggagtaacaataggaatgagcagtatgttaaggataataggtagctctatcggtcccgccctagctgcaatgcacatgcaaacaaatcagtcaacgatcactaacacaaatggaattactcaaatgctgccatcatctctttcctttgaccttatttttcttacagccgtgatactgtcaagcatttcaattttgatatcactgctgctcatgaaaaaagcaaaatctcaatctgaaattattgcctgagcaacattccaaatgataaaagaggtcaaataaataaagaatatctttcttctaactgtggagagtcacacgtaatgttcggttcgtctataaatctaaaaaatattttatctgtcatcaaacagcagaagaaatcagatatattatcacaacattgattctaagtataatatagagagactgtatcctatgtaggattgatgtgtgatctttataatgttagtataaagtgaaaatatactatgagtcactatatgtatcttataatacactaaaaatgtattttgcttgacaaaaactacagtttttttatgatctccaactaaaatttctatgttcaaatttgaatttttcattgattttaaatatgcttcaatataaaatatctgaacaggacaatccaattatgactattttaaatatttgcaattctaaaaataaacaaagtgcctactgaagaattaaggaaaaaatttactaaatggtttaaaaaataccagcctcaagaatattatttctttagtacgataatttcggccttcacgatggagaatatgcccaaatttcactaaatgtaaaaaaaaacaagaagaagataaatatcatttagccgcagatccctttacagccatattcctcggatcagtatgtaaaactattatggaagaaattacaagcaatttggaaacaataatttcatatcgagttcaaaaggaattggagaataactttgaaatcaaatgtataaattgtaatgctctgaatctcaaaacagcagaattttgtaaccgatgtggacagaatcttgaaaaaatagcaaaggaatttagaattatcatctcttatctctgtattgcctgttagtaataggggaaagaaaattaaattaataatgaggccaagattataaataaaaagaggaacaatccattagattttattgatgaatctagatttagttcctaagtgtcattataataaagattgggatttagttttatatgacatctaaatttatgaggaggtattaaatttaattatccagccaagatcctctgaaaccattcttttttaagcataaaaaaatagaatttataattacattttttatttattattatctcctattttaatagatttacgttatttccaagcggtaacactaaattcattctgcttgtaaaagtctggaagtagatgaatctatacatttatacgattaattgcgatttacattttaatatgttttcctttaaaacggaacatgatgattctaatctatcaggtaagataagagaagatatgaaagactatatcaattttatgtttccagaaaaaagtttcaaagaaagggaaaaaccaattttgtatttgattaaaagttgtgagaattacgatcttaacgaaagagaatcgattgaatcaattaacaaggttttaggagataagagtatatccagaagaacatactacaactataagaaaaaattgtatgacagtcagacttttggtttactaaaaaatagttgctataatacaattggtgtaaagttgttcatattagatgacattttaagtgatggggaacgtacggagaaagcagacaagctaataggtcaacaatttccaaaacgaaaacaagttcttgaagatgaaggaaaacaaaaagaggagttagacagaattatgaatagagctcaatcggatataagcaaattccaagaaatggaaactagacgatcacgtatggattctacattaccttcaaatcatacaataagagaagagtttgtcaagtgtggaaaagaattttgtttgcagtgtccacatggaccatattactatgcctattggaaagattcaactaccaaaaaattaaagaaaaagtatctaggatccatagacccaagacaatgaacgatttatttaattcatgatttaggttaattgattgaattaagcgtaatatttagtcctaatagtaaaattttgcacttttcaaaatatcttatgtaactaatccaatcatgccatgataatctaattttatcttcatcctaattccagaatatttttaaatataaagatcaaagtatgagtatgggagatgttgaaaattttacaaatgctcctattataggtaagactattcaagatatcaacgaggctaattctacagctttggttattcctaaagaatttgttaaagaattgcaaattgaaaactccaaagtgtcaatgtccttgattaaggatttagatggaaataagcatctgttggtttcaaaagcctatatggagattgttttagattagaaggttggtattcgacagctattccgattccaacagttttactatgcctaagatgaataattcactgacttcatttgaattatgatatccctctccagtctaaaaagttcgagtgtgtgacaatactcaccatagatattgttatcacaggaactaattaatcacaaaagggagagaaactatactgaaaggttaaagaaaaagtatccaggcgcaatttgccctataatatacaaataaattacttcagttagttttgaaaagtttgactatgatatttttaatgccttgattgttcaatgagtctgtgatttttgaagattcctaaaccttacccttttcaaaatatcatatgtaactatcctcaactttcttgattttattccaaagtattgctatgtttataaacaatcaaattattttattattcagatggaatactaatacactttaacttgcttttgacgttatgtgtgttatgcatgttatgatattacagtaatctgatagaaaagatcaatattctattagaataatgagctagtcaaatccttgatcaaaaccattacaaaattctaatttagaatcttattacatgtagattaattatcctctcaatcataacatacataacatgcataatatcttaaaatatatttgtacatcacttagttgactttcttaagctaaactgttaatcgagtaaatctcatctttgcttttttagaaatgatctactttgttatagaccttctcatttggtctttcttatatcaagtttgataatgctcgacatattttattatcgttttacaaattggacaatcgttctattcagaagataaaataaagtataagtatttttgcttacaaataaccagaaatgaaacgcccgcgcctaattgtatacctgctaacagttctaaaggataattgcctccagtggttttaacactccgaatttatttagaccattacaggtaaaaagtaaattaaccctaagcaaagtatcctaagaatatagccggcctaatttattaaatgttgttacaggtagtaaggaggctctgggtgcagttttgttactttaaatatatgaatataaggaataataaaattttctccgtagagctttgtcattggaattatgagcaattcaattgaaagaatacttgaggttaaagcgttgaataatattttatattaattagacatgtaagataataatccgtctttacgtcaggtttgaagaatgcaaatattcaagccacctagtttataattttatttataggacagtggtatttagaattaataattagtagatagaagttaattttgctaactaatgctatttagtgaagattaaaggaatatgattaaaacaaagtgatctaatatcatacggtattttggtttcccatatattgacaatatttaactcgaaagtaatcaaaattgaccattaagacttattaacatgtccaaatactcatatataatgttacgatctgaaactaaagttgtattttatacagcagatcaggaacgtaacctttttgttaagaatatagaaaacgaaattgaaaaactagaagagttaaatgtaaggtttgtcgtgttcagagatggaaattcaaacattcctaaaatgttatttaatggctatgttacaatgggtatggagaatatcaagaatgaattaatacaaattacatcaaatctttaataatattatgcaaaaaactctgatattgatttttagtcctcctgataaaagaaaacacctatcttctttttttaagaaacaaggcgttactgtttatgatattgatgacaaaataaaatctttaccacaaaatgctaatcaaggattaagagatataataaccaaaaattcaagaactactttacaatcattttggagaacagctgtggatgaagtgttgataaccatatcaaattcatctgctcgtacagccgttctgctcggacatttactttactataaggatttcacaaaggaatttttttctatttttgatacaagtttccttattcaaaaagctactgaaagagaaatttacactggttatacagttttgattattgatgacatttatgatatatttaatagtcttaaaaagccggacgaactgttcggaactagtgcattctatgactttcttgataataattttggtagatctatttctgaaaacaaacctgattataaacctcatatgagttggattcactactgcctcaattcaatccttaactggagaattcaggagattactctaggacaaaatatatctaatcaaacaaattctaggtttattttatggggtcttaaacagaatcctcatgttttgttaaaacttatctcgcctagtcctcagcaggaaattctttatttatcccatccaatttctgaaccaagaagagagtttaaggaaaaaggggattggccgaatttagtaaaaatcctaaataattttcaacgcgaattgttgaaaaaggatattttaattcaaatgcctacttcaattgacgaatacagattggataaagatcatcatggtaattataccacttttctaacaccaaggtggccattagaaggtgaatcaaaaaaaatacttattgagaatgatctaattgatgaggatatagataaattaagtattatccatcctgggaaaattgaaaatcaaaatggatcattcaaaataataacttcaaatgaaaaccttcaagataatttggcccaagaatacatgaacggagtgattacaaccttggaaatgtgcattaaagaacaactagcgaatcgggatcatttattggttttatctacaaatggcattatcgtaattgatccatattccataaaggaaagaaaaattcatcgaggagttcaaaaagaaattgagtatttaaaacaaattaattcatcattaacttcggagagaagaagaatttgcggaatatttctagaatcaatggctatggaattgatcaatgatgatatatttaaaaaagaatatgtctatgaattagcaactataatttctcaggatcagaaattaaagttaaaggatgttttaaattctttggacagtaatggacttttatcttcttcatcaggtagcatgggtaagcagtttattccaaatcatatttttactaaaataataaataacttgagagtgtatcaggaaagagcacttgcaacaacttttatttcggttacactggggctggaagaaaatgatcaagaatttgttttgatgaaatttgtagttaattttgatatggtttcaaatactgagataattgaacagatacaatctttttttaaatcaggcaatatcgatatggaatggaaatacaagttgaaaaaatggtttaatttaattaacctcagtaaaaatttagaccgaagtacatacatgctataagtataaaaaaactcttaacaagttatatgtattcaatgatttgagtatttgttggaagatttctgtttacggttattcttagatactcgtttataattttcaaaatcattattaatattgtttatttgtattgatattattgtaataatagaattcaatgatagctgtcaaatttttaaggcttaacttaataatatcaaaataaactcatcggttaaactaaaccttgtttttaatttgtaatttctatacgtatattctcaagatggaaaagaatagaaaatttgttaatatatatttgcacttttgaaaatttcttatgtaactaaattcttatttccaaatccctttttattggacaaagtcgggaaccgaagatgagagtggttgtcaaagatcatcgtgggagatcataaaagttgtcttcatatcacttttttttaatactgacgtctgctatctctagtgtatctttcagtttacctaatagtaatgactcatatttttggaaattaatgttgttcatgtcaggaatattggttgaatatttagcaccagtgtattcatctactgaatttgtttcaaaccaatagacttcttcaccttgatctttacccaataatctacctaatcgtcctgctcttacgctttgtttatattgttctggattatattttagcttctgcgcaaattttaactctctatcaattctttctgctgatttgctaatttcatttttcagctcaagcattgcgtctctaagtaaatttggtattgtttcaaatcttttatcgggtcttttaatgatttcagttagaatcttggaaaaccatcgtcttacccacaaagggtttgattttgacaggccgtctaacccttttataatgatatcttcattttctttaccggaccaacctacgaatctatttttcttaccattaataatcgaatttacaaacttgttttttatttcaatagtaattccaagttctttcttacaactgctgatgaactggtgaatcttttcatcttcggtttctcctattcctaccttatttacccttacaaatatcgaatcagtaaatccaaatactatatcaaaattaaatggtggttgttttgcaatggtttccatttgaatgtgaatccgccttgcttctccagttatacattctgctaccatatagtttgaaaacagaaagtatttggctccaaataatccatatccagcatttgcaaatagttttgcacctaattgataagtttgaaattcttctaaaagcaaagtatttggattggatttggatttctctttctttagtaaattcaaatacttttcacgttctgataaaatgtttagtagtatcaaaggtaatgctccttgtctttttttacatatccaataatttgagaccctcctgctaaattttttctccatcagatattcatttattaaatcaatggtattttggttcaaataggcagaatgatcatttttgcaacaatcgcaatttagtgtatcaaaggacagattatttttaatgataatagaaggatacattccttttacgtctaattcataaacaacagaatcataaaagaaacctttttttggtatagtatgatgtccaccaccatattcttgcttttctaacttgtagtttggagtatggtcaagcgtaacgtctcctctagaaatcatcttctcatatttattctcgtaccatttgctgacatcagtattacagactttgaaataatccatttcagcatattttgaaaattctttcatcaaacgcaggacaagacagttattatattgagcaagaagcattgcaagttcggcatctcttttcacatattttttttgttcatcaattggtttatctaatatatttaccgtcccagcattaatgttatcatattttgaaattcctaataatgcagagcttacattttctagactaggagttccatattttccttcaaatacattatcctgtattacatttttctcaaatactttgataagatcaatgtgtttatttactgatcctttttttagagctatatagttcctattatatcctatttcaaatggtgaatccaagttataatataggcatctttgatgtagtatgaaaaagtctgaatctctacctttcagtctttttccatttttagcatcatagatagctattcctgtagtataccaaccaaatgttaatggaaattggttaaagtaagataaaatatcctttatcagttccttttctggatacggacaattaggtgtctcgtatttagaaatatgtaatacaatcctttcaccccaattggtacaaaatgctgctgcaaatatcttggtttttgaatgttggtatttacctttgtaaggaacccattctaaatctaaacttgctgagtttatgacttcgttcctataactttttatttcattaatttcgttaattcgtgaattaagtttatcaatttctaatagtttcataaatatactcacctggtattagacctagaagtaggaggattgtctataggggatggctgttctttagagtctcttactttttgaatatcttcgttagtaaagacgtctgcattgggagagtgttttagttggattttaggttctagttgttgttgatgatcaacttcttggttattttcggagttttttgaatcttgtctataagaagaattttcattactggtatgtgatgtatgtgatacatgtgatgaagaattatgatttgattctaatgtttctttactgttgttatccttctttgtatttgcggcactgtttgttatacttgtttgatttttactgatagtggaattatcactctcgttaataactgatttattcgaactagactcatcttttgttgaattttcaattaatagtgaagaagtatcaatagcactagtatctgtgttaactggaataatttctgttgattcagttttgtcgtcatcacatacatcatattcgtcacatttttgagttattgaactgggcagcttactggtgactttttgatttttctgtttctcaacttctctaagggttggatcaactgctacttcagtattaacaatctctttataatctttatctaataaatgtacaattttattattatttttctcattttcttttgtttttacccatcttagcgttataggcttttcctgaatgatttgtatagcagtatcgtttctaagcaaaattagaatctcttgtagagcatggctattatttagtctaagactatctatgttagtattatttttgaattttccttgtccaagcaaatgatatttgacatcttgatttcttcttgaggcttctattgcagcatccgttaggaaaataggtgatccgttactttcctttataatttctttgatagccaaatatgctccgtcccgaggtcttgttactaattgagtagctagattaaagtattttaagccttcattatagaacaacattgcttcttcggcatcatcaacatcagctatatcttttaatttcaattttgcaatggctagagtgattctgattagagaatcaaatttacgggcaagacctgaaactcctgcatatcccatattgataaagtattcttttaatagtgaaaaagcatcactagataatacgggtttaaaattgcgagcatacaagatatattttctgacaaattcttcgtttccctcataaaggccagctttataattttcagaaacttttttcttttcttctacatatctttgaaggtattcaggatcctttttttcacgtaatacaaatatcaaatcgaatctgtctattatttgagatagggtgggaaattctgcaaaactagcgacctcttcgttctgccatttgttgtttataggattagccgatgcaatgatagaaggatgtgcttctataaatgttgaaaaaccgtatttagccattggatggccattttcttccattgtatctagtagatgcttgtgttctgatagaggaagctgacctagctcattaatacaacacaaagaattcttggctaacactactggaccaaatctaagcgtatacattccaccatcttctttacttatttgagaagtgaggcttagtcctgtggagctttggcctcctgcatattgtgagttgggaaccaatctagtagacttttctaatattgttgtttttgcaagtccagggtcgccgattaagagcgcatttatcctttgtcttttgggaaacctactgtctatatttctcagacccgcatttacacatacaagtaaaacacctttttttattctatctaggtctataagctcaggtgcaaataactttactacttcgtctataggatttttatggtcgttttgtattttttgcttccagtcttgtatttcttgtatatctttatctgttaaaacaaactcttttcttctttcatattctaaggtatcagcaaacaaaacggtttcaagtttgttgttgggattatcgttttttcttataactcgcagttgacctactacatttactacttctcctgctatgacatcataggtattcttttcaaatactttgactgaaagtctttcaatttcactaaacgtttctaaatcttgtagttctaagtcgaccacggaaatgtattcaggagtagctgatatcgagttaccagtgttttgtcctttagggcaaaacggacatttgcttttatctttatagggtagcttgaaaatgggttgatcaaagtcgatatttgtgtcatatccacaattatcgcagcacaactctacagatactatcatattgtaaacaggtgttaacccaataatcgtcccttttacctttacaaaccctgatttttctctctttgctggtcctattgataaatctcttggaactgggttaccctgtttactgtcaggattctttgtatggtaaatatcattcttccacagtgttttaagattgttgattaaattatttgaaaactgcttatcataacccttaagattgacaataagatctgcaagagacggcgctcccgttatgggtcgtccattaaggccatttctataagtagattgcaaagtaattactctattttttttctcagagtcctcagatttgtcacatattttttctattatttttttggctgattcttcagatattcgtaaatgaaacgtggttccagaaaaggcaagtacaaaattgtttctgtcatgttctatataataaggtaaaagataatcgacagtagtttgaatagttccttctgaaagatcacaatattctttgtttctgtgttgaagattctcaatatttttactttcatttcttatatttttcctatcattgtaatcctctcttaaacaaccattgaaaagttctctgaaaagggcatataactcgtcattgagtaatattttgtcagttatacctagtgggtaatatcgaaatttcttatcatctctgtgagttgatggaggtaatgtacatagagctttgtctgttattatttcaaaaacactatctattttacaatcattctttcgtattgctatattttggttatgcgatagccaccagatatggtagccatgttcttttctcgtctttgttacatatgtaaacatctttaaaatgtcaagaattgtagaatccgagaattctctttctgttatattccaagaatttgcaaagatattgtagaatcttgaacctagtttttcatagtcagccagctgagatatgggcgtattaattagagcggatgcgatttcagaatcaatgtctaatacttgaatatataattcacgatcttgagaatctctgatatgtgttctccctaaagcactagccacatttttgaattttaaataaacacttggatcgttaaaatcctcaagtttccaataatgtggattctcaaaaaccggagtccattcatctactggaccatgattctcatataatgcaacaggtttgaaaccaattttgtatagatttgctaattcctcaggatttatgtgattttgctgttgggtgcgattactactataatctttgttataattattatctgatgaagttgataattcagatcacctcttggtttactgcaaagtggcaactgcatctacaaataattctaattcctgttaatttgtttgaatataccgttttacaatcgttacaggttattggacatttagcaatcaatagttctaatgttgtaggactgcttactgagctattttgtaattcataaagtttaattttatgtttatcgcttatagatattggaaattctttttcatccttcacttttttaaccctccaattttttaataattattttgttattgtctctgttaatttttacaaagtcgcctttttgaatatgtagttcatcaatgaaatttttcggtaaaactacgctgtgggaagccttacctaaaactccatttatcttgtggatatattcttccatatgtatataatgtataaactgttattagtaagtagcgtttaatactaacttagtatgatgcctattgaaaaagaccttactaagaaaaaaaataaaaaagagctgactattgaggaaattttacagtatagagagaataagggagactttagcaaggaagaaagaaaagatctaagactttatagggacattctgcgatttgttatttgtcaggatagcctcaaatcatcggatattactgaaattgacggaataaaactaagagaagtcttcaagtcaagagtcttgtgtaattggttactcgataataacgttgatttaattgatgacttcagaggttctcctattgctaaaacttatcgtgctcatactatagatgcaagaatctccaatagaattcaaaaactcatagatcttggattaattgacattgatgatgaagtggtagattctgaacggggtaaatcaaaaacacatcagtatgtagtaactagaagcggtatactaattgcctctttattaaatctacaaaaatacgaaaaagattcagatgaatatgtgaaaaatttgcaattcgtattaaataggtttcttgaataccttccttatacctataaaaattctgaaaattactattttcattttttaaaggatatatttcaaaattgttttaatcgatttcaggatatcttgttctatttttttaatttgatgctacaatatcagcatagtcttgccattaatttctctgtaataagaattaagcttaatgaattactttatagaaatatcatagaagaaaccgagtttaaacaaatattttataaatcattagctgagtttaatactcctttttggttacgtgggttgaaagataaagaaatagatgagtcactgatttacgaagaaaagactaaagcacagtatcttataagagcacaatttaaattggatgttgaggctcaaattgataaagagatatcagaagtattaaaaatcaatacggatattacaaaatcttttcaacttgcaaccaaattaaaaagacgtttctctgaaaaagacgtttttgaaaaaggactatatgaacaaatccaggaacaacatgtcttagactatgcaattagaactaaatgggagatagaacgaaatagcaatctttcaaattccagttgtataactataattgtaaaatgtcaaacatgtggttttatatctccctattcaattgaaatggaaaaggaatcttttaaccaagtaacttgtataaattgtaaagaaaatggaggaataacgtcatatgattaataaaagggataaaccatatttttggttatataattaatattaaaccctgacattatctgaactttcctgattcgattaattgctttgctattaactgttttccttgttcatcaactgaagaaaaggctttaagaaggttttgtaaaatagaatccatctcattgtatttaccttctagttctgttattttcttgttctcctcttctttgatttcatcaaatgcttcggaatttagtgggtaactgcattttgaacagtatcgattctccaatacattagataaatcacagcgtggacatatcgattgtattggtttctttttttgtatttcttctgtaattatcccattgtattctaatattttgttttttagttcattacccattcttctttttatataccgggtcccttgcttagaattcattgaccatctaactttctttttcaaagcatattccggcaggtaatcactatcggctgtgatcgccgaatgcctgatgcaatatgggttccatttctttgtttttagtaaatgacgaatacgttccaattcattgatatcattaattttattgttttcaattaatttttcaattctttttttaagttgtctcattacatcatatatctgatcaggtccaattgatgatcctgttaagagattgcatatcagcctcgcttcaggctcattcttaaaagggtgctcatttaaccagtctctcacgtaaggaaaagaaaaagtaagtaacattggaccgcttcctgttttggcttcatgtggaatctctccttcaccatacttttcctttagtctaatatgtttgatttttaataacgtgatctcgtgaggtctggcgtccaaatcccataacaaagatagaatagctttgtttcttttatatggatcatatttaataatcgtagccaattcgtctttgtcccaaatttctgtttctagatatggacttagtctctttgtccttttcattttaagattgataaagtctggagtattccatgtatcataggattttgcatttgagcctttatttctagcattgtataaccatctaaagaaatactttaatctccagagataatcattccatgtggtgatccattttttatctgggtcgtctttgtctgtttttcttttcaaatccaagaaatctaatacttgttctttttcttgaatttgataaaatgttgtataatttcccaggtattctgcatatcttatcaagacttttagtaatccattttgatagctctcagaagtatctatgttctgaagatattcataaaagtcgttaattatttgtctattggtctgatttgtgaccttgatttctatattcttaacggttgtggttaacttagcgggcaataatatacctccttttatctaatctcctgtacaacgttgaattatttgaacccatgtgattaacgggcccggtgggcttcgatcccatgacctgcggttccgaagaccgccgcgatatcctgactacgctacggaccctcctcttcgtttgatgtatatgtcttgttggcagttatataatttattgcgatttaaccttgtagaattttcataaaaacgcgaatttattgggatctttacagattcatgagacgttattaattactaaaccttctaacgtcgagatcggggattgatgagagcataatggaagtatttacgaatcatgctattacctatatcctggcgaggctctgatattgcactttgacatggattttactaaataaaaggtcatactagtatttggacatacttattcataaaatatataaattattaaaaacagtatataaatcaaaaaatatgtaatttttcaatgatacaataatataatgtataaactttttatgcaagtatgattttatttagtaattatgcaggcaactaaaactatagcatttgatccattcaaaaatggcatacaatccttagtagtacaactctataccttttgtacatcataccctaataaagaaacatggtctattgatgaaatttacgaaagtagatatcccaattcgagccacgatagagtaaagactatggaaattcttaaaaataatttaaaatggctaaaatctaaggacgcaatagagtatccaaataataattcgattaagttggtaaaatatagattaagcagtatgatcgatggagtatgaaaatttcgagagtaatcttctcagattccttgaattggtatttaataagtatattgaacttaagcacacctttatagtaacgatactaatgaaaattacaaatacgaattaagtagatgtactaacttatctctataatctctgcaagcatgtagaccaactaaagatgatctcctgttttttttcaaagcaagcacaacttttaatcttaatagaatatcaaagatctggttaaacattccttaaaaagaaaacaatagctaagaatgatgtgaaataattcaaataatgattacaatattctgtgaatcatatctagatttttggggctatttgcacattatttattttgattatcgcgaaaccggaatcaaaatagttcttatttatatgtctgaaaactctatctctctctatcatgactgatataaaatgcaagattattccagaacctcattccgatcgaaaggcggtatttagacaatcctctctaaagaccccttacattaatggagatgactatgaagaagttgaatctccaaaggtgtcttatctctgtggtaattgcaacttcattcttgcaaaaaatatccactcagatcagatcgctcaacttttaagtataaatagtaaaggcttagatatcgtactacaatgtccaggatgtaatgaatttaatgaattgaattcagacatacattcttcctaacttgcctgtattgatgttattattaatgatttttagattgcttactacgaaaaatgatggaatcccccttataatgcaatatttgaccttgtctatcttttgtacaaaagactaattgcatctataataatttctaacaaaagcatatttcgatgtatgttatagattatcctatagttttctcatcatttgcatctgcacgttcatgtaagccttgcacaacagcgcttaaatacgttaacgatatcgccgaaaaattcaaaatggaagtatgagctgtattatttaaataatagtaatttcattttatgtagaaaaatatagatacctttaataccttttctgataaaaactggttggaaaggaaagataggaaaagattgtctggaaagtcccaactaattgaaaaagatcataccatgtctactcttgactttggcactatggagtttatgaaatggctaatggcagaagaaacaggatcaaaagactgcctaatagtaataaaagattttttcaaaaacaaatatgtaattttatttgacaaaaatatttctagctcagttatagtcagttatagagaaagcatgccttggtgtattacttgtgatactgatgactgcggtcatgtaggatttgcaatatgtcttaaacagcactatgatagaaatgaccaaattgtttattgatttaaccgatcatttaaggcacttttgaattgtctcttgtgcctgatggtggtaattcattatctttatcctgatcttttctgtatctctcagtgaatttccaaccaaacttgataacataaggtgaaataaatgtggtgatgatcgtcatagttcctatcattggtaatataaaagcacttgtagctccgacgtctattccgcctttggctactactaatgcgatttctcctcctgatgatgataatcctacagcggtacgggttgaagacagattacttactccttggattcttgaggaaacataaaccgttaagaattttgcacctattgaaacccctattaggatcaatgctggaactataaataatggaataagtttaaagtccatcagtgctccaacagagacaaaaaacaaagccgcaaaaatatctttaaccggcgtagccaaaacactagttacagcatgcgaccttgactctgcaattaggacgccagcaaagaatgcaccagctgctactgatattcccaactgaaaagatataaacgcaaatccaaaagcaactccgacggcagcgacgattagtacatcatgttgattggttcttgcaataacgtcaattaattttggaactatttttgatcctactacaagtactcctgctataaatccaattgttattgctattgatatcataatttcattgaccgatatgtctccgctcactccagaggactgaaatatagctaacaaggagattatgagaatatcctcgataattgcagttcctagtattaaagtagcagcttcatctttcatcatattaagttctcctagaactctcattacaatgactgtactagttactgatatcgctaatgctatgaataaactgtcatagaatccgagtccaagtgcctgtgcagtaaagaatcctatagctaatgttccgaaggcttcactggtagcaatgataatagcttttcttcctattcttcttagtttctttatggggaattccattcctaccgtaaaaagtaacaatattacacccatctcagcaaataaattaagaacatctgaattatgaattagactaaaaggtggagtgtgaggaccgattatgatacctgcaacaataaaacctatcactacaggttgttttagtctgtaaaagatcaaagtcattacagaggcaataatcattataacggcaaaatcttgtaaaatttgttcaatcggtatttccacaacagaaatttgtgatttacgttatttaaatagtcactatatcgtcccaaccaaaatgatttagttattttgatcatcaatgatcaatgttttgttatattattaccaaatggttcatcttatcttcctactttttcaaggtaaataaatctgaaatgagttacctaattaagaatcgtgttaattataatatgctatagatttaacatatgaatggtatatttagttcatacaaaaaaagatacaatgcaaatgttttaatcatgagaaataaactgtaaaataaatctcgtcatgttcctttttattattttgacatctgattctaccatactaccaataaattctaaattttttacaaatgaaaaaattgatctgatcacatgaaaaaatatatctctatttccatttcttcataaagtttcctatttcataggaaacaagaaatttgaattggtgctttaataatatttttgtcttatgaaaaccgtgatattattttgaatgaaactgatcgggatcgggcttttaaatagcttgatatagttatctcctatcctagactggcttgtagaccatacaatctcttatctatgaaatcctttgttatcattgtaggtgattctatctttaaatcccgtgggagaagtttatttatcttgataaataattttattttatcatctgtatcttcctcataaatacatttcataatcatgcgtttaaccgtatttgcattaatcatattatagtattgataacaatgtttatattcatatcttttactatgggtaggatataaccatccttaattctttaaattattctgcacataaataatcaaattggacgtgataaattgtagctctttaggcgagattaggaaaaatattgattcaatagacatggaaattgttttattattagttaggcgcggtaaatatgtacagcaagctgcaaaatttaagagcaattattctaagatagaggacaaaaaaaggatagatgaaattttagataaggtcacaaactattcaagagaattagattttgattctactgtgatagaaaaaatatactcctttatgattgaagtttatattcaatttgaaaagaagaagtttctgaatccttagcaatcgtctatcacaaataatcagatttaaattctgtcattctactcaactttgtttagcaaagaattttgctcgattggtcaaaaggcactccgataattttgtatatcggattcctttgatccatcttctaaattttgtttgcctatttatatgagggattgactctggtcgactattaaccgacgcttaaaatcattaacccggttacttggaactattaagcatgaaacgtaatgttaattttaaaaaaatacaaatattaaatcagtttaagatacaattggaactagagcgttgatgaaaatatcagataggattagtcgagttgaatatgcaattcgagatgtcatgttacatgcaagagaatatcaaaaaactggaaaagaaattatgtatttaaatataggtgatcctgtagcttttgattttaaaactcctttgcatattaagaatgcgctagtagatgcacttgctagtgataatgattattatactgattccgaaggttggaacgaacttagacaatctatagtgggaaaggaaaaaggaaaaaaaggtctagacttgaccccagaagatgttttggttactaatggagtatctgagggtttggacatggttatgggctctattgttgaagatggcgaccaagttttattgcctgggccttattaccctccatattcctcatatgcaaaattttatggtggtagcataactgaatttgggatacatgaagacggtacacctaatctagacgatataaaaaataaaatctcatctaaatcaaaggctatctgtatcataaatcctaataatcctacaggcgaagtcttcagtcgtaagagcctgaaatctttgatagatttagctgcagaaaataacttgtatattatttgtgatgaaatttacgatgaaattgtatttgatgaagaatttaacgggattggccacatttctagcgatgccccggttatacttctcaatggattttccaagacttatttgatgactggactacgatgcggatatgtttgcatgaataacaattctaggcaactcgatccattgaggcagaatatttttaaacttgcacgtgtcaggattgcatccaattttccagttcaaattgctgcaaatgctgctttaaacggatcacaggaacatttgcccattatggtacagaaattaaagaaaagaagagatcttgtttacaagcgattaaatgagattaatgatttggaatgcacaaaaccaaaaggtgctttctatatgttcccaaaaattgatttaaagaataaatggaaaaatgatttggaatttgtgatcgatttattaaattccactggcgttttaacggtccacgggtcgggatttggaaattcaggaaccgggcattttagaatcgtttatctaccacaagaggaaattttagaaaaatccatggataaaatacaaacatttatcacaaaaaaagccgatatgacgtagtcactgataataggaacgataaggatagtgtcatatttcaattcataaatagatcttgcctctttcttctcccaaaataaactaggactagaccaatcgcatacatcactaccgtgaatttttcattggttatgtcggagttaaaaaaattatcgacaaaaaattctggccctaattctgttgatatgagaataaggtttcttattagaataatagttgccattattatgaatagtactccaagtggaaacatccattctttacgtctgtcccttatcctcttatctattttatcaaagtccattttaaaaattatttagtgaaaaaataatgtttataccagctttatccctggatgttttaacttattctgtttcgaagcgttaaggatcattggtgtcataacttctgcctgataggataatatgaggggccctaaataaattgacctcaagccgtttatttctgatactaaattcgagattattcctagcgattccttgttatcagtacaaataaaagtgtctgcattcaatgctgaatctatatctttaagttttatttcagatattgtatgaaatgctgaaactattttattacagttaggtaaattttcagcgaccattgttccagctgattttttcccttcttgaaaaggaatgtaatagaatccatcttgattcctactcataggaactataggtgaaactacgatgcatttgtcatcaatagtatttgctatatccatacatgtgctttgaatgttttcataagggatagaaagtattaatacgtcactctgttttgctaccgagagattgtcatcgcctctaattgttcctttgactttttcagcatttttgctatttttaatattttttatatgattttctgatacagtctgagctttttgtttatctcttgatcctagtatgatttcatgattggcacaccatcttaaggcaaacccttcgcccatgccacccgtacctccaatgattccaattttcatattaatgtgttagatatcaagttctaatatattaaagcacgtctggtctagatggagctggcttcaaagccaagattaaatcgtttctttaatccatatatgatgtatctttattttaggatacgaatggaatgagcctgtaaaaaaaataaagccaaaaacactaaaccattacaattaccaaaatatatatgaatagtttaatattgaaataatttttaatatattttaagtaaattatgtcacttattattttcatgaggcatggtcaagcctataataatgtcaagagactgttagttggaagaaaccttgaatctcacttgaccgaattaggtcgaaaacaggtagaacaaagtagcgaattactaaagacaattccaatacacaagatttattctagtcccgtaatcaggactgtagaaactgcagaaattgcatcagcagcactagggctagattatgaattagatgaaagattatttgaaatcgagttaggaaaactagttggcctttattatgatgatgtcctatctactcacggtgatttgtttgcaaaattttattctgataacgatgacgaaaactccttgctcgaatttgaagtggaatcctttggttctgtaagggaaagaattcgaaatttattgcaagaattcgttggcaaacatgtcgatgaaaacatactcttaatttctcatttggatccaatcaaagctgcgatttcattggctatgaatataaagccatcatcagtatatagcgtccaaatcccaaatgcttctatcaatgtattaaagaattatcaagatagtctatcgttatgtggtcttaatatcttaaatatggaacgatttcttactgaattttaattttttcattctgctttaattggttaaagtatagtaatttaagtttcgtttttatttcgtttgttattttgtacgattatgaacttggcctttatcaaatcaacattagcaaaaaccttaaatgacagaaagattcaccaatccaaagagagtggagattaaggtatggctttttcctctgttaacaaaatgttgttaattttcatatttagttctatggctgtaataggtattcaaagtataatcgaaatagcgtatgctgcagaaggtggtgaaactgtaatccgtagagttgaaatttggggcttattttataggatgatggttgcagcttttattgttggagctgtagtccagggtttgaatgtttatctttgctggagatttagggagtctcatccacgtttcaaaaatattgataatgctggaggtaaaatttagtggggcacagtacaccggaatgggtgtatataggagctgtcactgcaatactcatttgggtgggggctgaatcatggaatatagaacataccttagaatatgcgccccctaattcggaaaccgtacgggtagtaggtcagcaatggttttggtcatttcaacacgctgatggtactcaagaaattaatgaacttcatctaaaagagggagtaccttataggtttgagatagtttcaagcgatgtagttcatagttttagcgtaccggattttgccatgcttatggatgctgttcctggaagagttaatacaatgtggaatgtattcgacgaaccaggtgaatatctgattcagtgtagagaatattgtggtatgcttcatcaggatatgagggccaggttatttattgaacccaatactgacaatactacggctagttcaggtcaatcggagcctacaatatcccaaggtagcggaactgctactgtaattgcaccaggtggcggtgaagtgggttctactggaagtggaacaatgagagtggtagaaccaggaaatttgacccaggcgactgaaaacgactctactacctctacgaatgctacaagcggtgccaatggaacttcgtctggtaatgcgtcctcaaccgcatcatcagcggctggtccaactttgtcaatccctgtaggtgctgcaacccctggaaatcctgcatatactccagatacactaacagttactaagggagatgtgatcacggtgacaaacgacgatacagccccgcatactgtaactaatggagccagtccaggagatgctaatgctggacaattatttgataccggtattatgatgcctggagcaacagcacaaatagatactgccaccgtagaagcgggagagcatcccttccattgtaccgtacatccattcatgaccggaacgctgacggtacaataaccaccatttttttaaattcccatttttttctataattaatataatatagatattacaataaaaaagaaaatttttttagaaatttctgatttttgagacttttttatttattttaatattttttatgaaaaagaaaaatccaaatgcttttatagacatatttcgaatttattggatataggggtgctattgtaagaaaatggttctagaattaaaaaaacctcgacccatatgggagatcatattttctacccatcatactgatatcgggttattgtatattatagcctcattggtggcgttatttgctggaggcgctttggctatggctatcagggccgaattatttgtaccgggtctacaaattttttccgggcaaccagattttgctagattcttcacagttcatggaacaacattattgtttttgtggttgattccatttgcctctggagttggtaactatctaattcctattatggttagatacaaagatatggcatggccaaagcttaatgctgttgcgttttggatgattcctccttgtatgtgcttgctctgggggggatttgctgatcttacttggaatgcctatccaccatactctacattaaaagctccaggaccagccgcagatatgtggataatttcattaaagttgctgggtctgtcttctgtattaggtgccattaactttactgttacaatactaaagatgaaacatcccgatttaccattgatgaaaatgtcgctgtttagttgggctatgctggtaacttcgcttatgatacttgttgctatacctacctttgcggcgtcattggtcatgctttatactgataggttaggagtgacagggttctttaatccagaaatgggtggggatccaatagcgtatcaacacttgttctggttcacattccatccggaagtttacatatttgtcctcccggctataggtatgatgtatgagatgatacccacattctcccgaaaacctttgtttagctattattcgggagtaatagcgttaatcgtaattgctgtcattggatttggttcatgggctcatcacatgtttgcggttggtatgagctttacggaaaagactgtatttatggtgggaactctagccgccgtaccttcttctgctatgcatgtctttaacttcctggctaccatgtggggtggaagaatcaagtttgcagcacccatgttatttagtgtgggtgcgatactgttattcttctcagcaggagctgggggtgttgttaatactgcaatgccgttggactttttgactcatgacagctactgggtcgtagggcacatgcacttgtttatcatgggaactataacattggcatttattggattcatttactatctattcccgttaattacaggtcgaatgtacgacgagagattggcgaaaattcatttcgtaatgacatttgtaggaatagcgctcatatttggtgtgcagcatattcttggtctctacggaatgccaagaagagttgtagattatctaccttttccagagctgataataatgaaccaaatagcgagttttggtggatgggcaataggaacatccttcgcactgttcctatataacatgataaggtccgcaatgtacggtaagccagctgatccaagagatccattcaagttaggacagggagttgaatattattatgactacgcacgacgagaaccacatcattagaacctcccctcagcgtttcgccaagggattgataattatcgttatcactcttgctgtgttagggtatgtaacggtatttcattgggaggatactgcaagtattccgccaccggtttctgctcctcctccatcaccagcatccgcccccacatccgcgcccacacctgcacctgcacccggagcatcagaatctgcaactactggagctagttcttcggctcctgcagcccctgctgcttcaggcggtcccacgttatcaattcctacaggcgctgcaacccctggaaaccctgactatgctccagacacactaacagttgcaaagggagatgtgatcacagtgacaaacgatgatactgtgccgcacactgcaacaagtggcgacggaccacaagatcccaactctgcaaaactatttgatagcagcattatcatggccggtgagaccgcacaaatagatacggctagtttggaagcagatacctatgcttattattgcactgtacatccatttatgaagggaacaattacagtacaataactttcttttgtgtgtagaaacataagacagactacaaaattttataccatgaattacgataagtttctccagattttttcgattggtacgttgtgtgtattgtttggattaatgactctaggtgggtacgttagttctactggtgtgggcttatcttgtccacagtggccgttgtgtccacagggattgattccttcctatgagtttttgatagaatatattcatagaacaactgctgcttcgacaggacttctagtgtttttaactatggcatttgtacttagaggaaagcattcgctcaaatccaccaagatattctcagtcatagcatcggctactgttgtgggccaaataacgttaggggcaattgttatcaatgaaaaattacatgcagatttagtaactgcccacttgggtttgggcttggtattgtatagtagcatgatttttgttgtaataaatatctattacacaaatctcaaactaaagtcctcagtggatccatctaagccatctgggcatgatagtagtaatacacctgaagtaagttcctcagcatagtagctaaagaaaatgtaagatgaaataccatgccatcgttttctgtgagaaactcgagtaaggttaaaggaacaactacgacaaaaaatcctagatcaaagtttgcaatagttttctttgtattttttatatattctttgattacgtctacgttttttactgcatatgctcatttcgatcaatttgcttcatataatagctctggaatggggataggtaacaaatattacatactacaacagttggaaccggaatatgcaaaatctaatgaaccatcaaaaattatgtttagtattcaagacaaacatggtagagacatctatgatgttacagtcatggtcgaaatctactctataaatggagaacgtgtatttgtattcccatggactactctagaaactggagatttcaatattccttttgtatttgcaaataatggtaattatcaaattgtattgagcatactaaatgaggatattgcacggaacaaaatacttgataccgttcctccgccaagaactattttaaacgatagcgtaaactgcaattgtgaaagagccgtatttaatgtttcgataaccgagacttttggattgatctctactgtcgctctatatggtacaattttaggagccatcattatattgggagccatatcaatctggatatttaaaagtagaagaaagaacagatccaatcctgtttaatgatgaattcgctaaacattagtgcaattttgactcgcggtgaattcagagtttgtcttacaacatatccaatttactactggtgttgatccttagtacatagcagagtaaattttctattgggccacttataatttcgcttttatataacaccatgcatccattgacttgagttgttgttgccatctttttcattcacctccgccgtagtagtagtagtagaacaatttagtgacaaattatcttaattatgttgttaatttatataatttgataatcattttattttagttgtatttatattggtgtatttcctattttttcactattatgaataaattaaagaaaatctctttaatttttatactgagcacctttgttatatctttgttagcattagtaactctaaatgccttttttattctgggtggagttgctagttttgtgatggcgttattttatttgtatttacaacgggctagacaaacatttaagaaagatttactggatgctatgaaataatacattaattgttttagttgcatgatcattttttcaaaggagaatattatccatcggggatctttgaatattctaatattctaatgcatatagcatatttcttcagttttttcaattcgtatctttgaaaagaaatatgcctaatattcagtattgtttcaaaatcctccactaattgaatagtttttcctgtttgtgtgattaatcaatttaaaaatgttttttacttctattttatattggtattgtaattggtattacttgcttaattacaataaggactggattaaccagttttatttatctcatattcgaaaataaagttgaatcttataccgccttttgttataacgataatttcacagtcccctttagtgtcgggctatttcttttaatcaacagaaatttttcttactaatttattgatgttttaccataatagaattatctcttcatcggagtatttcaagtgatctaacctataacccataacctatgacctacaacctataaggaaatatacattcattgtcataacaattgtgcagggatgtggtttgcctcgtacatatgttgtgaaagtaaagtttgatccaagtggtctattgaatgttaatgaagagaaaatggagatcaatatttcattacgttgtgctcctgtgaaaggaagggcaaatagggaattaataaacatcatttcgaagcattttgatataaaaccttcaaatattaagataattcatggattattttctaaaactaaggtgattctgatgtctgattcttaggtttcagtagcaggttcattgatttagtataaagataactcaacaaagtatcgtgttctagttagaatttattaaatcaagtttgtttgttggaacaatgactacttttatatctataatattactattctcataaaaaatattatttgtagtatagtaaaataaatattgtaatctgttattctatttgtctttccaatagtctctgtattattttttcaccaatcactgtcgatgctaattcttgtccttcttttgtttgagctgcaatatgtggagtgcacactatgttattaagttctagtaactccttgttcgtaggaggttcgacttcataaacgtccaaagcagccccgcctattctcttatttcttaaaaagtctatgagtgcctcttcatctatgacttcccctcttgaagtgttgatcaagaaagcagtatctttcattcttgacaacatttctttgtctatcagatgttttgtctgttctgtaaatggaacatggcatgttatgaaatccgaactttctaccaacgttttgaggtctgtcgtaataagtgaaacttcttgaacaaagctcttatcaataggaacaacatcatatcctatcaagttcattcttaatccccttgccagtctggctacgtttcttccaatctttcccaatccaataattcctaaatatttgccttttaattctacaccaatcagatctttcttaatccatttaccattctttgtagcattattggcaacaggtatatttctgcttaatgagaatataaatcctaatactaattcagaaactgcatttactgaagcctcgcctgcgttaattacctccatattgttcttttgagcttcatttgtgtctatattatccaatcctacccccactcttgcaattatttttgctctctttgcattctctattacttcctttgtaaccttggttctactgcgtacaacaattacatcataatcttttactttagatattaattcttgatttgttatctcaggtaaataatcaacagtgagtcctgcattttttaaaatctcaattcctctttcatcaatggaatcacatactattacactgccctcaatatgcatatttgaaattttttttatgggaatatattgattgctttttttatattaaggaaaatgtttccaatgttaggtagacctaactaactggttgaaaatatttgtatacttaatactttctcttctcagtcggtgtgttccataataaaaatacttataatacataacgccgttattaacagtatgaccgcaaaagaactagatatggattatagtaaatatgattttaaagattcaactcaactttatgtatatttaagtaaaaagggcctttctagaggtacagtagaagaaatcagcaaaatgaaaggggaacctgattggatgcgtgattttagattaaggtcatatgatgtttttatgagtaaacccatgccaaactggggaggagacttgtctcacatagattttcagaatatttattattacgctaaagctgccgaaaagcaaagtaaaaactgggatgatgttccagaagcagttagaaatacctttgaaaagttaggtataccagaagcagaaagaaaattcttagctggtgtgggtgcccaatatgaatcagagacagtttatcatcatttgcgtgaagatcttgagcaacagggtgtgatattcctagatactgatacagcagttaagaaattccctgatctattaagaaagcattttggaaaagttattccaccagaagataataaatttgcagcactaaatagtgctgtatggtcaggtggttcatttatttatattcctccaaatgtaaaagtggatttaccattacaagcatatttcaggattaatgccgaaaatattggacaatttgagagaactttgattattgccgatgagggtgctgatgttcattatatagaaggatgtactgctcctgtctattctaccgagtctttacattctgctgtagtcgaattgattgcaaaaagaggagcacgaatcagatacaccaccattcaaaattggagcaaggatgtatacaacctggttacaaagagagcatatgcttatgaaaatgcatctgttgaatggatagacggcaatctaggcagtaaactcaccatgaagtatcctggcgtttacatgctaggtaagaatgctcatgctgaaatagtttctgtggcatttgcaggaaagggtcaacatcaggatgctggcgcaaaagtggtccatcttgcaccccatactacatctcgaattacaagtaaatctgtcagtaaggataccggaagaaccacgtacaggggattattgcatgtagcaaaaggagcatatggagtaaaatcaaatgttcgatgcgatgcattattacttgatgaattttcgagaactgatacatatccatatgttgaagttaatcaagatgatgcgaccattactcatgaggcaaccgtgggaaaaataggtgatgagcaaatattttacctaatgagtagaggctattctgaatccgatgccttgagtatgattataggtggatttatggaaccatttaccaaagaactcccaatggaatatgctgtagaactaaatagaatggtaaaaatggagatggagggttcggtaggttaatggttagtttaacttcattactagtctttttattttttcatgaagattgatcataatgattccattatcattactttcagaaaataatgtacatgaaatactttctaataagggcgatgaaccccagtggatgctgtcttctagaaaagcgattttatccaaattttctggcttgcctaatgaagtttcacctttgtattctaaatactctggattaactcttttagaaccagacaaagtttacttttctaacgagaatacaaattctatttcaacagacctagagatgcgactacaagagataaagtcttctccaagcatacttttaattggctcatttgttgcacatatttttgtcccagaggcattatctaaaaaaggtttagttatttcgacaattcaagacgccataaagaacaatttagaactagtaaaaaaatactttttagataaatcaatcaattacgaagatgatcgttttctcgcattaggttcctctgcctttcaatctggattctttatttacattccaagaaatttgatgattgaggagccaattagaatcgtatattctctaaaagatgatcgtacatcatcaatttgtaggaatattgttattgctgatgaaggctcaaaaggaacaatagtgcaagaattgtactcatcgtctcctacgttttcctccacctccacctccacctccacctccacctccacctcatcaacaaatcctgaattatcaaagtcaaaagaagaaactcaaggaaatgattcaaacgaaaaaagacaagaatgctattttgaggttcttgaatgtattgtaaaacccgctgcggaacttgagtttatcacattacaagctatgaattctgatactgtttgtgttgctaatagaaaggcctttgttgaaaaggacggcaaaatgtcttggtattctggaatgtttggtgcacgcctttgtcgattcaagactgatagtgttatgaaaggctcaggcgcacgagccgaagatgtagaaatagtttttggtacaaataatcaatcatttgacatttcatctaatcttgatcatattggatttagcactagaggtaaagtcctagttaaatcaattgtaaaagataccgccaagtccttatttaaaggaatgataaaaattcgaaaggatgcacaagcctcagaatcttttttggccgggcatgcaattttattaaataaaggcgcccaggctgatgctattcccggattggagatagagaccaacgaagtcaaagctacgcatgctgcttcagtatctcaaattgatgaagaacaaatcttctacttgatgtgtaagggtttggatagagaaagtgctaaacgtgagataataaacgggtttgtagagcctttatctcggaaaatgggtccattcattcgtgcttggataagttatctgtttgagaacaagtggactggaaaacctctaatgttaaagggcgatgaggtcatggaacagattcttgaagtagaaaagtcaaggtataaagaaactgtagatatatttgagaaacattacaaatataggtaagaaaaaacttgaacaataaacatttaccttgtcaaattacttttattttcaatgtctgaattaggtattgtaaaatggctagcacacaaaaatggatagatgtttcccaatttctcaaattaaagaaaggagaaatagatgaatttgattatgaagataaaaaaataatgatattgaacctaaacggcgaattttgtgcctcagatcgtatttgcactcatgcatacgttgacctgacaggagggatgctaaatgaatctgaaagaactgtgacctgtccgctacatttatcgtcctttgatttaaaaagtggtagtgctttgaacctgcctgcagaaaaaccacttgagatctatcccatgaaaaaggaaaaaaacaagctattaattttgatataattttttatagtctttagatttttatctatgttttggaagtccatatataatcgacatctaaaacagatcactatttgatcaatcggattatcaattccagagcaccattaattgtatattcagatgattccgtataatctattttttttttctttaattcaagtgaagtcttgggccctattgaaatcaccttatttacatttaaggcttggattacttctctttgacttttatgattagatatttgagagaattgagtatacattattttaaaaaaagatcttacagtggagggacttgtaaaaatcagaaaagttttttcaatgcgattaggtaattgcaataattccttccagttctctgaatttgatacatttttgttttcacttatttcataaaagaaaacttgatctaatattatgtatttgaatttcgtattgatataattattagactttattgattctgcacttcggggcatcagaatttttggaatttctttttgatactttgttttatattctctttccaagttttccaaaaactctattatttctgatgaagaatatttcttatcattgatattggtaatagaagatcctaactttgactcaaatccgtagttttgtagtattttcttggttttaggtccaattgctattatattcgttttatttaactcatccattattctttcatagttatgttcgttttttgccatatcaaaaaatattctaactgcattagagctcaagaaaatgcaatagttataaaagccattactgagccttttaaaagattcctttacttcttgtgaatcgattttattgatatgaataataggtaacgcaattaatttaatattgtctaaatgatcttggtcaatgttttggttttggatatcattcatcaacaccgattcatttgtaatcacaataattattttttccaaattatttgattatctctttctttttgattagaatcatattttgcaccggcttcttaaatataccatttgattttcttgttaagatttactatatctccaattatgactatggcaggaggttttatattatgttcttttgctaaacttgctatgttacctaggttgccggtaattactatctgattttttaacgtaccgttttggattattgcaactagggttctattactaattcttcctccttttattttatttatgattaattctaacttttctgttcccatataaattaccacggtatcaaccgcttcaaataatttgttccaatttacttcgggagttttcttatctgggtcttcatgaccagtaacaaatgcaactgatgaaccataccttctatgtgtgagtggtatgccagaataattagctgctccgataccagaggtaattccaggaacgatttcaaatgagatttcgttctcaaccaaaatctctgcttcttctccgcctctaccaaaaataaaagggtcaccgcctttgagtctcaatacttttctccccatctttgcatattttatcatcaacttattggtcttatcttgatgcgtagtcggatccccaacatttcttccgacataaactttctctgatgtatctggaaatagttttacaatttcatctcctatcagcctgtcatataaaattacatcagcttgttttatcaactcaaatgcctttattgttaataattttggatcacctggacctgctccgcagatgtaaactttgccaaggccgtcgttatttttcattctatcaactcatctagtaaatcgatgttcattctagtattattccagtcttttgttatttctttagctccttttgaaattaaagcttctgccactatcttgcccaattttcgggggtaagcagcgttatattgtttctttactttaatggattttcttccgtctaaggaataaactacggcaaaaagtgtcattaatctatccttattttttaaagtggctaacgctcccattgggactgtacaaccggctccaatactttcagtaagggatctttcagcctggatttccttgtatgatgtcttgttttcaatacgctttagcattttcaagagatctttatcgtcttttctacaaacaatcgctaaagctccttgccccgggaccggtgtaaagctttgagtacttagtctttgtgttatttgatttttcatacccaatctctcaattcctgcttctgctaagataattccagaatattgattttcttttgatttgtttattcttgtttctatattgcctcttattgacttgacccttaattttggatacttgtttctaatttgtattgctcttctaatactacttgttcctattatagaacctgtttctaattgatgaagcttgtggttatctatactatttatgaaaacatcgttaggtctttctcttttgggaatgcatgcaactactaacttctctgatatgcctgcatgaaggtctttaaagctatgtactgcaaaatcagctttatactgaagtagtctttcatttacttctttttcaaatactccactttgattgataacataaaatggtctgttatctttatcacctttcgtggtgactttgtccattctaatctttaggtttggttcgatttccattaaagatgaaatgaccaattgagtttgataagtggctaatttacttgctcttgtagccgcaactatttctttaatgatttttcaccttggataatgccgtttcataagcatctaatgttttttccagatcttcttcgttatgtagagttgaaataaaacaggtttcaaatggggatggtggaataaatataccttttgagagtagtattctaaacatatccataaataacttagtatttgatgattttactgaataataatttcttattattttatcagaaaaaaacaattgaaacatagagccaatagaatttacaatagcgtcaattttcttgtcttgtatcatgtttcttactgcttcgactaatttgtcacaagttctggctactttaggatagattgtattcttttcgtcaactaagatttctaaagttttcagggctgcggttactgaaattggatttccagcgaatgtacttgcttgatataccgacccgctgggagataatcccaacaatatttccttcctgcctgcgagaagtgaaatgggatatccatttcccaaagttttagcaaatgtggcaatatctggttttatgccaaagaattcgcttgctccacccaaggccagtctaaatcctgttaccacttcatcaaatatcaaaactatattgttttgtttagttagatttcgaatactattgagataatctttttcaggaagaatgaggcccgtattagccataacgggttcaactatcacacaggctatgtcattgtgattttgttcattatctatcaccgattgcagtgactcgatatcattatatggaacatttatagttttcgaggcactctctggtagtatgccatccgaatattcttgttcagctgcccctgaaccagctttattaagaacataatcatatgcaccatgatagccgccctcaaattttattatctttgtttttcttgtaaatgctcttgctaagcgaatagaatgcattgtagcctcagctccagtattcattattcttaccatttcagcacagggaattatttcggaacaaatttctgctaactgagtttctttctctgtaggtgtgcaaaacaaatttcctttatctatctgactttttatttcagaacctatttgttgattaccatgtcctagaaaaactgatccgtaacctaggcaataatcaattaatacattaccatcatttgtaaatagtttacttccattggcagattcaacaaaaaatggatgcggtcgaaaatatctaactggactattaactcctcctggaatcaccttggatgatttttcaaatagaatacgcgatttctcaaatgttatatcagtcatgaggtataatgataattatttgttatatgttctagatatacattatctaattactatttgaataatcgaaaacaatgccgtaattataaaacataattaatcctcaattatctatttattggtagttgtgggcgattcgttgataggtttgatcttctgtttacttgcctattttcaaaggatcaaaacggggctgtttttccttaaattgtatttggtttttctctcatatgtatcaacaaagtatcaagtggccgactgtatcatctttaatatcatatttatcagcaataagaaaggattaatctctaatagctaaatcttaacctgaagtaaaagtaagcaaaaaaaatataatgtgattaaaatggagttatgaagaaagctattcctaccgctgccaatattattattattattccaattattgcgagaatgattccaccaatccttgctatggtagttgcaccaggaggcaacatgctagaaactgcatacaatattacaccaattatggtaattataattccagtaacgaaactcatgtaatattggtaaccttattagaatatcaatgtttggtgacaatctttgggtaaattttagtactaccatcaaaatgctgggtatatttatgcgatgattttatgaattgctcagaacccagttctgattttgatttcattgtgatctagttacgattttggtttactaaagcgtctaatttctgattcaatctactcgaatacggtagaggactatgatataagaagtgtgtatacataaatcatctacaatataatttaaaaactagtagattgattcctgattttggttttttttccaaattttctagccttctctagaatacggtaataggtcactgtttgattaaaaactagtgaaataatgaatatggttgcaagtattacagccagcatgaaagttaattgctgtaaaaaactcatacctattataaaaagtcatacacttatatgtctaatcatttacttgagtctactgcaatcgcgagcaataataacttgtctaaatttctaatcaataatcctctagtcggggattgggattgctatgtatttctataaggtgaaagtgaatcctaacatcaactaattgtataaagcggcagaataaagcctcttaaaaaacttcaaatcttatgggttattctctgataagaaattcataaaagataataatggcaaatttgcatattattcaatgaagactattaaaacattaacattattatttgctgctatattagtttctagttttggatacactgaattcatttcaaatcctgtaatggctgtccctccacatttaatagatgaaaaatttatttttggtccaattgctggactttcacaagatgaatccggagccattgattggataatggttggaaactggaggtcaaatataattaatgatacaagtgttcagaataatcaatcctcaaatgtctttaatgctgctattgaaatgataaaatctgacggtacagcaagacatactcataccttaacagattttgttatttctaatgtgtctcatccagacaataactctacactttataatggtacttccacggtaagtttgcaagctggtcccgcaacggatattcatacctcaatactaaaatcaaataacaatgttataactctaaatatcgattcacaaagtgtagataatcattttggtaagttacctatctacggagtgactattaatccagacttgctcaagcctcctcatatgatgaaagacataaacaacaacgtctctcactagtccactttctatttattttttccttcttattttaaaaaactatttaaataatggatcattgatattacgagatgactcttgttctatttgctattttaagcacacttgtattaggtgtgatgttattaacagcaaaccacttctctgcttatgccctagaatttgcacataaaactatgtggggagagaaaggtgttgctcaaggtcaatttaaccaagtatctggtattggtgttgactctgaggataacgtatatgtatcagactttgcaggatacacaaccaacatgattcaaaagtttactcctaatggcacctttatccttggttttggtacttttggtaatgggcctcagtactttactaatcctgcaggcattgcaataaattccaatgattcagtttacattgctgactttggaaatccaacatatgcaataaaagaatttacgtccaatggcacctttattcaatctataggatcatttggccttggccctggattatttatcagccctggtggtgtaggcgtagacaaagaaaataatctttatgccaccgactttggagaaaataacaacgtacaaaaattcgaccagaatgggaatttattgatgagttttgggtctccgggtatcagtgatggtcaatttaataatccatcagatgtagccgtggattcaaataataatatttatgtaactgattctagtaacaacagggtacaaaaattcgaccagaatgggaattatttgatgaaattcggaacctttggatcaggcaatggtcaatttaaaacacctattgatttagcaatagatccttccaacaatatatacgtgtcagatagtgataataacagaattcaagtttttagtaataatggtacatatatcactcaatttggaaatacaggtgcattgcatgaaatgatcgaggaccctgttggaattgcattaaattcgcaaggggatgtatacgtagccgatggcagagatacagacattcacgtattctatccagtcccttaattttttctaattctactatttctataatattatattatacatgtttacatatttttgactgtactatactatctataccatactatactatacttctttctctaactattccttaaaatttctgccattttttttgaatagtatgagattattatatttgcacccgctcgtttaatggcagtcaaagattcggtaacagcaagattttcatccatccaattattcaatgtagctgcctttatcattgaatattctccagatacgctatacgctgcaataggatgaagggtattttgatttgcagcgtaaattaagtctaaattgggtatagctggctttatcattagtacatctgctccttcttccatgtctgatttgatttctctacccgcttcccttgaattatgataactcatttgatatgaaagtctatttccaaattccggtctagagtgtgctgcgtctctaaatggcgagaaaaaagatgatgcctgtttagcggaatatcccattatcattgtatccttgaatccattatcatcaaggatatcccttattgtttttacctgcccatccatcatggctgagggtgctactatatccgcaccggcaattgcgtggcttaaagcggtctttgacaatatatccagagatttatcgttgtttatctcctttccttggatgattccacaatggccgtgcgatgtatactggcatagacatacatctgtaattatggctagtttgtctccaaagtttttcttgatagatttgatggtttcttgaacaatacctttgtcattgaatgagttttttccatctaaatctttttttaatgggatcccaaagagaagtattgccttaattccaagagttgagatataatcaatctcctccaaaattttatctggtgagtatctaaatattcctggcatcgattctatttctagatttttatttgttccctcctgaataaataagggcataacaaagtcttttggagataaacgtatctcttggaagagctcccttatagcagccgtttttctcaatctccttaatcgcatttttggaaaaagttcataattaaaatgattgtttgatatgaaagttacgttctctttaaaatcattatctatacttttgtttctgtttctgtttctggatttatctacgttacggtttttcataattaaataactttagagccaaatttattaattcattttcgtttctattatttgtgaattcctttcgtaaattattcataggtgtggataatatcccttctactaatgcataagaaaactgttcaagtatctttatatcctcaccacttattctgttatcaattaatgataaggcttttttgaactctttatttcttatagaatctgcattcttgaatatgcttattatggctggttcggaactctttctttttaaaatttctttgatcgttatcatctcatcatctattatcttttctgctgattgaatttccttccttcttcttccaacgttcttttctacgatttctgaaatttggtcgatattcaccaatttaatattatttagagtagcaattttgtcttctactgttctgggatttgacaaatcaaaaatcattaatcctttatttctatttttcatcatattggcaattctgtcatatgttagtaaatagtatggtgcaatcgttgagatgaatacaatgtctatatcatcattgagtttttccaatgccgtctcaaaaggtatgggagaacccgcgacagtatctgcgaatgatcgtgctctatcaaaagttcgactggtaacaaaaaacttcatatttctttgttttagggctttcgcgattaaactagctccttctccagaaccaataagaagaatctctttttcttttatatcatcaaagtattcataggctaaatttactgccatagaccccactgatgtgctgcctttgtttataccagttaaagttctaactctgccacctatttttattgtcttgtcaaatagaatatttagattatgacctgcaaacccgttttttcttgaaaactcgagggatcttttgacttgacccaaaatttgatcctctcctactaccaacgaatcaagaccggatgttaatttcactagatgttttaaggcatcttctccgtcgtttactatcacattatttttcacttgatctgctggtaaattgatcaaagaggaccatgcgttaattatattatcataatgaggatttattcctacgccgtagatttcaacacgattacaagtctgtaaaattatgcattcttgcaactcagatgaatttaacaggctctgatgagcattaaaaatatctttaaaagcaaatttttctaagatatggataggagaatttttaaaagtgactcttatattgacaaattgtgatgattgtactcctagatataacgtcatctgcttctattatcctcccatttatctaatgtattaataattctttctttgaccttatcaatgttattttttgctattaattcttgaatttcctgatcttctactacgctgcacaaaaacttcctcctctcatgttgattctcgatatagtttcttgcatgttctctggcgaattcttgaattttaatattatctgtatcttttttccctattatattttttatagcattttcaattctgtctctaatgattttactcatcaaggggcttttgcccgaagtggagattgctacctggattacttcatcaatatttattattgaagtaaaaaagaaatcacttgctgccgcattatcaatgctgtaacaaagtattcctttttcctttgctttatctataatttttttattcaaaaatggatcattagtagaagcaaaaactacaaaaatgtcattaaactcgtctaaaatattgggatcttcgatttttcttcttattaataagatggggttattttttccttctatttcatatagtgaatcgttgagagtttcgcttattattatgattttacaatcatgtttagacagtgattttatcctctttgtaccctcaattccagcccctattaccaagatatttctgcccctcaagtttaaatcaataatcacatctagtatagatcgttttcaattagaattaatatagtttatttattgagccaatgactttatcatgcttgggataataagtttgaattcttgcatccatcctttttaagttagatttgatcagccctagtgcgcatatctttttaaatttcctttaacattgtttagtccaaattattagcattattgaaatattggattcgataaaaatagagtatatttgaattttagtcccgactctagtccattctttaatcctaaaacgaataaagattctttttctttagatttattacctaatttgcctgatgatattataaagttattaaaagagtcaggctttttgtccataaaagatctagttatagagggaccttttgaaatttctaatcgaattggaattggtatcgatgattctacattcatctataatcagtctattacatttcttgaggatcttggaataatggaaaagagatttaccccagctacaacgttgtatcataaacgaaaaagaattggaaggatttctactggttctaaaaactttgacaagcttcttggtggcggaattgaaattaatgctattaccgaagtctatggggaattcggaaccgggaaaacgcaattatgtcatactgcttgcgtaatggtacaactagatcaatcggaaggtggactaaaaggcggggcactctatattgatactgaaaatactttcagaccagaaagaattgatgccatttcaagagcgcgaaatctaaacccaaccaaaatcctagataacattgtggttgcaaaggcatacagtagttcacatcaggaactaatattgtctgagtcaagtagaataattgagtctcaagatataaagttgatgatatttgattctgctatctctttatatcgctcagaattcctgggattatctacgctttcaatccgtcaacagcgtttgaataagttagttcatactattatgcggatagctcaagctcatcaaatcgcagtcttattaaccaatcaggttcaatcatcaccagagtcgggttttgccggcaatacttttaaagctgctggaggaaatatctttgctcattctagcacatataggatttttctgagaaaggccgataggaatcgaattgctagaattgtagattcaccaaatcatcctgagagtgaaattttgttttcaataggggaattcggaatttctgatcctataaaaaaataaagtacatataggaatagtattttaattgtaaataatttttattagggtatttatcaagtgtgttatatgccctcatcacacggaactagaaggaaatccagatcgatattaacaaaatctaacaagattacaggtgtatcatatttgcttatagaatacaaaccaggtgataaagttgtaattgatatagatccaagcgagcataacactatgcctcatagacgttttcagggcaaagttggaataatcgaacaagttggcagacgcatcgttaaagtcgttgtggtgtttggaagtaagccaaagtacttgcaaacaaaacttaatcatattcgaccaatagttgtctaactaatcaaaaagtgtgtgtttgatttgcccgaagtaataaaaagagagatcgtcactttgtctgaagtaaaaaaaatattagagactatccctgtggatgagatggatcaaattcaacgttggacctttgattactctaagaagttttcaaaggttgattatgagcccgctaaagaaatggttgatcgccttgtggctgaaggtgatttgactaatgaagaggctgtagaattggtcaatgtaatgccacggtccatagaagaattaagggcttttacatttggatggaaaaaattaatagtaacagaaaagcttgaaaggataaaatccattttgctctctaagaatgagaatagtggggacgaacaacttcaatcacaagttgaaacttaaataaaaagccatctcttatataattgtaaaggtaaagcaaattttgtcaaggtataattcaaatagagataattatagtagacacagtgatactttttctccacgaaaattcgaagaatatgcttacatcttagactatattcaaaatggaaaatcatcaattgtaagaatgagggagggagtcatcattcatgcaataggtgaagaacatttaacattattagaattattaggaatcagtaatgaaaaatttagcattggtgaacgcgtgtatatcggtaaagatggacgggagaaaattattagtgtattgggtagacttgattataatcacatctctcaatcggcaaaaaatgaaataccaattgtaattgaaaaaatagtagatgtaaatgaaaaacgatttatagaatatttcaattccgctcagccaatgactcctcgggttcattctcttgagcttatcccggggataggtaaaacatacatgaaatcgatactggatgaaagggataagcgaaaattcgaatcattttcagatctacaaaataggacaggattacgagatgcaacaaaattaattgcaaaaagaatctatgatgaaatttctggtgaaactcgcatgaatatctttgtaagaaaatagggataattttcaccccagaatttcattagaattccatttaaaaagttaaaccataaccttttctcaaatcacattgataaagaaaactaaattaggacaaaattttctgatagatcctaatatagtaaaaaaaataattcaggaatctcggatcagtaaagatgatgtgatatacgaggttggaacaggaaagggtatacttactacagaactatgtaaaatttcaaaatttgtatattcatttgaactggattctgttctatactctagttgtaagagaaatttgacacaagcgaatttaaaattattgaatacggatggttttaatgaacatctggctattcaatttgatgtttttttctctagtttgccttattatgagagtcgaaatgcaataacgtggctatgtcaaagagattttagaaagggggtaattctattacaacgcgaatttgctgaaaaacttctttcaaagcctggagaaaagaattatagggctattactatattgtctcaatatagattctcaatcagtatattatttgatgttcccagtacatccttttcaccatcaccaaaagttgattcggtattaattgagatctgtccgagaacattaccattaaccaataaagtcatcaaagatattcgattcttgttatcgtttaggaaaaagactacttcatttattgtcaattattttaaaaagaattataaccgtaatttcgatgattttgatcattatgaatttggaaaaaataaactgatgaatttgtctccagaggatatagttcgttttagtcaataccttaataatgataatgatacttgtaataatagctaaattattgcaaattaattgaatagctacccataaatttcaggaagaggaattggtatttagagtagatcagctaatttaatatttccttgtgaattcttcatttcatagtagacacgaataagcctcctctacttaaaataaacattgtcttggatctatcttattttacctattttttaatgaagcacataatcatattgattaattttaagcctggtgaaatatcggtaattatataaggatttctgcagctatactattatctaaccgattatattagaaacatttagaaatttgaatcaaaaagatagtttgtgttgtcttgattggcgaatacagtatactaattcaaggtattcatttaattacatccattttatggtggagtattactttgattgttattactattattagacccttaaacaaagtggggaatctatctataatatcgccaccgattcgtagacttgtgatatttgcatctactatttctatcgcgagcggttttgtcctatttggctttaattcaaatttccaatttgaggatttggtttatacaacaaatggtagtgtcattctatttagtggatttctatcactaatagtttattatcatgttttatctggatcaaatcataattcaatggtatcaaagttgcacaaagtgttaaaattaaataaattcattccatctatcatgtttggttttcttaccactgccatggtatcaatgattcttgcatctgctataatattataactaaatcgtactatattaagaagtaaattctatgtttctactacttgtcaaaacttgatggtaacattattttactatcaggataggacaatgggcataggtagaaattccggaggccacacttcctactattagttttttccacccggatttgcctttggatccgataattattaaatcaatattttccttctctgcatatgttaggataccttctaatattgatattactgtaaacacgacttcagttttaatttgtacattcattttctcagctctcttgtttatttctttaaaccctttttctgcttcttgttttgcctcaaggttcaaatcatttaatgaacttgatgtaatggtacctgctactgtttctttgtgaaaagcaaatcctgtttgtgaatataaaacgtgcaacgctattagctcacctttatatttttcagctaggtcgactgcgtagtcaatggctttcatcgaatttatagaaccatctacaggggccaaaatcttgctaaatatgctgttattcacgtttatctatgaaaacattctccaacataaaactatttttttcaactgttttaattaaatatcagaaactaggtgtttgttggtcataaaaagcagagtccgtcagtaggtcgatcttatgaaaatatcatttaattaagcctagatctatatcctcaaagataaaatgggatggtgatcctttcattaagccgccatcctactatggtgatatctgaagacaatgcaatttatcagagtaattcttaatatttgcagaatgaagttcttttgatgattaatgcagagtttataattaaaaaattacaattagagaaacatatccatgaaggcggatattttaaagaatcataccgttctcctgatattatatctaacgataaatctcatgacaaaaaacacgaaagtaaaatttctgaagagaaaacttatactaaaaaaatacgacctgcttcaacgttaatatattatttattggtcggaactcaatactctgctatacatagagtcaagagcgatgaaatttggcatttctatttgggtagtcctgttaccattcatataattaacgacgagaatatcagtccaagagtacaacttggcaatagttttgaaaacgatgataatattcattacgtagtaacaaaggatacttggttttgtgctgaaataaacgataagacatcatttgcattgatgggttgtaccgtatccccaggatttgattatgaagattttgagttaggtagtaaggataaattgttacttcagtatccccaacataaggatctcatagaaaggttctcaaatcaatgaaatctaaaccaaatttctatttttccgttatataactatagttatttctactaatatatgattatcacatcagataatacttataatactcatagcattttatccatctagtagtctccccaaatcatgcagtttatttgatttgatttgatttgaattgaattgataactgttattctgatggtgtaattattttaaacttctttctacatagtttgtggatttgttcttcgatatctctaattgtcgataccatttgttcctcaagctctattttttgcttagtaatttcctccctcctttgagtttccgatatgatgattctctcctcttcctttctctcctcttcctttctctttatatcgtcgaggattgctattttgtctttgtcttttagtcgatctatttttgaatctaattctttgatctctgctttaaatttcggtagttcatctattagaatatcaaaatattgtaatacctttttagagtcttttaatacaattttattactgtttacagattctttgatattctttagtaatgtaatatattctgacatatctggtttagaaactatttctgcgggtttatttacaattgtttctattttttctactgttcctcttgatagtccataagaatacttatttgctgcttttgtcaagtgattggaaatttcgtagagatcattcattgatttaatcctcttcctatcaatttcttctttttcttgtagatattttaaacatttattataatctgaggatgattttattaaattaatttccttttccttcctatctttcccttcttcaagttgtctgatcttttcatcaagatttttcaatgtagtaatagccctgttaatttcatctattttggaatgtatccctaggaggttagatcgacaatcttctatcatttttctttcctcggttatctccttatatccatcgtttaatttttcagaactatcactaattctttttaattctccccttaaactattagcatgttttttcataaaggtattgacgattctgctatgcgaacttgtaacttcgccaaacctgtttattgacgcatcaacggaatccctgaatttgataaactcttcaaaggtcttgggaacaggcaatatgttggacgattcgcgttttaatgcccttacaatggtgttttttgtattctgcactaatggcatcagcttttgttcttccgtagttatgacttctgagtccaaatcctctgcaatattgttaatgtgttggaaggccagattcgtatcctcaaatatcttttcgaaattaatcaagagtgtcttagttatccttccttcacttttttctaactcctttaccgcatcctcaatagtaattttattgtctggagcctgaaccgtcggtgttgttgaatttgcagcagcagcagcagcagcactctttttattatttaattttgaaatatctttatctcttctcttgaaaaaattaaatgagggcatgaaatctatattaatttcgacaaaaataagtatatatgttaacatggaaaagttcaatatttattccgtgctatcttgattatgatatggtgttgagcaacaaagatatcattcatagatcataattcgggattctttgaaattatctcttctctaattgttggtattttcgaatctatcctgtcgactatttttaacttgattgtttgcaatttagaccttattttatcatccgataaaattgaaaagagctataaaagatggcctattagtatctattaagtgaaaatgattattatttttctcttaggttatcccgtctatttattagattgtaaaaacattctttgaaggcaagatattcgaggagtagtccggtatcaatatctacatctcttgccttgtttattagtactttgcaggtcttcgtcaccatggaaaaattattatgaatggattctgcaattgaaacgcattcaagcattaatttttcttttaataaaacatcgttctgggtcgtagatctatcctgaagcttttcattgtcgtttaatttaattactttattgacgagttttattttatatgcttcgttggcgtcaattatttttcctgtatatatcaattcttttgctttcgagatgcctactactcttgataatctttgtgtgcctccccacccaggtgaaattccaatcttgacctctggttgccctatttttgcattaacggatgcaattctaatatcacaggctagtgcgatttggcatccaccccctaatgcaaaaccattaattgcagcaatcaccggcttgtctaacccttcaatattgtttaatagttgatgaacatgatttgcgtaatgaattgcttcattaggtgacattttaataacatggtttaagtcccccccagcactaaaagcggtagatccttctcctgttaatattacggcagaaattttttcgttggtttcacataaaccgatttcgcgctttaattctgtaaccaaatcaaaattaatcgcattaagaacctctggtctatttatcttgattattctaatatttcctcgttgttcagtaatagtgtatctcgtattcggcaattaaatagtgtattttcattatttagttatttagactttgaatttcttagagctagatactattagttcaacagtcttattctttttatccttttaatatagaatgattcgcacaccccaatagatctttgctaatgacattctttataacttgcagacaatcaaaaatgttatgcctgcaaatacacaacattttgaaaatgaatcctatttaaagcttgaaacgtatagaaaaaacaatgatcccgtgattacacctgtttggttcgtcttaaaggataataatattttcgtagtaactagagaaaagaccggaaaggttaaacgaattaagaataatagtgtagtgagagtggctccgtgcaattataggggcgtattaaagggaacatgggtactcggtaaagcacattttgttgattctcatgaaaaaagcgatattttaaaaataagaagtaagaaatatggcattaaagcaaaaatagcaaacatactaagtatacgaaaaggaaattatgtggtaattgcagtacaagtttgatttttcattcttgatatcctcacacaaaattagtttccttagtgtttgggctgataccaacattattcaattatcatttatctgcattagacacgtaatagataacaaaaaataaatatcatcactaaatagtaatcagtatatcagagacaaaaaaagagaaaccagtaagttctaaaaaaaatagaatagaacaatatgcagccgcagacgagaattcttttgatgatttattaaaaaaactcgatgaagatgagatcaaaataattgttcaactatacgtgattaagcgaggtaaacgggtaacaaacatcaaggggtttaccgatcaagaaaaaatggagtcaattgctcatgaattaaaaaagactataggaacaggtgggactgcaaaaaatggcatgatcgtattgcaaggggatcatagatccaaggtaactgaatttttgttgaccaagggttattctagagaatctatagaagtaatttgattgatttagaataatattcaatgatttttttataacctgattattactgcattgaattcttctctttatcattctctttttagatttaatataggtgcttatgatctgatttcccatatataaaaacacagtgtaaaactcaattctgtgatttgaacatgttttgtttcaacaattgtcttaaaatgtggtataattcaatatacctcttttcctattgatacttatgctcgaccatttgtctactaagaggattgattggcagaagccgcgaaatgaaggtattacgtacatcgtagataaatttcaagggtttgatagtgcaaacttcaaagtaatttctccattaatcgatattgtaaaaatttatggtcctttaccccttttgatttcaaacgatcaattgatggatcggataaatttctaccatgaacatgacatattggtttccgttgggagtacactcacagaatacgcactgctggaaaaatcatttgataaatacattgaagatgcctcaaaactggggtttgacattattgaagtaggtgaaaataatattgaattatctctagaaaaaaagaaacacattgcagtcaaaataaagtctaaaaatctcatagcactttggaaggtgggcaaaaaagatccgagccggcaactcacatttgatcagacaatcgctaaaatcaatgaggccatagaagtgggttcagaaaaaattctccttgagggtaatctggggtacgctgtaggaatatatgatgaaaaaggaaatattaagtggaatgtagttggtgcagtaacatcaaaaatatctccaaataagatcatatttgaaactcctctggaaattcaacagtcagcaatgattgcagaatttggtcaaagggtaaatcttggtgaaacaaatttggagaacgtaatatccattgaatcgcagagaaggggatttttatcccgatcaagttatggaatttccagtatgaaaaaaatagccaaaggtagtccggctacaaaatttatttattatattattcgaacaaaaaattctatggaacaaggtgaattaattaatattactaatttaccgcgtagaacagttcaaacagggttagaagaactaaaagatcaaggactaattgttgaaaagactaatctagatgatataaggaagaagatttatcatatagtgaaagatgaatggatataaaatcatttaattgattttatgaacatctgataataattttctcgattcaatacaatatgaaacattaaaaggaagcgggttgattgggaattaattatataatggtgataactggaattgcttcaacatctatatttgtaaaagatcaacaggaatctttgaatttttgggttgataaggtaggctttgaagttatatgtgatctactattggaatcaaacttcagatgggttgagattgcccccagatcatcagattcctcgatgaatctatatccaaaatcactaatttccaaaaaagatctaaaaccaatgcccgtgatagtttttagaactaatgatattcggagcaccttcaataatcttaaagcaagaggagtcacattttctcgtaatcctttaaaatctattctaggaattcatgcgatgtttaaagatgtcgatggaaatgaatttctaattctggagaagcttaaatcttgacttaatttggtggtgatgtgttgaaaattgaaatcctttgaacaatcattcctggtcaattatggcgtagatgaagtttggaatttctacaccgatatcaatcatttagaaatagttacaccacccaacctaaaattaaagattatcgaaacctctgatagacaaattgtcgaaggtctcagaataacagtatcggggaggttagccctttataacagcaaatggtattcaaaaatatctttggttgataaatctaaatataagtatatagatgaaatggtaaaaggaccattcaaaaaatggaaacatgtacatttattttcagagattggaaaaaatcaaacagtagttacagataagattgaattcgaattaccttttttctttttaggaaaattgatggaaggatatgtggaaaatagtttaaggaaaatttttgaatatagaaaaattcaaactatgaaatacttatcaaataaatctgtagatgagtagacctaatttcttgttggatcagataaataaattactggtatataagatggaaatagagaaaaaaattaagaagattttactgtatgaataatacaaaaaataaaaatattattttttatgtaaagtcattgcatatgccttataagtaccaaccattgttagttggtttccttttggttatttctttacttattcataatgtgcctttatcaaacgcatcaaatcccttctcttcgtttaactataatgattcttcaggcaatatgcaagcattaaagagttttgcattatcccagataaatgaggatcgggcagagcatggtctctcgccgttgttagaaagtaataacacagctgcccaaattcacgcaaatgagctgttacagacaaagactatatctcacatgacaatgaacgggtttaaaccctatatgctgtattccttgtataacggtactggctacgttcaacaaaacgtaggtcagataagttatgtgctttcagatgatggccacaactactataaagcatctgatttatgttatgattacaagcggttttactgtccggtcatcgatcaatacaaggcaattagtgacttggaatactcaatgatgtataatgatgaggattgttgcaacaacggacacaaaaataatattttaaacaagtttcatacccacgtgagcattggcatcgcatttaacaagtattattttgtcatggtgcagaattttgaaaaccactatctaaattcagaccttaaaatcctaaaaaataatgaagatataatcttggaagctaaaatcaataaccaaaataagtttaattttgtcataaatcatgtttcatttttcttagacgagtatccaaccaaactaagttatgaaaaaaatgcagacacaaatagttacgattttggagatcttaaattaatggtatctaaaccactaccttcagacttgcaatatatacaggaagaacatgatgattcctacaagataatagaagcgaaaaagtgggatttaaacaaggataatattgatttggaatttcagcttccagatactttaaacataaaaaataaaatattgacaatggttgtttatgctcagacacttgatgataatccagatagaatgcaagataaagacaatcttaactctgaatatgttcctataacgtcctatactttttttaattactgatttttaaaaagagtttgtatataggcaaataatctatgatatacccaattcaaataattcatttccatcaaacactacactcttctcattcgcttttatacttgtaaggaatgctgattttatacttcaaattaatatttgacttttgctacgaacttttgtacctacttataagatactatttcaaaaaggggctgcaattaggaattaagatttgccaaatttgtgtatggacaaaatccctgataataatcctgtaagtctaagaaaaacgatttgctcaaatatttccttagtaagatcttgtaactttccatcatcatgcacatcaaagtctttttcatagcttcgttctatccattgaagtactttcttatctaaatcatctacgttcttatctccaattgtcgaaatcacattgccttcaatcaactgtcttacaaactcagtaactgtccagtattggaattcaattagcggatgcatagtaggtatagtaatttttaatatttaatacttctgttttgaattcaaatttttagctttactttcatttgataataacagaaatccaccttgaagattggatccaaaatcgaatcaataaattttcattttcttatgaaatttgtcaataataatttgctttaatgctggttatcttgattgtttgggcaataacattgtatgttagcatacaaatcgtaaatacattacatacaaaatctatattcaaatcaatagtaaagaactatattgaatattggtgtatactaaaatgaaaaaaagaaagacggatgaacataattgtcattagataaagtaaatgaacaaatctctgcatgcaacctttgtcctcgtcttcaggaatatattcgcaaagtgagtgacgataggccgcagagatatagagggcacaattattgggcaaaacctgtgtcctccttcggcgatcctaaagcgagattgttgataattggtttagcaccagcagccaatggtggtaacagaacaggaagaatgtttacaggagatagctccggcgaatggttgatgaaagcaatgtttgaaactggttttgctaatcgcccacatagtgtgtctattaatgatggattgctcttatcagacgcatacgttacctctatagtaaagtgtgctcctccaatgaataaaccctcgaatacagaaatttctaattgttctctctttttaaaaaacgagttgaatctgttaaaaagtactgtagtagtagtcataactttaggcaaaatggcttttgatacctattgcaaattgaataatataaggggattgaaattcaaacatgatagcgtttaccaaattgattctactacgactttgatcgtttcatatcatccaagcaggagaaataccaatacagggactttaacgtggcccatgtggattcaaatatttgtaaaggcaaagtcgatcattgatgccaagttatagaggtgtatctagtcgtcaaaaacttatacttcaatttgtgaccaaataagttaactagatagcaaatccatatccctataagtctttgaatagaccaaaaagataaattaacaatgacgggattccagtagtcgcagatttttgattaattaatttattaatccataaagatattttcctgtcattattgtttgattgcttctatgagtgcttctatgagtagcgaaaggattcataactatcaagatccaatgcaaaatcaggtgataatttttatcgcaaaggatatttgcgcttggcccaatctatgatagaaccatcatacagtcttacattctcaaaacctgcttgttttagttgtaaataggtatgtgctgctctaattccagagtgacaatagcatatgatttgtttgtccttggtgatacctattttttcaaaatcctgccttgatatttctacatctttgatcatttttcctctgtctccaaacccctcttcataattatgcaggattgatcctggaattcttgcttggaaatgttcttgaggcgagcgtgcatcaattatgatagtttcaggcttgtctttctcttcataaattaattgtgcatccgctctctcagttgcattaatacgtgcaacaaatcctttgtctgattttgtagctgaattcttggatttatggtccgttgttataggatatcccatacgtacccagttttcaaaaccgatgtctaaaatttttacattcttgtgtccaaaataaataagtgtccaaacaattcttgcaagggaagggtctggataatcaccgtatacgatgactagtttggtgtcatcaatacccatgtcagtaaatatttgctcagccacatggcgtgcaatgactaaatgagacccattttcatcgattgatataacattttctacactcattggtatcgcattcttaatatgactgaatctaaagggcataatgcccctggaatcaattatagtcaaattttcatcttctatatgtgaagtcaaccagtctgcgtctactataatattcatttatgaaaaatcatatatatagttgagtgaatgtgttatatttctttaacaaattctttttaagaaatttttaactagatttctatgatctattcaaatggttttatatacctgctgggtaactttttgtatatccttggattcgggtaaattagaaggaaagtcattacctactcatggccttcatctgcataagaatacgcaaatattatatggatctaaaaatgcggtgggaaaaggagtagaatttatgagaaatgttaatcataggatggatattacatttgatcatagggctccttcaatagtaattgaaattccccaatactacaatggttatgcggatattataaaaagaggcggaaaaattagatgtataaccgaaattacaaaagagaatctacactattgcgaggacttggtgcaaaaagtaactgaattaagacacatggatggtcttaaaggcggaatcgctataaatgaatccgagtatatggctactacagtacttaaagaagcgcagccattaactgaggtaatctacagcaacgtagatgaagtagttgcacaagggcagtttatttttgatactttatggaaaaatgctacacttgcccaaaaaaagattaaggagttaaaagaagggatcgagtcttatgaaacaaaactgattacagaatctagtgattccttaatagaaactgagttagaacggataatacggaattcttctgaagttaatatttgtacatctatagactgtttaaggattcacaagaattatcttgtagattctataacacatgcattaacaaatgagcgaattaatgcacataaacaaatacgtattcttgttgaaatcaatagaaataatgtagaaacagttaaagaattcttagatttaggactacaaattagacataacaaagatatatcttctatcgacttcactgtcactagttcggatcttattattgctgttaagagaacagaaaaaaacgatcctagtgatagtgttttgtatagtaatgatccatcttatctgagtcatttcacgaatgtatttgaagagctatggaaaaatagtaaagatccggaaagagtcataaaatcattggaagaggaaactgaattatcgtttatagaaaccatagatgatcccaaggaatcagtgaaattgattcgtactttgatatcctctgctaaatatgaaattttagctattcttcccaattttaattcatttttgagacaggtcgaatcgggaatgatggagtttataaagaatgtgtctttatcaaaaaggaatgtaaatatcagaatccttgtcgtagaggaaactaataatgaaataccgcacaagatattgacaatatttaataaatttaatggaaatattcctggtagttctaactatgacgaggtcccattggaatttcaatttagggatattgaaaattttagattgaaaattctaaatagcaagttattcactgagataggattcttaattattgataagaataaatcattgataatcgaatcaaaaaatatatcttcgcttgacatggtcgaatctattggactttcctcttattctaatagtgccagaatttctaaatcctatgcgtctatatttgaagctctttggaatcaagccgaactatatgataaattaaaagtacaagacagattgcagaaagaatttattaatattgcggcacatgaactcagaactccagtgcaatcattattgggtttttccgatatcttgatgaataccaagggtgacatcgaaagctatagcaaatttatagttactatgaatcagagcacaaagaggcttgcacgattaattgataaagtattggatgttacccaattagaaaatgaattattgatgctcaataaagaaaattttaatttagagaaacttgtaatagaaattgtaagagaatacaataatactataaatctcttaaatcgaaatcaattggaaatcctttacgattccagactcgatgatttcaataatgtaaaatctgaacgcagcaaaaattttggaaatgtatttgcggatagaacacgaattattcaagtcatcatgaatatcttagagaatgcaattgaatttacagaaagaggtacaatcactttgagattaagtgagaacatgacaacccatgaagttgtgttgaccgttagtgattcgggcagtgggattgatccagaagttttacctaatctcttcacaaagtttgtgtcaaaatctcataaaggaaccggattgggattgtacatttcaaaaaaaataatcgaggcacacaaaggcatgatatgggctgaaaattgttacgatagtaataacaaaattaaaggttcaaagtttacactgatcttaccatctaaacgtaattaaaattaatctcatctgcatcgttatcaagaagttgtagtactaccaataaaatcagttgcttattgaacattaattaagccaaggcttggaatttttgaagaaaacatgtggattaagaattaattgtacgtgtaggatattattttttttctctgctattatttgaataaatttcctaaaataagaagagagtgagttagaaattgattgattggaataggatatccgtacatcgatagaaataagaattcttcaataattgactaggttagatcatttcttaatatgatacgatatcttgcttttcctgcttctaaatgttcaaaggcttcattgactttggataatggatattcctcaactagtgggttgatttgatgtcgggcacaaaacccaagcatactcaagataaccccaggacctccagtaggagatgctccaattgatctttcgtgagaaatcaagggagatatagtggcccttacctgtggaacggcaccaacaatatgcaatcttcccccaggggctagagtattgatataagcgtcccagtctatctcaacatttgccgttacaataatgagattaaatctatttgttaatgagctcaagctgtccaaattatttgaatttataaaatgatgtgcaccaaatttacgcgcttctttctcttttttaggattagtagagaaagctgtaacttcacatccccacgctttgagaaacaggagagccatatggcccagtcctcctatccctaccactcccacatgatctgtagccttgatcttattttgaataatggggttaaataccgtaatacccccacaaaagagtggccctgctgttttaatgtctagcttgtctgggagtggaaacgcccataaggcttgacaacggactctgtttccaaatccaccgtgtctacctacaatgacatcttctccagtcaaacatctgttatgatagccactcaaacattgttcacatgtttgacatgaacgcgatctccatcctactccaactcgttgacctgtttttaaatgagttaccatctttccaactgctgaaatttttcctatgatttcgtgccctggaacaaatggatattttgtgattccccattcattcttgagcatgtgtagatcgctatgacatatgccacaatattcaatatctatatcgacttcatcaggttcgagtggtcccagttggtattcaaaaggttccaattttgatccctgtttggctgcagcaaaagcatggactttcataatactagttcggctatactgtataaataattattagtctatttgaaaccagccagatgtcgacataaaaaataaaatttagaaattagtatgtgagatgtttgcatgtgcaaatatacataccgaatactgacctcgtcagaactatactacgtcataatgatgtcaaacctaaaacctgcaaattcattgaaattttagaatctatacagtgaaaaataaaggtggagttattatgcatttagatatgttatctacaacggaaaaaaaaaattctaatataaagacagttggaattttgatatttgacgacgtagaagttttggatgttgccggcccattcgaagttttctcgatgacacgtcttgatgaaaataaaaggtatgaaaccacatcgccctttcgagttttactattatcggaaaaaaaaacaccggttactgcagtcggaggattaaagctaattcctgattttacttttgatgattgtccaactttggacttgtttgttatacctggcggatggggcacacgcagagaggtagataatcatgtactgatccaagagatatcaaaactatctgcaaagtccattttaacagcctcagtatgtacgggatcgagtctaattggaagggcgggacttttggacggaaaaaaagctactactcattggagagcatacaattttctacgcgaatctgcacccaaagcagatgtacaagaagatgtgatttttacaatcgatgaacctatatttacttctgcgggggtcgcttcaggcataagattatctttataccttgtaagtcatctttttggagcgcttgttggcaaagagactgctcggttccttgaatttccatatcccgaatagcctaaagacaaaaagggtcgttaagtaattttattaacgaatatctgcaggaatttcaaatttttctagatgagggatagtcaaatagtcatgatcaatttttaaaaatctcatgcaatatttctgagtcatgtaatatgctatgaatgattttatttgactatgaagttccggaatcgctaacgaagtattttatttatctttctcacgagatgaaacaaaacaaagaaataaaaaaatattatgattaaatagcgaatcatcccaatataaatagaaaaatggggagttcttggagaagaagggatactggtataacaataagaataataatttgcttgagtattttagcccttttatatatcgtatttatcacagttttggcttattttggcctaggtttttttccaatagttgtaatttccgcagtttttattttggctcagtggtttttttcagatagactagttctatggagtactggagcaaaaatagttaccaaggaacagtatgaaggtttgcactctatggtagaaaatatagtttctaacaataatttgcctaaacccaagattgctgttgtaaacaatcgaattccaaatgcgtttgccacaggcaaaggtcatcgtagttctgtgatcgctgttactacagggctgttagaaatattggagccagatgaattagagggagttttagcacacgaaataacacatgtaaaaaatcgagatgtaatggtaataacactcgctagtttgttttcaaccatagcatggcaaatgatgcaattcggattttttggaggaatatatggcgcaggaagggatagaaataatggaagttctattataatcataattcttgtttcattaataacatggatagtaagttttcttataattagggcaatctcgcgttacagggaatattctgcagatagaggcgctgcccaaatgactagaaaacctgccagtttggctaatgcattattgaaaattagtggaaccatgcataaggtgccaccaagggaattaaaacacatagaggggtacaatgcctttttcatcattcctgcattttcaggtgatactcttacacaactcttttcaactcatccaccgatcgaaaagagagttcagaaattattagacatggagtcgtcaatgcatcgatattaatatatcctacagggccgatattaaactaaagatgaattcaattttgagctagcatttgatttattcattagactatgtagttaaatcatggaaactgaattggatgactgtgatgaataaaatgattgctgtatcttattgcctttaatttccaacctagattaaggtttattcgtttaagagaattcaatattaaaaatgggatgaaatattattatcctttaaaatttagtggatcataaatccacttttccaaatttgtttgccgcgttcttatacatatctacttcctgctttgataatggtcttatttttttcatggcatcttcaaaatgtttcatatttattttcaaatattttgtttgtttctctgcctccttggaatcgggatattttgttatatgttctctcaatgccaacattactgctgcagaagataaagaagcaatatcagctcctgtatatccatcagtcttatcggctaattcttcaatattgacatcttcagctaatggcttcttttttgtatgaatcttgataatctgaaccctggattctcggtcaggtggaggtacatacaggattctatcaaatctgcctggtctcaataatgcagggtctattatgtcgggtctattggtagcacctattactactacatttgttagtatttcgaggccgtccatctcggtcagaaattgactgatcactctctctgttacatgggaatctccgtgatcacccctagttggagctatagcatctaattcatcaaagaaaattatacatggagcagcttgcctagcttttctgaatatctctcttactcctttttctgattctcctacccacttactaagtagttctggccccttaatactgatgaaatttgcttcactttcgtttgctgctgcttttgccattaatgtttttcctgtgcctggcggaccatataataaaattccttttggaggggtggcatctgcataagtaaaaactcccaagtattttaatggccattcaacagcttcttgaagctcttgttttattgtggaaagtccacctatatcctcccattttatgtctggcacttctacaaacacctctctcatggcagagggttctgtttccttaattacatccataaaatcctgcattctaactataatctttctcaaaatgtcgactgatacactttcgccagagagattaatttcggggagaaccctcctaagtgcacgcatggctgcctccttggcaagagcttgcaaatcagctccaacaaaaccatgggaaatatctgctagtctttgtaaatcaacatccttatcgagtggcatacctcttgtgtgtatttctaatacttccaatcgtccatccctattaggaactccaatttctatctccctgtcaaaacggcctggccttcttaacgcaggatcgatggaatctaccctatttgtagcggctattacaactactttacctcttgatttcatcccatccattacagataatagttgagccacaatccgtctttcaacttctcctgttacttcttctcgttttggtgctattgagtcaatttcgtcaataaatattatagaaggcgcgttcttctcagcctcttgaaatacattgcggagtctttcttctgattccccgtggtacttgctcattatttctggtcctccaattgtaaagaaattggaatttgtttcatttgctacggctttagccaataacgttttcccagttcctggcggaccgtgtaataatacaccttttggtgcttctacgcctaatctcttaaataattctggatgtcgtagaggaagctctatcatttccctaacccttgctactgcgtctcctagaccgccaatatcctcgtaagtaatcgatgaagtcgtgccctcttgggagatctgaacggcctttgaggactcttctgaaactagtatacccgttgtatcactaattatgaccggacctgatgggtgagtcgagatcacgactaaatcaattcttctacccattacattgataggaactgtatcgcctttagtcatcaaagttccatttagatattcggccagatactcttcagcacccactattcgcaaaggttcagtaggcgcaaaggtaatgtcttttgcggtttttgattctaccactttgatttcaaccaagtcgttgatgccaacatccagcctacttcgtatgaacccgtccatacggatcaatcctctacctctatcactctcctttgctggccagcttaagacggtagtcttcctaccaatagatgatacttctaacgcatcaccgctaacaatatttaatgactctgcaatagcaggatctacccgagctatttttcgtcctacatctttttgttctgcctcagctaccttcaacgtagcggtttttgaagactttgtgtcatcaacttttgacgtcatgacccatactgacctagtatataatttaaaggtaaatattaaaagtgaataattttagaatacaaacttttcgtatgttatagtatttgagacgtcacgcatgaaaagggtttgagtaatgtcgaatgactgtggattacaagattatatatcaatgtatacaacagagcactagagtctaaaaggacatcttaaaccatcaggttcgtagataaataattttttaacagggtaaactaaccgtttcttaccatgtactttaatatctattgatataaattttatggaataaccacaaatcgataaactggctctctttttattgaaaatttcgaactatagaacacatacgagcatataatatacgatggatgatgataaagataagtgcctgtggtactcgatttggatgtatgaaaggccttattgtaacactatgtcttgtacataagtggaaagaatacttaatcacaagataaatagttcgtggtaaccggttaaaaaaactagattgcactgtatgtaaactgatggcgctcattcagtgcccttgctatccgtggtgtttttttaccagtattaagatagtttcgtcttcaggttgattactgagctggaaaaaccaggctgtatagcaggatataagagagtattatgattccttgtagtactagttcatcttgcttaaggatgatggcttccaagacaaacctaacaaaactaagatggttgattaagatgcactagcagacaaacaactaacaatttcacatttctaagtgaaaatgatatatgtagagcggtatccgcatggacagtcaattacaacaaaaaatcgtacaagtaagacacacaatcagtttacatcaagtgagtgtcttcatgtttacaaaactgttaacttagaaaacctcatcgctaaatattctttatttctcttattattcataataaaagaattggaacgccttccgagtgcattgacaatcgtctatacttgtattttctgactttgtcttgtagtagcggcttctgaaagtaactatatctaaagaaataaccatgctcattgcaaaaaggtttactctgtccttgactcataggtatagaaacatccagtatgaacagaagtcgttacctgatatctataggctaaagttctcgagtcacgattaacattcattcctctttggagaaaagcctgattaaggttacgaggaagtagatatataacaaaattgaaggattcgaagattatttccgtcgtagaataaagaaactagactaaagcatgaacaaaaactggtaatctatttgcatatcagaacaatggataaatatcgatataggatagtgcccattgtaggtatagaaaggaataagtaatacctgtctttaggtaacctgtattgttgaaaaaaattattacaatgcctttattcttattgcttatttcttttctttttgcttttccaattgccttggggcaaacaaatgtaaccaaaaccacatttcaagatccacatacaggaattacttttcagtattccgcaaattggaaagtgactactaatgaatatactaacgcaatactgggggataaggacatcgctgatactgggttataccaagactctaaccttgtaaaacctatagttttattactcccagaatccatggatggctcttcattcttaatattgtctgaactacttcctttccctgtgccccttgaaaaatatgccgaattaacaaggaattcattagtgactgatcctacaatcaaattatcaaataatcttccgattttactcggtaatatgagcgggttaaaatataacgtttcatctacaagcgatccatattcacaaacacaaattttgtttgttgataattcaactgcctttgtagtaggctatacagttggggaaacaggacaatcgaaaaataacatggatattgactctatgattgactccttaagaattgactaacaatatctgttctacctcctttatttatcgcaggaaattagttatagataacttattcttgttgcatagtactctattcttctagaatcgaacatgataatacttcacttcaaagatattagagcaaggattttttcgtgtcactttaagatttattctgttatcgagaattctgaaacataaatatgcaaaaaattttaatcctagccgatgatcccataaggactaaattagaagaaaaattaagacgcaggtttgatgtagagtcagtcgctactcctttaaatggcatatgtgaaatcaaattacatctccgtggacgtttgatcacaatttgcagattttccccaaatgaaaacttccgcgacataataacgatgtttaacgtaaattatgatttaaaagctcgaacaacaaaatcaatatcatagaatcaataacgacaatattctgattcgttattttgcttctcaattatgagatttgatcttatccttttattcttctagtattaaagagctgtggtatcttgttaataatcgaaacaaaagggaatcgaaaaattagcatatatttaatttggttgtatcagatctattgataatataagaaataaagtacaagaatatgtacaactactagttaccttcccgatcatcgatcttaatgatcttacaatatttacaatagtattcattcctttttatcgtctccattttccttttacaacggtcacaccttgtcatttgttcttttattatacgatgttgaatccttttcaaaacaaagggaatgataaaactaagcataacatgccctatgatgcgtgttaatagactctgtctaggactgcccgaatttccgtattttgccatcgttcgatatcccctatatatgggtaattcgcattgaataatcttttgtttgaaatgtaattaaaagacagtttgaatattttgtatccataattaatactctatctgtcatttttaacagtctagtatctttggtcaataatgaaaaatgattgttagcaaaaaaatttagctaaattattgatccgaggttataaaaagaattatcatgattaatttatttctgttatcttgatgagtaaaagtattctggctatgttcgatcttcattttcttattaaaccagttgataacattgactagacctataaaatccgattaagtatgtatatataaattgaatagaatatgttaattagtaagactgtttgggtgacgctaattactatgaggttctggagatatcaagatatgccagtcagcgggagatcaaaagtgcgtttagacgacttgcaaggaaatatcatccagataggaactcaacagtttctgatgatatcatgaaggctataaatatcgcattcgaaatcctttccgatcccggaaaaagacaacaatacgatgaaactcttgttgtagagcgtccaagacaatcagatcggtcggatcaaaatcgtgacagtgattcagcttatattcgaaatgaatggcaagtaagtatcacctcggatgacctgggtagccagaccgtaagttacgataatgattatgacgctaattctcaaaatagattaaatactggatatgaagctgcactacttgaaaagaacgatccatcattggaaagtcgataccgtataattgtcgagccatccttgtgcttagctttcggaagttgtgaaacacttgctccaaaggtttttgtggttgaaaagaacagacgaataaatccaaaagcggtagtaatttcagaaaccgcagaagcttttgaaactatacttgatgcagcccaaacttgccctactaaggctatttttatcattgatagacatacaggagaacgtatctttccatagtttcactaaatataatccgccaatattttatatattctttcttttgtaaatgagcatacgatcagaagataaaaatccattccagaaaattatttatacattacaattgatttcaaaacaaagagccaacgactgatgatgattccacgtagatattactattcatcttataatatattttcagaacaaccataggaatttgcttttttctgtaggtatcctttgatttgcctttgaccgaactccaagttaattaatactattgttctactatttctaatattcaatgaaattaatgttattttttatcttttactgtgaataaccttgacaaaattatttatcctataacgtattatgattgttgagggagaagttttttgaatgatgctactatgactggaagaattactgctgaatctgccggtcgagactttatgcaaataagatatactgaccttataggcaagtttctcgcaaaatatattcaaatagataaagagttaattcaagatgtttttagaaaaggattagggttggatggttcttcggtaaatggcttttcaacaatagatgagtctgatatgatgctgtttcctgatagaaaaacattgaggaaaatccctttgtcaagctatgaaataatgacagttattgctgatgtttacaacggatttgataagggtagatctataaaagatccgcggaatgtttcacaaactcttgaggatcaccttgctataagtcagattgcatgtcaaataggtgctgaagttgaatgttttgtatttgatcaaataatctttgatatggaaaggaataatcctgcaagtaataatgtaaatagtcggaatcgtgcgaaagatgtttcaatcctatcttcggaacaatatggaatagggaaatatcctatccgtaagaaatctggatatgatgttcctacatttcaagattctttgattgaatttaggttcgaggttgctaatatattgaaacaatattatgatatcaatgtgacaaatatgaatcatgaagttgctagtagtggccaaatcgaaatcaattttatgcatgattatttgactcaatccgccgacaacgttcagatttataaggatgtagtcagaaatgtggcaaaaaaatacaataagattgctaattttatgccaaaaccaattttcgatcctctgaataatgaaaatagtgataatgggtcgggtatgcacgtaagcataagtttatggacaaaatcaacaagtaagaatgcaaatttattctatgacgagtctgatgattacgccgaattgagccaaactgggcgatactttataggcggtattttagatcatgctagatcattatcggcaatagtaactcccactgtaaattcgtataaaaggattatacctggctttgaggcacctgtttatattgcatgggctaggggaaatagatctgccgtagttagactgccaatcaacgaaaaaaagagttcaagctcaaaaagaattgagtaccgcgctcccgatccttccgcaaatccatacctcgctttctctgcgatagttgcagcaggattggacgggataaataggaaaattgaaccagggaatcctgttagtgaagatatttacaaaatgtccgattcaaggaggaagaatctgggtattgatgttctgcctggtagtttggaggaggcattatctgctttgaaaagtgattcaaattatctaaacctttgttttcatcctgatttaatcagtacgtattcggatcttaaaaataaggaaattgcggaaataggtaacgatgaatcagttataaatcaatttatgttttactatgatgtttaaaaatattgtttttaatcgaatcctttattatttttactatttttgatatctaaagaattgaataattgaatttattaattattgtttgattcaaatgtaagctaaattctatttcctttgtattttatatcgatacgctcatcttctatgttcttttctcaataggactagaccctctatattattggggttcatatatacttctcccctagcggcctctttgataccgatgataggttcatcacattctggacatatttgaaaataaacaaaaatactcgcatttcttttattttttccaacgagcgcattattcatattagaatgaagttgggattgacatgtgggacactccataataatattgtaattcatatactatatgtactttaacatacctgagaaataattaatatttgattgattagtgcaattgttaatatacatatatcctgctggcctctttacttttgactccatatacttagctgatgaacctagtctgggtaacctattgaggtataagtatcatatgctgctatataagatattgcagcataaaaaaggtattctgctaattattcaaatcagtagttgctttctttcagcgtctgtaaaaaatttgtatgtgtatcgtgactgtgtggataatggtaagggggggtttgtcccattaaaatactaaatctggccagtacgctatatacttgatttcaggatgtgagatctgattaggaaaataaattaaatattcaatctttcaaaactgtactagttatcttattctgtttgcagccgcttggcagtatggaacaattcggtttttgatcgattgttgatccgaacagtaataatacgttattccttgttttacttctatatgtcttcattcaggcaggtattttctcttcctgttacctccataatacttgctagaataatgtatgctgtaaattggtttaatatctcttctattttttatctagtcctgaatgactttaaacaggacgtttcgatgctgggattggtaacttcgggttttctaatagggattggcctatttcagattccagctggaatactatcagcaaaatacaatgcaaaatttatgatattttttggaacagtgctgttgtcaatatcttctcttctttcagggctaagtacagaaatataccagatggtaattctgagattcctagtaggagttgggatggcatttttctttggtcctagcgttattcttatctcaaaatatttgggtaaaggatcagaaggactaggtgttggaattttaaattctgcccattcattaggtggaatcgttggaatatttgtttggattatcatcgcagagattattggatggagaacaagtcttgtgatcagtggaattattggaatactcagtggattgtttttgttatgtgctctccaaagaaaaaattatgatgattcaaataattattctggtgatactttacagaaaaaggtttatattttttttagatccatttttctgagcaaaaatatccaaagtcacatctctacattcgcaattaattctgatgctctcaaatctatcatgttgagtaaacccatgatttatgtaggattatcattgcttggattccagatagcatggagtttagtctctactttcattattctatttcttaaggtcgaatttgaaatttcctcttcaatagcaggtctcattggcggatcgaccttgataatgaacgttatatttgctcctattattggtagaatttatgataaattatctcacaaaaaaaattttaataatgatgtactactgttactaatatgtggaatagggatttcagtaaatatcatttgtttttcattccttaatatttatctcttaataccctcaattttgatgattgggattcttgcgtcaggaggatttgtaattccatatacattggcaaggagattggccgtagagagactggctttaccaaagtatgaaattcttgctgttagttttgtaaatggattatctttacttggagctttctgggttccatttatattctctatcatggtaaaaacatttggttatcctttggcatggttatttggtggggtgttggttatagcattcataatccctatcattaaactccgtagctaaagtaatgtcattctttcatcgagttaattcaatcaagttaaaagaattttacaataataggtgaatttttgtaccttattacctgtcacttgtttagatggcttcaatactttaatcatggtttagacctattggatgatatccgcttcttaagtaatatctgtgattaattttccaggagtcgatgaaatatctaattctattgggatatttttgtttagaaatatcctgtatcctaactggtcaatcatagaattcatattagaagaagaaacatctcgaggtgctttcctttctatatatgcaaaatccttctcgcagttaatatttagatcgctatcttcttgaaaatatttattcttaacgaaattcaatacatcggtccatgtatatgcctttattctttcgactagtttcctagtttcatgatcggttgcctcatttttgtattcaaaaacttcaaagtagtcaattgactttttgcattctccacaataagtcttcttactaatctgtctacatttttcacattgtagtattatagccatattagaatattatcctcttatgatagcgtttgttaaatacttaaacacatgtgctgatattagccacacaaatcagtcattctttgtctactatttctagcaaaatgtcatattagtatgaagccctatcgaaataatcggtcatcctgccttgacttttttttgctctaattaaaccgctatttttaatccattcattttttgatacgattaagttattacatgcgaatgatagtgccatgtccagagtatcaaatttagcgccgctcattctcaaagcctctcttatcccttctcttatttgccagactccaacggggatgatatattctggatgtatttccctgaggactattactgacgcacttcttttttggttatgcagaaattctatgacagctagtctggcagcaaaataagatccacctatttttggataattcttcagacctcttgcatcctcagaatctgtttctatctttgcagcaccttttttatttatccatgcttcatgcatctcaaaactccataattcatctgggattaaaataatagaataataatttctcaaatgcatatacttgtaaatcttaattcgatcgagtggtcgaaaggtattagttttttttattaaattggatgaaattatttgatcaattgcagaaatgctccatttggtgggtacaagtcttctttttttttgaattccaatcattcctaaactgaggattttattaattttacttatctcaattccttctttgtacaaatagttgattgcttctatggatctaaaatcattatcataaaatgctttctcaattttcttgtcagtagaaatatctgagggtaatttcaaagcttctaattttgatgccatcccgaaatggatcgtgtctgaatcggatgtcgtccttaatgcaaattcttccatattcaatttgggttttctctcaaatgcaacttctatttcggttgatttagttgccatagttaattcctgtaaagattgaatatagcgatcggaattcaaatttgtttttacatgtgttgaatgtgtgcctctaattagcgatagtttataccttattatttcctcaatggcttttcctgcccatttttcgggatgatccaatattgccgtatcggtttgcaatggtgaaaaaagaggacctacttttacttttggataggcgtagctgctgacaaatacagaggggggtgatccgcctgatactttttctgaaagattattaaagttcgaggttaagatttgtttccaaccttctgttatacgtttttttatctcctcgccgttcctagaatacattgcaaattgaatgtgtttgttaatgatcttatttgaatttacagtctacaatgattgaagcagggattgataacttaggaaatttgcttaggagttaaggagaggtcattttgatgaaaattgagaatagttcttttatttcaattttttgagtaattctgttgcaggtaacgtatttagaatatcccttcttcctgcccacccccttcttgcttgtcctatcccaaattccaaaaatgcataatgaatgggatgatgagcatccgaatcaataaccaattttacttcattttgtattgcttttcttatataatcatcccgtaagtctaatctgttataatgagaatcaatttccagaattgtgcccgtttcatttgcaattgtcattaatttcggaatatcaacaggataaccatctcttttattaatgattctgcctgttggatgaaaaataatatctacactcggattttgggctgctctaattagcctatttgtttgtacttctattggttgcgaaaaattagaatgaattgcagcacctactatgtctaatttatccaaaatgttgtttggaatgtctaatgaaccgtcgctaagaatgtttacttctgctgaagaaagtattctaaagtccctcgaattctttttactttttttcctaattttgtcgttgcgacttgttttccttcctaatgatttttctacatcatatttatttaaatctacaaagaaagtaccgctttttattaaatcattaaattcttgtatcttttgtgcttggtctagtaattgctgttcatctaatcccccagcgattcgtaggctttttgtgtgatctgtgatggcaatatagtcaagttcaaaatttatcattgcaaaatatgccatttcttttatggacattttaccgtccgtattgtcagaatgcacctgtaagtctccttttatatcgccataccttaacaatcctttcattttttcctgccattccatcgagcctttacttgccatctcaatttcaccattattttccctcatttctggagggatccattctaaccctaattcattgtacaagtgttcttctgagtcccctgatatttttcgatcggatttagtatcaaataatccccattcgtttaaccgcagtgccttagattgtgccaatcttcgcaatgctattccatgttccttacttccagtaaaatattgcaatgctgctccataactttctttaggaacgaccagtaaatcggaatctaatccattattgaatttaataaatgctttagtactgcccttgcttaggatttctttaacttctggcatatttacgaatgaattaattattttgtccgggttttctgaaaccactagaaaatcaatatcgccgatcgtttctttcattcttctgaatgaccctactgctgttaccctagaaacatattccgaatttgctaaataattttctatttgttttactaacggataaatgtctccaagtaaatgcctttttttgcctatattatgcaattcaattctcttgagtattttttcttccttttttttagaaattcctgtaattccattcaactttccttctctagcagccctttctaaatcgctaagatttttcacgggtaacctgtcaattattgccctcaaagttttcggacctattccttccaagcccacaaaatcatctatctttatggggtatttcgattttagtatttcgtaatattcaatcttatctgttttgatatattcttctatttttgaggcaattgctttaccaacagaaggaatttgtaacaatccgttgattcctctttcttcatacagggatttgatacttagaggaagattatcgatttgctcagctgctctaatatatgccctatttttgaaatttaaattattcttgttatcctcattttcaatatccaaccctagtagaaatgaaatcttacgaaggatgtcagatatctcggcgtttgtaagtttcactctataactcatccgtggctattcattaattttctcattctttctttttgatgattaggctgatgtttgaaataagtcaaagcaagggaaatcattacttagactctttcatttatgtatttggcagtctagaagttctagcaacatgaataaggatcaaaaaattatatcattaaacaataatatatataatatttatagatactattaaaagaattgtagatcatgtttcagttatataacaaatattgaaaatttattacaaaatatatatatttagctaaaattattacaaaagaattagcgatgtttgtcgaatccttaaccattgggataatcataggggtatgtggacttgtggcttggttagtgaagaataaatttcagccagaaattgaacgtgatatacaggaacgtgagcaaaagactttgaaacatgttcgagaaataagaaaaaacccataaattaattactaatttattatcctggcatattcggggattattgaatatcaatccatagttaaaatttttttggcctgatttaacttttcaaataattctttaatgaacaaatctgcaaacttgtcaaaatcaattgttccgaattgtttcttatatccttctttgcgtttatcatattcgtattcaagccatagaaaatctgcctctttcaatcttacaatgaatttattagttttagctttggattcaaatacatttatcataaaaattcctgcaaattgggtaaagttttttaatttatattttctcatatattcgtctttatgaatttcatagttttcttttaaccatgtttttacatccatcctaattgttagcgaagtataaactcccgaaaagtctaatttcagattatgcatttcaaccgagtaatgaccacgtttgatttcattcatcataattattagggcacttggaagaaacattcctgggtaatattcatctgtggagttctgtagtttgtttagtatagatggttttagcccgatagtcgcatatcccttcgtaggcatcacctttattcactttggtatgcttattaacttattttgaaggactcaaaaaataaatggtgaattatttttcattggatggaggtacataattcttcaagtcttcaccattgacaacatcttcctcggggggtacatagtccacaacaccaaatcgcttgaatcctggatccttcttctgagtaagcaatgctacgattatgaaaagaacaaacgatactatgggtggtatgaaagtatctattcccgcatactctactggagtaatataatataataccaatcttaggctggatcctaccacaattgatgtgattgcagcaggccagtttgccttcttccaaaacagacctaatgtaagtggagcccataaccctgcaaatactatatcgaatgcaagtattagataaatgcctggacgggggattgctgccccgaggagaagacccgttagcattactggtatcgttgcacatcgagtcactatcagtaactttttatccgttattccggtttttttgaacaatgatctaaggatgtctctttgaatcaagtttcgcgctataacacttgagatcgcaagaagaccaccgttagcagttgacatagacgcgcctaaaactcccataagtagagcagctcctattggaaacggaagtaggttgatagcaagtagaggatatactgtatacggatcttctatgtttggtaacatgtataacgcgattattcccatcatactagtaggcactataattgaaattgttaaaattccagccatgaatgcaccccttcgagctgtcttgccatctcttgctgaaaataccctttccataaaatcaagtgctactacatcgccaaggcccagtgctataattgctgcccaatttagcaaagcaccgtttttaggatcagttaacccagataaatccacataactctctggcgtggcagacagaatagttcctaaatccaccccaccaaatccaagggcaaaatacaggaatgcagcccagaatgctccgatagttaagtaaacctggaaaatatctgtatacgcagaagaaaataaccctcctgcaaacgtatataccaataccgccaatgaaacaattaacataccccagaaaagtggaatatgcaagaccgtggacagtataaatccccctgctgcaaaatttcctgcgactaatattatgaaacttaaagacaaaagtatggatgacatcccctctgcaccaacaccatatcttcggtaataaaaatctggaagggttagcatggacattttgtttaccctttttgcatagaagattcctgttactattaaagtagttgccaacccgattggtattgcagcgcccgcccaaaaaccaaattgataaacaagtgccacgttacccaaggaagagttaccatcgattgattgagctgaaagcattgttcctacaaatattaacggtaagctctttcccgcaaccatgtatcttttactactttttttaaccatcaaggaagttaatactcccacagacaataccagtcccatgaacgagagaactgctataccataagcatctatgaaaaccaatgttattggtatttagttaataaatatataaatattattaatttaaaagatactactttttttgattgctttttcataaataatttcgaaaactttgataaaaaaaatgaaatttactgatataaacatctaatgctggttgttgactggttattcaatagatatggtagttgtacccctaagactattcattatttgtaatatcaagaaaagacgtaaactacgtcaaatgtaataattgtgaatattacgcataatattttcggttgtcgaacttttttttaaacgtagtttacttaacaatatttattaattatccttagtcataataattagatattatatgggaatggaattttacggagattcttacaagggaaatgacgaacccatttttgttgggatacctacttttctaaaactaccttatgtcaagaaaaatgaagaattgcaaaagataaagcctgatatagcaattgtaggagagcctttcgattttggaactacgataagacctggtactcgttacggccctagagcaataagggctgcatctactgttccttctcctccttatgaacatttcaatattgaaactggggttgacccatttggagtctttaaagcagttgactacggtgatgtcaatatctcaccaggggatgtcattgagtcacatagacggatgactaataaagttaaggaagttttggatatagatgcaataccaataatcttgggcggagatcattcggtaacctttgcaaacgttcgcgcactttctaaaaaatataagaatataggaatgatccatatcgattgccatgctgattgcgcaccccaaggactttgtggattcaaatatgatcatggagctcatattcgaagaatcatggaattaggctgtctcaagggaaaaaattatacacttatcggccctagggggtattggccaggacccgatctatacaaatggatggcagatcaggattttcaatggtttacaatgcttgatgtagaagaactaggtattgctcagattgctaaagaggctgcggatagggcaaacgacaatgtcgatgctgtctatgttagttgggatatcgacacttttgaccctgcatatgcaccaggaactggtgaaccagagcccaatggtctcacttcaagggaggggatgaagctaatgagattgttatcgacttcatttgatccagatagatttgcatttgatcttgttgaggtttccccaacctatgatgtaagtgacgttaattcctataatggaggtattacatctggactcgcaaatcgtctgatagttgaattaatggccgggttatctttgaccaaaaaaggtgaatctgagggaaagcctgtacgacctaaattttaccgtggaaagggacatacgtacgattttggagacggccctaaagcaaagataccaaaaagaggataatgcttctaatcagagtacaatgctattctccacatcaaactatccatcacaatatttttttgagagatgaaatcgatgaaactatattttttaatacattcaagattattgaaacaaaaattataaggcaattaagaatcaatctaaatgaatcgatgtggttttattgtggatgtgtattgaatcaattacgcttgggtactgccgtagatgaaatcaggacaaatttatctaagatattaagtgaagaaatggttatgataggagtagtggagttaatgaaaaaaattgaaatcgaaataaaaattgttacagaccacattatttcccatcatataagattagtaaagccaatattgacgagtaaaaattaaacagcagatgcatcgaatcgtattttatctcttgaaaattgataactaagtccaaaaaattatgatatttgctgttaatatctgagcttaaaaactgaaatttttctacccttgtatatctacttgattaatggaaaattaataataatggtgctggggtctttgctgtttacccaacttatcaaagtaatgatcatgttttttgtctccaccaatatgtgaatgctctgttccatcctcatgagtatgagtgttcattagtggttttttgataataatgtcgtctatatttatcaggagacggctcacttctacggctgaattgagcacctgctcctttacaattgtagattcgatcacatcccaatccaattgagatatttttctttcgtctgaatttagtccaaaccatttaacctttttactatcaatattctgggatagatttagtctaagttgaataaaagcatccatcaaatttaaccctgaattttttgcaagaattagaggaatttcttctaatgcttcggagaatttaagtaaaactatttgttctgtcccttccatcatgtttgctctttttctaacttgttgtgccaataatgcttcacaggacccacctccaatgacaatggatggatattggacgaatctgcttatgacggtaatagtactttgaattgctcgacggtattcatctaacatcatttttgaatttgctctgattaaaattgaaactgttttaggatttatacatccttctacaaatatcatcttatcgctccctattttcttctcatatacatttttggcatatcctacattactttgtatatttctaacatctaaatcctttaccagttttccaccggtagctttctctagccaatgaagatcgttctcttttactcttttgactgacattattccaaacttggacaacagatcctgtgccaccaagtctattcctttacggtttactactacatttatgccactatcgattattttttgtattttatttctcgtgatttgattttcttcaatcctatataggctcatttgttctggactgcaaattgataattgagattctgttctagtcgtccttgcctgaaggtcttcgtcaagtaaaaggattcgtgcatttttgacaaatttaggcatgaggtcactatcaattgtcttgtcaattaatactccatcaatcaaaatactctctgacaaattaccaattttttcctcaatttttatgtcatctacctctagaaggtagttattattagaatacacagtattgattgcattaacggtaatttctaaaatattatttaactcgaattgtgagtcagaggagagcctgatttttgttcctaaacacatccgtgcgagtttctcaattattgttttatctttactacttacttttcttgcaatattgtgtaaggtctctaaggaatatttgagccctttatcgtatccgttaacaatagtagccggatatatgttcatcgccagcatctcttgcgccttttccaaaagagtggtggcaattatagcagttgttagcgttccatcacctacttcattatctaccgtatttgtggcatcgattatcactttagctgctggatgttgtacatcaatcttacggagaaatgtcgccccatcttttgtgcatgtcgattcaccaattatgtcaatatagatcttttcatttcctaagggaccatagcagctttcaattaaagattttattagctgagcggcatgaatgttgtaactccttatttccttgccacttgttcgtttagtatcatcagggattagtttagtataggacatatcactttataattcttggagtttatatatggtaacatcaaaaatgtattttacaaaaatttcacattcgttctggaaatataaaagtagattacgtattcattttttggagcaaatatgtaaattcccctttttagcaatacttttttatagttaataattattaattccttaatgccagctgtaacatctaaagttgaaattgaaaatgcttcaaagaatgcaataaacgcactctttggaccaaatattgaaaattttagaatacgtgaagtatttccctattctgaggatcaaattgtagctcatagcgagcaaatggacgagacgtcccaaccaaaagatggatgggatattcaggttacattcatgttaaatggtcttcaatatacagtggatctaattattcatgaaaaagatggacaggtaagttattctagggtcattgacaaaatggttcctctctgatttttagatgctatttaagaatattttattagcttttgatggctcaactacttcgtcaaaagcagcggaatatgcaatatacttgtgtaaattagaaggggcacctcttacattcttacacatacttgataatattaagcaaggcggggttataggtctaagagcgcgatatggtgatacaaagttaattgatggatacaaaagagcgagaaggaaggatgcagaaaaatggataaaaccaattcaagagacagctacgacagagggtatcaagagtacgattgctattttagatgatgaaaaaaattctaaagtagaatcaatcgttcaatttatagaaaaaaataacattgatctagttattatgggttcgagaggattatctaaatttaaacaaatgttagttggaagtattgcatcaggtataattagtcattccaaatgccctgtgttggtaatccgataaccatctactttctttttagatagttcaaaattatctcttttacaaaatcgtttacttcctgaccattctcttttgccttttgatctaaagagttccacaaggttctatccttttctttggaaggattaaaaactaatcttactgtcagtagtcctttgggggcacctctttttatccctagtcggaagagttcctctttcaatgcatctggttctatattagtcaactttatctgaacttcagacggctgtcttgctatttttattccttcataaagcgtaatttcaccattttctattttctcctgaatctggtttggaaggttaagaatgcttaaccattcactaattgtgcttttcggtaacccgtataaacgagatactccagtaattccagacttcgtcgattctactaatttttttaccattcttgccttttgtaaaggggaaagatcttttcttattagattttcaaatagtgaggctgcttctgcttctgcaccctttaatttcgtaataactgctggaatttccttctctcctttattgttgagggctaaaaatcttcttcttccgataagtagcttatatcttttagtaaaattatcgaatcggaccacaaccggttgaagtaattcaaattttgccaaatgttctttcattaagttatcacttgaatcttttccaaatgaaaaattcttacggacattttcatcagctacatcaattaaatcaaccggaatattcttgattttcaatccttattatttattaatctattatgttattattcattttggttcgaggcctttaggttgtcactttcttatttaatcgtattatacgcatcagcctgacgcctgcattcgtaatctacgagattataaacaatgcttatattaattaaatttaatactaagtgatgcaaagctatctcaaatcaaatgaaaaacttgatcattatgatgaattgagtaaagcgactttcttgtcctattttatttctttatatatttctactattgaggacaaaaatagacatgatagtgtttcagttaatgaaatttatgattttatacaagatttacaagacgaattggattttaaggttcctcatgttgccaaaagggatattagtttatgcttttatattttagacaagttgggtgtatgtagttgtttaaaataaacacaaaatattttaagaataaatatagaaattttagtaacgaaagttcaattgcagataaaaccataaatcttgaagaattggtaaagtatggggaaaaagaggccagtcggaataatttcgaaacggctctaaatatttttgatagtgcaataagggtgaatcccgcatttgactctgcttacggagataaggccttagtctttgacaagatgggaaaactggacgaatctttaaaaatgtattctaaggcactggaaattaatccaaaaaattcggtaacctggcataataagggtttaacccttatcaagacgaaaagaatggatgaagccattaattgttttgataaagctatttctattgataaaaattattccaaggcttggtataacaaaggaagatgccttgagatgcaaggaaatattgaaaatgcacagatttgtctgactaaagctagaaaattagatccgttcttgttttctagaattaaactgagataaaagggcaaatacctcattttttagtatttttttgcattattaaatttcgactgaatattctaatcattttgttacctaaaagggaggcggaaaattctagggactataactttggatggcattattaatttatatctaaataattagtaaagtttaattgagaggttctgtatttattttcatgaaagaaatcaatgtttatattcgaccgaacgatctttcaaaagtgaccgaaattttagcaaagcataagttgggtattaccttttttgatatccagggaactggtagaaccccacgatctacctccgaaattattcattcttatcaaaccggtagaaccacaacacctaaatttataggtcgtgtccttgtgatttcaatagtttcggattcgattgttagccaaatcattgaggagatgatgcgtagttttgatatggtagaagaaccatacggcatactctttgtaaaagatgtgactaatgcctatgaattagggacggagttgaaaggagatgaagttctagtttctaaatgatttaactctacatatgcacaatctctgaaataggtcttgagttttcaaaattatctcaacgtctttttcggatgtcttaatgtctaatagggttttcttttagatcatggttgctcaaagaaactaaatcctgtagtatagaattactatttggagtactagtttatgattataattatgatagcagtgccagtcattttaatatttgtcataagatcttatgaaactagatcttaaccaataatagtcggtccagattattaaaaagaagaattgacccgagaactattagaagaagaagcatggaatatcataaagcccatttgtagagaacttgatgaattgagaaaagaaggccatatacagtttttgtcgggacttcataatgaaaatgacggtacctataaaataaacctgcgtagtaatcatttgcattttgcgtcacgaggattaaaggatagtataggtgatatatcatacgagactggtaaaatcagaattggtatgcgagctaatgggataccaataaatatttttgttgaactattttgatataatgattatctaatatatccatgggtcggaatagtgaatcgtcatcttatgaagaatataggatgcgaactcctttaagtgaaaatggggaacctgctcttcatttacgatttttcttgctatcttgccagctgcgttatgggggagcgcagcaattgaatttgtagttcatgttgcttttgggattatctgattagtccttcttttcaacaaaatcatacatgggaaggatataagagaaattattgttgcagtgataaatatgagattataagacagctgtgaagggaatgattgtccttcgatactggtagctgactcctgataagcttgcatatatgttgaggcaattactggtcctatggaactacccattaatactaatactactgatattcctatcgagactccactatattgatggggtgtatgttgtaatgtgatattgaatgctcctacttgtgtcaatgataatcctgcggaaattattatcaaatttattgaaattaaaaattcattaacgtgaaatacaaataaactagcaaaaccaactgtagtcaaaacacttcctacaataattggtttaaaatttcctatttttgatactataaatccggaggatggagcaaatattaggaaaattatcatgaacggcaattgaaccattgcactatccattgcatctccgccaaatccaaatggtattggactagttatcaaaattggtatggtttgatatatcataaacatcgttattccaaaaactaaaaggataatatttgagggaagcaaaatcctgtctgagattaatctgagcggtattagcggatcctttgcctttctttcaatgattacaaatgctatcatcgcgcaaattgtcattgtaataagggaccccaatacaatgccatcaaacgaggaaaaattattgaattcgctatttaagttagcaaagtatgtcaaagttaataagaatgctgaaattgataaagctaacgatgtcgctcctttgatatcaatatgatgtctggtttttttattgctaaggttattttgatttaatcgtacattttcctttttaggtgggatgaaatttgtattttgttcaacttcgtcgatggtatttgatgagttatcctcatttattctcttctttattatgatccaaagtatgattgccactggtattatggtgaaaaaagtagcttgccatccaaaattttggactattgtaccacctatggctattccaactaccgatcctgcagcaaacatcgaactgaatattcctataccaattgcaatcttagacataggaaattggtctcttataatgccaaatgcgataggaaacattgaaatgcctatcccttgaattattcttgccaaaattaaagtgtaaatattagttgatattccgccaatagctattcccacgatataaatgacaaaaatcacaagcaccattttctttctaccatatatgtctgataattttcctgcaataggggtcattactgctccggaaattaagtaggctgtcagaatccatgaggaggtactgtatgaaatatcaaaatctctgattatatcactaatagctggtaaaagcattgtttctccgtacatcgtgattaaaattgtcgatcccaatatcgctaacgttatccacgtcgattcgtgaatcttctcggttgcttttggttttatgtttttcatgaataaatatatcctagtttaaaaaaaatggaaaaatgctatctgatcatacggctggaattttaacttccttttctagttttcttctatattctttatagtcctcatcaatttccatggctgcttgtaaaatcttgctttttattgtattagatgaattaataaacatctttgtatctttgggaagacagtgaccacctatcccatctcttggttctagtacttctacattccattttgtattgagtgattcacgtaattccgaaaaactgatactattagacttgcaataaaggtaaagctcttctgcaaatgctatttggagatatctatgagcattctctactattttggttagctctgctacttcaactgatgatactggatgcattggaattgatagactttttagcccttcttttgtcgctgtagttgtagttgtagttgtagttgtatctattccttctattccttctatttctcctgctcttgtagttggcattccttctgttcctgttgtttgttgtgggattacctcacgtccatcataaaagttaagaccatgttgtagacaacagttgcttacacctcctacaatacgtaattgatttacaccgtgaatttcttcttctaatgcataccatctatgtggtgcatgtacaacgtgtagtctatgatctactttttcaaatactttttttgatgtaccttttggtatagtactttcaactgatattagtgcacctgtctttgcttctctagatatcttttcaacaacggacatcaaaccatctacttgtggtgtaaacatatcatctggtctatgtgtggatacacagataattaatacgtcaaaatcaccaaagtttgttgcttgttttattccataattggtctcagctgattgcatggttttttgatttatatcgtatccataggtatcaaaaccatgttctttaacatattttgcaactggaagaccaagctggcctagtcctataataactaccttctcatttctaaggatgttaagcctttggatatttaacttgttagatttaggtggattagtagtggcaaggtcactatctgaataagtaagctgttcttgtatctctaaacgcatatcgtctaaagactggcccctttccctccttgatggaatcatgatttatcttacgaatactccttaataaattaaactgactggtcagacatgtttattaatatccacacctaatttagtttataattgtatagacttgatttcaattctcaaaaacttggtccaaagtcttttttacagtttagaatgactataatatcgtatgcatctcatatagatgtagtaacctttggggtgtatacagattcttgcaaaattattgatatagatgaatactaatgtgcccaaaggtaacatctcaacataaacaagaagtacgaggccggattattcaatccgcaattgaatgcttttctaaaaatggattcgatcgaactcgaatggatgacatatctcttttggctgaattaagtaaaggaacattatataattattttgataataaagaagatttgtttaatgctatttgtgaggatagtcttgacctattgaaaattcaacttgatcaattatttactagtaataggaatgatttagtatcaaatgcagagttattttatgaaaacttccagaaaatacaaaaagaaggaagtgcaagagtcttttttgaggctttatctgaatcaacacgcaattcaaaactgcaaaaaatcttgtttaaacacagactcaaaatctataaagttgttgaaaactatttgcagatccaacgtgacaagggtttttttaaaggcgagaagaatctaacatatatcgcctctggcatggtatccttgtttgacgggattacagcaggaagtcttcttgggatcccagaggattataataggaaaatttgggccgtaacaataaaagctatattgacacatttagattagtagtgaatcaaggataatcattggaatattgatttcagatggtgccatttgtattgattaatcaataataatttataacctattaccctgttaacacgaatgtgtccttattaccttttaaaaataaagttccaaaaataaattccgattgttttattgcgccaaattctgtaattattggcgacgtagaaataggatctcgtacatcgatatggtttggcactgttcttagaggggatgtatttcacataagggtgggttttaataccaatatacaagataatagtgttgtgcatgttaccactaataaatatcccactattattggtaacaatgttactattggtcatgcagtgacacttcatggttgctcaataaatgataattcgctagttgggataggttctgttgttatggatgaatgcgaacttggagaatggtcaataattgctgcaggttcggtggttaagccaaatactaaaattccctcgggcaaactttgggggggtttgccagcgaaggaaattcgtgacataaataacaaagaacgagaatggataaaagagttatcaaataattacttggaattatcaaaacaatatttgagtatttaaaaggaaatagacaatacatttccgaattagatactgtaaataaatcgtatctgcctacaaacgttcctgtccgatccttaaaatcatcttttatatatcataatccttgaaatccgttctagcagaatcctattccataactaaataggttaattttgtttcttttatttttactaaacatgatgttgtaccattgataaagtaatcagttatcaaactgctttatgggattagataggatcttcaataatgctaaagattataccatttaatctactattaatattcttagtagtggtagtaacaggtacagctacacaagcaatctttaatcaaaacgtattagcacaaaactcaggtgaagacagctctcgtggattaaattttgatggtctattcggaaataacaaagacggtttcagtttcgatgaattgttcccatttagtgattctagcacttcaagttctgaagatgaagaatcctcttcaagttctgaagatgaatcctcagctatggatccattgggcggaatcgatcttgtatttcctttaaatgatatccaacctccagaagcacaatctgatacagcatctgaagatgaaggtacctcaagcccagacgacaatagcaaatctatagctccccagaacgagtcaacttctgaatatgaaaatgcaacatcttctgaagacgacagcacaaaatcaagctctgaaggcgaagagacaacatcttctgaagacgacagcacaaaatcaagctctgaaggcgaagagacaacatcttctgaagacgacagcacaaaatcaagctctgaaggcgaagagacaacatcttctgaagacgacagcacaaaatcaagctctgaaggcgaagagacaacatcttctgaagacgacagcacaaaatcaagctctgaaggcgaagagacaacatcttctgaagacgacagcacaaaatcaagctctgaaggcgaagagacaacatcttctgaagacgacagcacaaaatcaagctctgaaggcgaagagacaacatcttctgaagacgacagcacaaaatcaagctctgaaggcgaagagacaacatcttctgaagacgacagcacaaaatcaagctctgaaggcgaagagacaacatcttctgaagacgacagcacaaaatcaagctctgaaggcgaagagacaacatcttctgaagacgacagcacaaaatcaagctctgaaggcgaagagacaacatcttctgaagacgacagcacaaaatcaagctctgaaggcgaagagacaacaagctctgacagctctcgtatgattgctcctcaaagtggaactgcatcaacagaaacagctacaccagtagctcctcaaagtggaactgcatcaacagaaacagctacaccagtagctccttaagtgtagtcgattcgatcgataatgattaggtgaagcaggcgcgattaaaaaaatccatacctgctttacataaaaccaaattttttatattttttgatttacttatattgttaatatttcatgatgtattactgctggtcattcaattcatagtagattcaatttcataaaattaaaacttcataagatatcagttaccatataaaataactcatcttattcataacctatcttaatattattataaatttagaatctcaattttaccgattctttagtctagtgctagaaattcatgatttcctactctttaataattagtttaacgaacaatttcaaatatttttttgagatcttcttgaagtgctttgtatttatccaatcttgttcgtccctcctctgtggatggtatattctctaataattttctttgttctttttctgtcatacaatcaacggagttcaggatgtcttcaagttcagattttgataattcaactgtaattatttcactgggatgattcgttttaacaatttttatcatattcatattgacatgtccaaattaatatctttgttcatatccaaatgtggattgagatgaattgcaatggacctcgacgtaaattaatcgaatcgttaagattttcttgtttaatccaataaatcatactttagattatttcaaattatccattaatagtgcattatttattgtattttatgcattcgaatgttaatgcagttgtatggcatttctcatatagatgtatattccatatttacatcgtgtaaaaatgaattagatatcattagtctcatgaatcatcttattttttgacttatttcttcaccatatccgattgggacagttaccgattgaacaaaatctatttttcttatatgttcaatatatttagacatacttggtctatactcttcaggatataacacattatccgttacaattattccacccttcttgatcattgatagggctaaatcaaagtatcctatcaaattttctttgtctgcatccaaaaagataaagtcaaaatattgattttgatcatctggattttcattaactttattggataattgcttcagaacctctatagcatttccttcaattatttctattatatcgttaactccagcattcttaaaatttgttcttgctttattaattttaactggattattatctatggtggtgatatttttttttaataatgaagaatttccattattctgataaaacgaatatgctatccaaagagtcgaatatccaacggatgttcctacttctaatatcttattggcattcatcaacgatatcaaaatattgaaaaattttccagtatcgctggtaatcgcaagcattgaatcttcatgggaaatatttgttaaacctgatctttctgctgttgattgcttttccaactccattaaaacttccataattctcgaacatgcattaagattcatgtctgacatttttctattcttataattatttaattcttctaatattaaaacaaaatatttttgtattttaggtgattatggttgtatagtagttgtacagttatagaaatcttaagtaacagaacaagactttaactgtagtaaaataggattagttaatattgataaccatgaaattattaatatgttttttattatttccacttacattcaaaatacccaaattctattgaattcaataatttagatcgcctgatgattattagactaaagaataacgttaccaaggtcatttaataaataaatacttcaatatctatatgattgagttttgtagacctgaatttctgtatctgcgctttttggtatcatattgagtttatgatttcaattgatgtggatacatatattttattttgatttaattaattttgcagaaatctgtatggatcatgataacttcttacatttttcaatcaggtagctgagaaaatggagaggtgcgattatttacatgtgacgctcatattttgctagatttaataaataattttacagtacttgataaaactgatgaactctaaaatgaaattaacatattaaccaacaagagaaatcaagtgctacgcttcaccaaatcagaatgattcgatgaatgatgagaggaaatgagaattaattactttcttggatagaggtaaattttataaattaaaaaaactggaagtgaatattgagaatgggaaaagtacaaatgtttacgaatattttgaaatcgcatctaggttcattatctttttctaagtttattgggaatgatatctaaagatgcatcttttattcttacctaatgtgaaaacgtttacctgtagttgtatttttaacaatagttactcagaatagaccaacacccccggaggaaggagtgctgatatcggtcgtgaaggagggtgcctctattgattaatcggggaattggtatgagagttcacattgtcaaataggtacttattagaacatcaaatcctctgatagatcatcttcctatcattaacttttttgtaaaggataatagtttagtcactgctcattctatggccaacttatatctagttataatgcgtattcgaagatcttaatatacaataatattatagacgattattccacaattatctattataactatatatcctaattgtcttcattaattattatatccaatattgtacgttaataaatcacgtttaaaatgttaaagtcaaaaaacacaaacaaaactacactagtattagttgtagcaatactagcagctatcatgacaatcggtccttctgtatctaatttccaaagtgtatttgcacactatggagtagacaaagacgactgtaaagatgataaagactactatgaagatcatgaagaatcatgcgacaagaacttgaaagaacattatggtaaagattatgatggtaactttgcttcacaggctatcgctcaagaacaagattctgaacaaaatagtctagtagtatctggtgatgatacaaagaactctggtaacaacatcaacgtccaaaaccaagaaaacaaaggcaataacgcattagctcaaagtggcggtgatggtgatggcaatagcgcaaaacaggcaattggtcaatcacaatccagtgaacaaaatagtctagtagtatctggtgatgatacaaagaactctggtaacaacatcaacgtccaaaaccaagaaaacaaaggcaataacgcattagctcaaagtggcggtgatggtgatggcaatagcgcaaaacaggcaattggtcaatcacaatccagtgaacaaaatagtctagtagtatctggtgatgatacaaagaactctggtaacaacatcaacgtccaaaaccaagaaaacaaaggcaataacgcagcagcacaacaataacctctcccttttttatctctataacaagatatatcattgaacgctagatgatgaagaatgaaagaatctgcatctaaaagaagtcgtctggaattatattattatatattaagaacatgtatcattgatgaaaaacgtactaggagttctctaaataggcaactcttgatatcttactcgctattagacgattgtttaatttacctacaacagttaggctttatagatataaactataatgatagggcaatcaaaactacattaaagggccaaaactatgtacagaaatttggctatttgatgcaacaagtagaggatatttctaagttgtcaacctaaatctgttcaaatttgaaaatttgatttacatacggagggcttcagactgatatgggggttctatatgttagatactgaaaaaacagtacaaaaagtatcaaactctcagtaagggataaaaattgaataagggtttgatatgctttcaaggtagtttttacagacaaaaataagtaatgcgaacttctcaaatgtagatttatcaaattcggatttatcaaattctgaaatctccaatataacgtttaataatgcaaatatgtcctattgtaatcttcaaaacacaaagatttataattgcagttttgttggatcagtaatctcatttacaaatcttaataaatccgaaataaaactgtcaaatttaactttcactaatttctcttcaagtgatttgtcggatactacgtttgttgattgtgatttatcaaaagtttgaatgggatagttcaaaacatatccctttgataatttatgcacaagattgtcgataaatttgacatagtagcaaggtctgaatattttgaagaactaatctaataatgctgatttaataaaaaatcaagttcgaatggtatcaacttgataattatactacccaaaattatggtcaaatttgacgcgggcccggagggatttgaaccctcggcctgacgcttaggaggcgtccgcgctatccattatacgcctttgattctacaaagtctgcgctacgagcccatcttatactctcagattatcttatttttgagattaacataatattaatgctgagaagaattcacgaggttagatgtaaccattagtttgcctaaagtagtgatattaattactgtcttgcccctgtcacctttatcgacctctaccaatcccaagtctgctaaacctttgttctctttaccgccttgtacatgataacttaaaagaggttttccatatcctgaaatttgttctagttcttctaaactgcttaccattccgcctatgctatcaatactttttaatatttttatcttagtatctgatatgatttcgctgtaactgaactttagtactggtaataaaagaggtatcgagtgaccgtggtccattgcaaatgcctttattccattaataaatgctgacgagagagcagcacaactgattaatttatctccagaacttacattcattagtatttgatgatattccatgcttttctttaatagtacttcattaactctttcgattgtatcctttacgacattttccttctgaacaagaattatttctataccaatgccgattattgtttcaatcttctttgaatattcaatggctttggcttcgtcacttgaatagcatattagtatgagttggtggatgggaaaatttcgaatccccaatgcaattccatcctgatcgtcgtcaccaaaagtagcaatttgaagagttttcattctataaggtattgatatatggacttgattaaaaatatttacaattttctgcttcatttttgaatttggcacttaattgggatttaatattagaaagtttttcttctaaacaatgataaagatccactaccaaatcttgaggtattctggaagcttcgaattattttagatgtcaaagatgttaattcaagtagtcaaatgaaatcaagtggttgacatctcctctagggcagcgaaattgtcttttaccacgcacgacaaatatgatgaaatgtttgtttttcaggtttatactgggtatgaattttcgttttttccattcttattgatgattaaaatatctataccatcaccgcttgcagaatccctttgtatggatgatcgaatggcttttaacgctaaattagtagctttctcctcgtcaaagtcttcagagaactctgcatccattactcccaatgccatttcagctccagttcctactgcggcatatctatctggtaaaactgaacctaatggatcgagagtataaatttcaggtttgcccgttgtaacaccacctactacaacttgagttaatagcgggaagtatcttctttcaaacatgataacagacattaattttgcaactgaattcggttcaacattgcgtcgagtttccaatttcctaatttttgacaaagcgcttacctgtcgtacaagcacctgcatatccgcaaccatccctgcacaggcggcacctacgtgatcagtaacattaaatgtttttttagtatttttattaactacgaaattgccatatgaaactctcttttcagcagccaaaagtactccatcattgtaagtaatgccaactgctgttgctccgggcataaattgaaaagccatttaataattaaaaaaaggagagttagatttagtcgtttctatatagatcgctactttttcaacatggagtagtcatgaatctttattgcttcggatattagcttattttgaatttctaggatatccttcgcttctggatatttggacccaaccactacctcggcaacaatgtttgttatatgtctgaaaaggaattcatctcctctttgagcttcaaccttataggtggaatgagccttatttacaaagacaatattttcattcgtaaaactgtatctcggatcagtttcatcttcgtatgggatcactttgtatcctattttttttagagtaaacgttttcttgagaattggttttctaatagtttttctgatcatcccgttaccgctattggaaagatggtcgttatgattattatttaaaacctgagttaaagaagcgccctcactggtgatagaatcgttgatggcaaattcattgggtgaattggagatttcagaattgctgaaatttttgtctcgattgtctacataattgtccgatgaagagatccttgtagttttctttgaattcaaatcatcaaaagttgaaccggtagttgatttgttgttgtcatcttcaatgcctaaatcgtagttcttatctacttccgttgaggtaaagaatacattatcgtttctattattcccctcactatatactgaatattcatcgcctgaggcactatctcttggtcgacttgagtcatatgtttcattcgcatcggctggggatgaaacctcaactgattcaaatccttgaatctcttctcctggttcaagggtttccaaaacagcttgacccatgactttatctatttccttataaatttttgattcttctcttgtaattaggacgtcttcatattctgttaggcttggaagtacttgatcaattatgaaagtttttacattttgattgaaattgttatatacatcattctcaatcaatgccgatttatcggcaaacctggaggttagttcgtcgcattttaaatatcctgtaactcggcttaacttgttgtcaaatccaaatgtgctccgcaaaaccacgtggttacctaccattattgctattcccttctcatcttgtcccaaaggccttctagcaatagttatttcaccggtgattcttggattatctaagcttacttctaacttataaccctgaatatctggcgaacggattacttgggaattagacatatcccattctttaatattgtcagcagatttgatatacacatcgaagagaggatattttagaatagagagttttttaatttctttggaaagtttgtttatgtcaatgcttattttagatcctatcaacaaaatttcagtaccatttctgttgagttttggttctcctatctcttgcagtttcgctcgtccggtaattagctcttctaatgtattaccgtcgatggatattgttttgctaaaatcatccagccgagttttaattttcatttgatcaaacgaagttaaaaaggataatcgtccagtaccgtatcgtccagttcttaatctttttaattttggtgaaagtgtctcttcggccttatggggtgagcctaatatcaaaaatttgtccattgaattggagttcattcctgcattgtcttctattaccacattgccgttgtttagtacagttactaggacgttcgttgcatcctcgtcaaaagcgttttcaataagttctcgcactatttcatatggagagatccacgtttttgtggcaaactctctaaaaaatgatggatgaacctttaattccatagtcaatatattttagtttttaggagaagattatttaaacaaatattaaaaattagttgactattttcctaatttttattaactagatctatgacatgaatctatgttggaattgtgttggcaaggttgattgttatagccttaggtatcagatctaccaatcctaaggttattttaggcggatgagtttcgataaagggatgtactgttgtataataaatcaacaaagctggtactgcagcgcatcctgctatagttaaaaggattagccaagtggctgtcatctttcccgtaaacatgtcattttaaaaatagttgggatatataaagataaagccatctcacactgtattattaaatctcataaacgaaatgaaatttccttgaaagcattccaaaatttgtcaccaacatagtgtagattgtttattatctgtcctttttgtaattctttggcgttaatgctattctctagtgctatgcccacagacaaatattttccatatttttcttcctttgctaccactatatcatttttcatgaattgaccaaactctacaatccctggacgcaatatttttgctccattacaaatgaactttatagaacctgagtctacaattacagaaggaaatttttccaatacttcggttctgcctaaaaaaggcagtataatctcttcagaaatgaaaactgcaacaagagagtcgataaccaagatactcttcttttcttcaatttcaaaaactttaatattcttagttttgggaatggatatcttttcctcccaactattgaccattgttttgagtattttctccgtatctttcttggatatcacatacgtcttcaaacagattattgatttcgtcatagataataaagatgtataattgttggttattgccactgataattcatttaattccctgtgtattctgctgaatataaaattaaaaaaatagatcctatatagtatgtatttttactacccgtcttatccttattccctaaattggaaaaaaaatttttataactaattaggccctacatagaatcaaattgagatgagtgaatcgcttgatacaaaatatgaggttccaataaaacaggtggaaaaaaccttgaaaataagtgatagagctaaagctgagctaaagagctcagggatgatggatgataagggtaaactaaaactcaagggggtcagtccaaaaatgttaaaaagaatgaagttagaatctgtagattgtcctgtattcaaacaggaacttggctttatacaatgctacgtttgtagcaattttcatagtaggattagtggcgtagtttactgtaagggtgacccattagagtagtctcttaaatttttttattgtttggttctgtgtcgttaagtgttggaaatattggcataagcttcataaatagaaatccatagctatcttttgattaattggaccagaaaatcagcaaggaatttggtattagtgtgaaaaaagatgaaaactttagtgagtggtattctcaaatcatagaaaagacaggattggcggatcatatttctgctaaaggttttatagtcctgaggccatatggcttcgccatatgggacctcatcaaaaactatttagatcagaaattcaaagaaactggacatcttaatggattcttaccatgtttgatacctgaaaatctattgaacaaagaggaaaaacatttcaagggattcaatcccgaggtcttttgggtaacatcttctggtgattccctactgagtgaaaaattagccttgagacccacctctgaggcactactttattcaatatttccgaaatggatatcaagttatagagatcttccacttaaaatgaatttttggaacacagctttgagggctgagataaagtcaacaaaaccttttatacgcaattcggaattcttatggcaagaaggtcatacagctcacatcaacaaaaaagaggcagaggatgaagttatgactattttatatctctataaacattttattgaaaaagtccttttaattcctacaatttctggctataagagtaataaagaaaaatttgttggtgccgattatactactgctttagagggaatgatgcctgatgggaaagccctacagttgggaacttcccataatttgggtttaaatttttcacaaccatttgaaattaaatttttgaacaagaataatgttgaagagtttgtttggcaaacttcttgggggatatcatggagattgattggagcattaataatggtccatggagatgacaaaggcttgatattgcctccgataatttctccaatacagataattattattccaatttataaaaatataaatgaacatttagtcaaagaacatgctcacagtctgaaagataatttagttgcattgggatatagagtttttgtagatgatagggatgagtttaccgctggatggaaatacaatgaatgggaaatgaaaggggtccctgttcgaattaatatcggacaaagagatattgaaaacaataatgttgagatagttagaagagacaatagacaaaaaagtattatatctgtggaaaatttgagcaaagaaatcgagaaaatctttcagagtttacaatctgatttatataacaaagctgaaatctatcttaaagaaaaaacaaagattataacaagtttcaacgatttcaagatggatctggatagttattccggatttatcgtgacaggctggtgtggtaatgaagattgtgaagtaggagtaaaggatgatactggagcagacattagggtaatcccgtttgatgtaaaagacataccaaccgatctcgatagtaggtatgacgatattaaggaatgtatttattgcggaaaaaagtcaaacaagaccgttatttttgcaaaagcatattgatacaatactttcggtttagtcgcaacggaaatgaaataaggaatatcaaaatttaaacagaatgtttatgtaaggttcaaattccaaattatttattacaagttgtcaaaaaagaacaaggataacaagaggaaagatataaagataattataatcatcattgtggtatttgctatagcatttatttctattaggactcttttagccgactctaatccattttatgtagtggcaagtggtagtatgatacctgttctaaacgtcaatgatttgataatagtttgggagaaagacaatagtacttttgccaatgcgaatttaggagatattatagtttttaaggccccggcgcctgaggaagaaaacaagaccattgtacaccgggtatcggctattattgagaatggaaataatttgacaggagacgtgatcctttgtgctcctatcgccataaatgaagtcattcaagaaaaaacgatcctaactaggggagatgcaaatgagtgctccattccgggaatagattttccgataacggatgagaactatgtagggaaagttgtctataccatcccacaagtgggtatcatacctcaggttttgaagccgcctgtaaactatataataatggctgtaatcggtggattactgatatactcattcattcgtggaggtaaaaaggataaacaggaggaggagaaagaaaaattaagagatgagtgaaaccagtgccaatgctataccattagagttatctttattgatgtatagacaggatgatccaaacaaatgcactgcatcacggcttgttaaatttaagatggctaaggaagtaagaaggattcctaccacatatttagtacttaatcctttcgctgaaaaaatgattgtcccctctgatgttaaaaaatttagaggtatttgtgctattgattgctcctggaaattagcgacacaggtaattaatacttcaaaaaaattctttaataatagaaaacttcctgccttattggccggaaatcctaccaattatgccaaattaggaatgctttcaacggttgaagccttatccgcagctttgtatatactaaattatagagaaatgtctagcgaaatattaaataaattcaagtgggggcatacatttttggatctaaactctgaaatcttggaagaatattcaaatgcgcaaggacaagacgagattataacgatagagaaggattactttccacacattttcaactcctagcaacagctcctgagaaaggtataacactagagagagaacaattatactggaaggctaattttgttaatacaaattaattgagcgattaaaaaatatttcaacatcaagtttgtttttttggatttggaaaagaatgtaattagctgtatcgcaacaagaaggtttattcaataaacgtatagtcgataagaaagttaataactttaaagcttcatttttacttgtgagctagcgggcaagttacttctactaatatataacgaagaggaaactcctccctcactacgggcacctgaattagcgataattagaaggagacttctggcaacgaaatagaaaaggatccagttgagatcataagcaatgatgattgataatctgagtgatttcagtcttggagtgaaactgtcgacctaggtggagaaaggccaaacagagttaggaacccgtacatatactcaggtaggctgcttagctaaatcttgcttaaaacaaaaggagggttactactaggacacacagtatgggattcagagtgaaaaaatttctaatctgaatcccatactattagtttatcttcatatagattcaaaaatctattaattataattgccactactaataaactgtaatatagaatggatgaagatttaaactgtccagtacttataatgggtaacgaacggtctaggtacttatcagaaagatatggatataaggagtggatgatatcgagatttctaaattttattccttatcctgaaaagatgctagattatatccatgatggtaaaaacttacatcattacattagagtaaatactctgagaactaatccagatgcgctaaaaaggcgactttgtgaaaaggggtatagcctaagcgatacaattctaaaagaagtatttgaaatcaaaaaccctagttttggggataataaaattaaggactctgggaacacgattgctcatcacaataataatgataataatgatggtatcgtaaaaacagattatgatttacaatctggtaacgatagtgaccttgggtccaagcagcctagtataggttcaacgattgaatatttgaaaggatactattacatccaggatttgagctcttgtattgcagtagaggagttagaaattcaacatggacaagatttagttgtattagatatggctgcggcgccggggggtaagacgacacacatcgctcaaaaactaaataataagggagcaattttcgcatgtgactcaaactccaacagaatttcatctttactttttaacttgtcacgttgttttgtacaaaatacaattgtacttaatactaaggcagaagagataaacaaacttgaattacaatttgataggatactacttgatgcaccatgtacatgtgaagggattgttatgaaagataaatctagaaagaaaagtcgtaatttagaggacttggaaacttgcagtaataggcagaaaaaaatgatagaatctggtttcaaggctttgaaagcgaacggacttatgatatattgtacttgttcctttgcgcctgaagaaaatgagatgataatacaacatctgctaagcgattacaaagatgcaaaaatagagccgttaagttatggaatgaatggtttgacgagtttttctaaataccaattttccgaaaagatggtccataccagaaggttctatcctcatattcattcaacaaatggattttttatagcaaaaataaggaagagactggactaaaatgacttacagaaatttgacttttattgaagagacaattctaaaaaggtcctttaacacttggggaatttttgagttatttggaatactaagaatattaatccgggagctggttttagatgcacatgttaatgataagaagacaatcgcttcaaaactcgatacccttccaaacgaaattccagatgacaattcacgcggaagtggtagtagtattagtaatctacctggaaaatataacaacaatgatatcagaccatttcatacaccgacaaaagcacatctaaatggtaatgaagtctctgagtgtgaaaaaaacaccaagagaatagaagttttcattcattccaactttaaatatgatgatatgttgtttaaaaaatttaggccagtcataatcggtttgaaaattggtacgattaagaacaagaaattcttacccgggttaaattttgctgagttagtagttaaacacaataggaatgtggattatcctcacgttatcatcaatactaaggctgaaaatctaatagtttttggtagggatataatgggaagttcaattctttccgttccgaatgatgtcaaagaaaatcaacaagtaataatattaaaccataataaggaggttatcggattaggtagaactagatattcaaggagattaattactcagcctaatatcataacgatagacaccatacaggatattggcacatactatttaaaaaatgaaaatagacattctaaaggtattgaccatttactataaataaaaacaataaaaaaattttaaattctatcgattattttctggcctttactagtactaggattgctacccctgccatcatagctccaaatatcaataagacttgtatgggaaagctaccagaagaagtagccacaccttgaggagcttccgatgatacaaagagatgttctgtacctcctgattgctgaacttgagcaaatccacctatctgcatttgtccacttggaggtgccgttaaaccgttcacagtaacagttactccatctatatctgctgaagcagaagtttcttttacggtatgtgttccttccctgaaactactttcacccaaagaatagatcgaaactatctctgaatctccttctatgacggaaaacccatagcccgcagcaccagcttgagcaccagtagcgtcaaacaaaaagtgccagttattcattgatgatccaaattcttcaaaatctaatataggggtattaaatgcttcagctaaagttgtattttgaattttagcagctaactctggagatagtttttccaaggctccaacggggtgattaatgtcaatcggaccatattcctcggtatttactatcaatggctcttccaacacaatacttctccaatctacatccaaaacagacgtagaagttccgtttgatgccgttacaagattagtaatagttggatgtaattcaacctgatatgaaatagttgcggttgtgggtccaccattgactgatgctctataatctagtgtggcattttcaaattttaccaagctttgtttttgagaaagtaacatattgtttattttatccaaaatctcgactaaaccattactgctatctgaagaattcaacgaaaatgaggttgaatttttatttccatccaagatttgtgccatagtgctattagcgggatactttaaagtaataattctatcacctgtaaacgaagcgtctgctgcattttttgcaggggagacacctgcttccatttgaatagcaaagctttgattaataatgccgccaaaaaaaacaatagccaataatactattacataatctagagaccttaatttcaatatttttgaattccatttagcctgtttataatcttattgaaatctgtctccttgaaataatttcaaattgattactgcataatttctagtaaaaattatattttatccaattttaaagtaaaaaaatcataacattactaagagaaaaaaacaaagaataaaaaaagaaaaaagtagaagtatgtgtaacattgattaccattttagcagggggtacaggttccgtcaaattagttagaggaatgtatggagaatcagaaaacattacaattatttcaaatgttgccgataatttttggcattatgggctctacgtttgtccagatatcgatacgataatctatggactaagtaataatttggacaaaaagaagggatggggagtcaaaggagattcttttaatttcttaaaatatatgactagtcttggaattgaaacatggtttaatctaggtgacaaagatttgacaactcatattttaaggacgcagctattaaaggagggtaggagtttaactgaaattacaaaatactttaccgaaaaatataatctatcactaattgtagcaccagcttctgatattcattatgaatcaaacatagttactaaacgcaacaaaagaattcacttacaagaatattggataaaatacaagggatcagtacctgtttatgacattatatacaataacatagaaaaagccagggtaacgtcacaagctcgagaaaggcttgaaaaatcacaattaatcttatttgccccggggaatcccattaccagtattgggccaataattaacataccgggtatgaaaaaccttttgaagaggttaaaaaataaaattgtaatgatatctccacttatctctaacaaagcagtaagtggtccctgtgagatctacatgaaggcaaagaatatatcaccgaatttgagcgggttagttgacttttattcagatattgcaagcactatgatctttgataaacttgataaacctgaaattgaaagaaaaataaaaaacaattatccagatataaacttttgttatactgatatacttatgacaaatttaagaaaagaaacatcactagcgagatatataatttctaatttttaagaaaagaagggatggggagttatttctgaacaatacccgaactgcaataattattccaataaaaaaatttgaaaagagtaaaacacggttgagcggctttcttaatccggaacaaaggatccgcctttgccatcttatggtaaatgatttgattgaaaaaatatcagagttagaagatagtagtatttttttggttacaaatgaaattattccaataccggaaaaactcagagaaaaaatggtggtattgtttgaaggtcgcagtgctggcgtaaatgaagctgttaaacttgcggattcttatatatcacgagaaaaatttgacagctcaatggtgatcccaatagatatccctcttctaacgctcatagaaataaacgagatcatttctttctcacggaactataaagagagcatttgcatggttccttcacatagctttgacggaactaacatattattgagaaaaccacattcgataatagatacgagttacgatgataacagctttttcaaccattttaaaaaagctcttgaaagaggtgtctcgccgaaaatattttaccatgagaatttaaatatggatattgatacaatcggtgatgttatgctggctttgaaaaaatatcatttagctgattcaactattgaaagaagtatctcagatcaaaaaaaaatagaaaagagtgaaaataaaccgattgaatatctattgaatatctttcaaaaccagaatgaactttgttattaaatgctattgctttcaatctagcgcttagttataatcgtgcctaaaaagaacggtagattgcaatgaaaaattcattcattcaagatatttattggtaatataacaataaatattgtacttgttacataatatcattgccataatagtcatttcattcataatagtgggtgctttatggggcattggtagtttattaaatacacctcaagaaagtaatattcaaaagtcaaatgattcaattctgctagtggctcaaaataatgccttcaatcagacaaatcctacattatatgtgaatgcaagtcaacctactaggctgataattcttaataaagattttgtgaaacatgatttcatatctgaggaactaggtataaataccgcatacttgacaacggagcaagattttataacaggaattgctagtaataaaacaggtaactacacatactattgctcttttcatcccgatatgaaaggagaaattgttataacatgatgaaaaaatatgatggaacactaatcaacatatatttaaagagatgttgttcacttttaatattatgtttaaactatggactatgtgaatttctactaaaaaattattaaataaacctttatctttttactcgagtagcaattactagatgtacagacctgcagaggatacttatttcatggaggatgttctctcaaattatagaggaaagaatgcccttgaggtaggcattggatctgggtacttaactaggatattgtgttctaactttgagtttgttgtaggaactgacattgattttaattctgtaatatatgcaaaaaataatgccttgacaaaatttagtaacatattattggtttgcactgatttgagtctaccattgaaatgtaaatttgatttgattatatgtaatccgccatatttaccaacagatgtcgataattttgacgatactaccatttatggaggtaagaatggaattgaaatgaccattcgattattgagatcaattcaattgcaacttagcgaaattggcaagattgtgataatgagatcaaccttgtctgattatctaaaaatggatgaattcattgataaattgtttttaaacaataaaataattggaaaaaaaacattcttttttgaatctcttgaaataatagaactctctggtgtaaaaaatagttcacaccgatctgattattacaagaaaaaaagaaatgatgctcaattataactaaaacaacaaaaagtgtaagaaaaacacaaatacaaaagggatcaattgatcctagtcatcgattatgtgatcattttttgagtaacgatgcagacctttgagcaattgcctctgccattttagataatgatgatgatccgcccaagtcgtatgtcaaaaactttccatcgtctatcgtttgttcagtggctttaaaaatagcttctgagatatgcttttctcccaagtattcaaccatccaagcccctgataatatggttgccaccggatttactttgtcttgcctagcatgctttggagcgctaccgtgagcaggttcaaacatagcatatgaatcaccataatttccagaataaacattaccaatagaccctacatgacctgatgcgcattccgagattatatccataaatagatttgtactcaataacaaactattgttgaacctttctggatttttgactaattgttgagtcatattatcgatataatattcttctacttcgacatctggatatgttttgtttgtttccacaacggcattccaaaaaattccatcggtttcctttaaaatatttcgtttggttattgcgaatatctttctaaatcctttttctttagctaattcaaagccttttttaactacccttctacaaccctttccggtggtttttctgatcgctacggccgagtcatcacttgtcctaaattcaatccccgcatacagcccttctgttgattctcttacacatatgaaattgagctgtaatttcgaaatcttgtatgtcttgatcgggcgtatatttgcataaagttgaaatttttgtcttatgcttactgcaacacttcgaggtgcttcaggattaggaaccgtagtggtgggacccttaaagcaagcatcggaagaattcagagtctcccatactttgtctgaaatatatgaattacctccatttttttcccaccattcagaccctgcatcacatgttattaattcaacgttagtattacatgattttaacactttaatcatcgcattaactaattcagggcccgtaccgtcaccgtttattacagcagcttttttattgctcaaatgaactcaaaaatgtttgattagattcatatttattttttcagttactttgggataaaatcaattcttccaaaaaaagcattagaaaatggtgggaactgactgctatttaaaattgtagtaaactctccttgatttgaataatacgaatactggatgtcataatcggcaagttcgagagtattatttaggtattggccagtagaattatccactaaattaaccgttttattgtcatatgagtatattttcatcaagtccggtaaagacaaatgaaccggtctaatatattggacatgcaaagtatcccctatcgaatcagtatgaatcggttttaaacattctttgccatcaatgatttgtttgcccacgttatctggtaacaaatattgtttattatctacaaacaactggactctaggatacacattataactatccaatgtatgtgctttaagacaaacactaagtatctctgggggtggcacaatctgtgtaaatacgagtccgaataatacagctacccctatgattatcggaggcaaaagtaaatcctttttacccagtctttgaaaaaaattctttcgtggggtcccctcttttatctttctcttgggcacaaatcagtattcttctaacaatataaattctttagaaatatcgatacaatatctttctcatctttatgataagaaataaaaaaaataaatgtaaaatagttttttcataatatttgttgttggacgtacatattgatggcgcaagtaggggaaatccgggattatctgcaataggcataacgataaaaagtgacgacaaaataataaaagaacattgtgaatttataggtatcaggaccaataatcaggccgaatatgaagcattgcgacgagcacttgaaatatgtaccgacatggatagtgaagtaaatattttatcagatagtgaattattgataaatcagagaaatttaaagtaccgaataagaagtcaggagctgaaaatgatttcaagagaaatctcaaatttagaaaaaaactataacaaggttacctacaaacacattccgagaataaaaaatagtcgtgcagattatcttgcgaacaaagctcttgacatacatgtcggtggtgcgaacgcaaagaaatgaccttgtaaacgattattttatcacaaagacgtgaaaccaaatttgctataaattaaatgtataatcgaaactaaaacatcgtccactttggaatcgaaaaatcaaataatcggtagataatatacaggtacgtcggcggctatgaggaatcagagttatcacgtattcgatatgaagaaaaggcatttgactgagccgccaaaaacatttactgtttaaagagcgtttattttctttacgattgtaagaacatcttcatctgtaattctgtgctctaaaccgactttttgacctccaaattttacacttttgccccatatctgagcaaacttaaagtctctaaccatgtttctgtgaatcttgttacaaatattttggactgtactatttcttggcattattaaaggctcttttaaatcggcatcttgtcctttaggtttcatgtatatccgaacaaagtccaatttattgtaaatttctcttttaagtagttctatattcttgtttgtgtctgccgacacggcagtatatggaattttaagtttagatgttgccgtcttaagatattctgtatcaaccaaatcgattttatttatgactgctaatgaaggaatgtatacccgattccccgataacacatctattaactggtcaatcgttagacctctctgtcgtattgtgatacgtccgttgtggataccgtttattcgcatcacatttctgataaagttttcatctacttgtatgggaacctgaatatttaccgataaacctcctgtagcagtcttttctacaataatatcgggagggttttcatcgaccttgactcctatttcagatagttccttttttatgatctcaagatggttgatctggaacacatctaagacaatcaacaccaaatctgcatttctagcaacagataacactctctttcccaaacctttgcctgcagcagcgccttcaattatacctggcaaatccaatatctggatccgtgcaccattatagtctaacatccctggcacagcagttaatgtagtaaaagagtatgctgccgttttagattttgcatttgttaatgcatttaataaagtagatttccctacactagggaatcctatcaatacgaccgtgccatcaccggctttcctaacgtcaaagcccgcactgcctcctccagtagagacggtctttccatgggtattttcttcttgttctttttttaactttgctatctttgcctttagaattcctacgtggaattctgttgctttgtttatctgcgttttgtgtatctcatcttgaatggcctgaattttctctggtatccccattggttttaatattatttataaaaataacaataaaaattttgttaatagtgtattaaatatttgggctctattactatttcaataccatgaaaaatttgagaccgtatactattgcgatggtagtaatgaatcctagcattcctaaccatggcaaggccggaatctttggggtttttatttttatttgatgatcatcaataatatttgtgatataatccttaaccatcgaatgccataattgatattcaatacgatgtttctttaagatgatctcaatttcatacaccacaggtaccctgactgattttatatgctggaaatagtttctagagatttctacctctgcatgtattccaatcaaaccttgattaaaatctaggagtcttacatgcatctcccatggtttttttagtttttttgagaaaccgctaccaatttgggcaggttttttgtgttcgaattttaccattctaaacccttcagaaaccaaagtattgacaatttcatctttttttattttaaccattaaaaataaatgatccagctcgacttcttctcttttaataagattctgaatcccctgaagaagattcattcttctaggataaaatgtagaaaattcagccatgaacagttttctccaattacatttgatataacattgtttgactatttataatttaaaaaattaaaacttttcaaataaatgatcccgcaattctctttgaaagtcctcgtatataaatgtcaaatttgctatcaatacttaatgtatcactagagacaggcttgtcggtcattttaatatttaatcctctaattagtatgactggagtcgatgcgttagattctcccattatcatcgtccctatggaagctagacaatctgcaagattttgagaggtatactttagaatatttccaaaaagatcgtaactccctttcagatctatgactggttcaaatccgcagcaagctaatgcaatgcccactgtcccctttctcatgggtaaaattctgctatctgataaaacaacccccacccttttccttgaatctatcatgaatttctgtctgatggtctctatggagtggtaaggatattttggatacaaaacaacactacctttaggcacatttgacttgtcaatacctgcattgggagctagtaccttatgaacagaagttaatacaaatccatacaatccaccaaaaatttcatcagattctctgagaattaattccattatttttgggtctatgtgatactgtttagaggcttgaatagcttgactgcttggttttatccctgttaatttcttaattctaccttcactgattgaaagatatttgcttgatatgacaagtatatcgctatcttcgatgcatattttttctttattcatgataattttttcatacaaattaaattctgatgattctctatctaggtggatggggataacttccaaattctgatatttctcaaagcaaagtacataattaattttatcataaagatccttaatttctcttaaacctcaattcaaaaagtattaatctttagaagtcattcttaattatattactatgggaatgacaataactgaaaaaatcctgtctcattcctctaattccaaaacagttacccctggagatatcatattttctaacgttgataaagctatgattcatgacgtttcgggccccggggtcatcaaggtatttaaggaattggaaaaaaagggctttcaactggacaaactatgggaccctgagagggtgtggatctctgaagatcactttgttcctgccgccgacaggatttctgccgacaacgtaattcaattaaccaaatgggctcaaaaatatggtataaagaaacacttcaagtatggaatgggacaatacggtatttgtcatacgatttctcatgaagaggggttagtgttacctggagaagtttatgttggtggggattcacatactaacactacaggcgcaattggtgcttttagtgcagggctgggccatacagatattgcttatgttttaaaacatggtaaaatatggtttaaggtaccagaaactgtactatttaagataacaggaaaaaaacccgattatattatggctaaagacattattttgaatattatttccgatatagggaccgatggggccaattacaaagcgatgcagtttagtggtagtgttatagatgatatggaaatggaggaaaggtttactttaaccaatatgacaaccgaggccggtgcgaagaatggaataatagaaccggataacacaactgtaaattatttaaggacaagactcggagcaataaactttaatctagtcaaaggagatccagatgccgaatttagagaaatatttgaatatgactgcgaaaaaatggcaccttctgtggcaaagccattttctccggagaatgttgttcctgtaagggaggttcaaggtatagaaatagacaaagcgtatataggttcttgtactggtgcaaagctttgtgatctcagggctgcggccaaaatcttggagggaaagaaagttaaagtacgaactgaggtactccctgctgctcaatcgatctatatgaaggcaattaaagagggcttagttaccatttttatggagtctggtgcagttattggtccacctacctgtggagcttgttgtggtgcgcacatgggagttttaggaaaagatgaaatttgtgcaagcacgactaacagaaattttcctggtagaatgggggatgtaacgtcccaaacatatcttgcctctccgatggttgtagctgcgtcagcaattactggaaaattaactgatccaagggatttataatgattttaaaaggcgccgtgcacaaatacaatagaccgaatatagacacggatgttatcattcccggtccatatctaaaaatacatgaccacgatgagcttgcaaaacatgcaatggaaggactggatgctcactttatcaacaaggtttctaaaggtgattttcttttagtgggtcataattttggatgtggatcaagcagagaacatgctccaattgctctatcaaaaacaggtattaaagccattttatccccatcttttgcaagaatcttctatagaaattctatagatggtggttatttactacctattgaaattgaagaaaatattttagaaaaaatagatgataaggataaaatagaaattaatttagacaataatagcatttttaacgttactaaaaatgaatcctatccaatcaaaccatttagcaaaataatttcagatatcatagaagcgggtggactttttaactataaaatcccttaaaagaatatcatgatatagaggaaaatccattgaattcctaggtatttttttctttaatcttttttttgttttataactctattctcctattctaacagtttaaattttttttgtcaaggcaacttatattattaatatttctattgactaacatctcaaatgtattattcgctgcctttctctaccaatgattgaatgaaagtacaaatttggactgattccttatatcacttgtatctctatcttgaataattaattacctaattaagtgataataattctgagattcaagatgcatacattcatatgatttttacaaccaatcatgaatcatatatttagattcaaaaatgcaagtcggggtgttttttactaaagtaggaatttgctgattgcaatatgctttcaggattagggtactcaaaatctaaattgttttgggaatgataaaatatcatctgttcccttctttccctgtctattacatctgagttagaataatatactacaagctcaaaggcatccgattctttgaatcgttttacatgggccatctgtatatttccgtgtttaaaacgtagtgagtacaccagagcacatgcaaattcgaaattcgttcccttgaaattttcgattacaagattaggagatactatttcaagtaattcaattctatttgtttgatatactatgttgtaattattctgcatggtctcgcctactattttattctcaaataatacttctatttcgcattttgtaaaaaatgattccatcagataccccagttcctactcattaacctatgatttaatctccaactgatttattttgtagaattatttatgtatttcttgaattgtctcttagattttaacacgtgactactttcatccacatcaataaaatttagatgaacaccgattgctaaaaaaaccgaattctactcgaattctgagtgaaatttcagatatcttatttgtcatgaataggtcccagttaattctctgtatacctgtagtgcactctctatatcgttttttgtgatcgaataaaattctttcccactaaatgaataactgaccaaaaaaggttcatttgttataatacgtaaaccattcccagaaaacaggacactaccggtatttttgggttcatcaagtaaattacttggaattactatggtgtcgttaacaggaaatgtatatagtgttccaaattgtactggtagtttcagactattatttatggtcaaaatatttatggattggatttgtacaggtttgctcgaagcaaaagttagtactcctgaataagtagtgctttcgtttttaactgggaaaataaaaaatgattgttcaagacctgtattgtgaaatgtttcaggatttgaggatattgttccactgaaagaaacatcatgagatctgtgattggtatcattcatattatttatggctagagcagaaaatgaagagcccggtgttacatatataataaaaatacctaatagtataattaaagctactttaggtacagtagatatctcgaattgagatttgttgttgtaatggatagatactttgatcattggagtagttaaatatttgattcgatgtttgttaattaaaactattagaattattaagttaaatcaactatgctcttctgaatcactatcttagcttcattggatatatcataacaatcgagtatttttttgggatttcttattagtcgtttcctgaattcaggttcactggctgccttaagtaaaatctcacttatgacttcagcttctatactcatagaactcaagtaattccacaagagaatttgtgttatatataccttttctattttaaactctaatttatctttaatccattcatgtagtatggataatcatttttatcttgtcaacccaataattaaaataatatcgtatagaaatgaagaatgtacattctgattgaaaactacatctcaattattattgaaatctagaaaaaaatggagtacgatgggtacatctagaatccaacctgtagaacaaactttagaaaaagtaaattccttaattcatcaaattggaattacaagaattgcagatattacaaatatggatagacttaaaatacctaatttttcagccgtactgccaggaacggaggattacatctgggtatatagtgggaagggtcctacgaaaaaccatgcaagagctagtgctattatggaaagcattgaaagattttcatccttacctgcaaattatgacggaaaaattcagagggggacttttaaagaattatctcaaagttatactgttctagcatatgatgaagtagtggaaccagtctcgttccatttaaatgaagaaatgataatggactattgtattggttatgatttaatcaataactcagaagttttggtgcctgctccattgactatttttagatatactccatcgccgccatcaataaatccttattctttttaccatacaaatggattggcttctgggaatgtactagaagaagcaatctgtcacgccctatgcgaagttgtagaaagggatgcggtgagtttggccgaattcacttctagcgcatttcagtaccatgtattgaaaactattgaatattcgcttgtaaaaaggggttttcaattaaagtcatttgactcaaagagttttatggacgataatgctatttatccagaagttgatttaaacagtattgagaatgttactattgaccgtatcgtaaatagatttagacgatctcaaataccattgacagtaaaggatattacctcagaccttggaattccgacctttatagcaagtagtgccgaatgggttaatcatgagtatggatatctagtagaaggtcatggaactcatccagatgcacgaattgcattgatgagagctataacagaagtatctcaatccagagcagctaatattcaaggatctagggatgatctaagaaagatgaaatatgatcctgaaaataatgatgaaaatagatcatggcaattcattaaatccaaagaaaagaagtctttttcagaaatccgtacattttcctatgacgatatattagatgacataaaacttattctgaataatctaaaatcgagaggtctaacaaaagctatagtagtaaacttgactaattcgaaattaaatataccagttattagggtcatcgttcctggattggaaacattcaaaataaataaagcagttatagggcgaagagccaaggaaagtgttaaaaaatggttaggtccaaacctgtaatatttttaggaccttctctatcaagggataaagcaagaaaaattctagacgccgattacagacttccagctaaaaagggtgaccttctgcaattgatactaaaagaagttgatattgttggattggtggatggatattttcttcaggattatccacctacaccaattgaagtttataatttagttagaaaaaggaatgtaaaggttttaggatcatcgagtttgggcgctcttcgtgctgtcgaacttggcaagtatggaatgataggaataggaaaaatttttagactttttagaaatggaatcttagagtctgatgatgaggttgctgtgacgtttacggattatacgaattacaagtcagaagcattaattgatattagatacaatttgtttttagcccaaaaatacaagatcatagacaatatgacaggaaggtcgatccttaaaatatcaaaacagacatattttccttataggacctacgaagatattttggacaaatgcaaattaaagtatcctgaaatccattctcagcttgaaagttttagagattatattctgaacaataaaatgagtttgaaagaaatggatgcggtacggctactaaagcacataaaaagtattcatgaaccttgacatcaataaagttaattttatattcgctctaatttacctacagtattactcatgattaacgtgttaaccaatttttttcatagtgttgattcacgctctgtttatatagtatttttctatttttcagcattcatgatgctgtatataacaatgttcggaatgtattggagttggatagaatatgataaaacaggtgcattaaacataggtgaaacaatcgtaaaaaacgatttgatctttgatggatctggcaaattggttacctatcttgcaattttctcagttatcacatggttttgtgttactaaaatcggatatagcagagtacaaaataccccaaaaatagttcgatctgtgttatctgtgttatcaattattttgatagttgttgcagcttatgaatttacttacaattttactgtgtggggatcgtttataactgtaaatacaatcaataactctttgaattttgatgaaatcaatataagctatcccaaccctgaaacaccatggaatttcgtttttgcaactaagatgactctcgcagctctcataatttcttgtcatgctttttacattattcatcggtcagacaagcaatcctctatgtatgtgaaaaaacaggcctaaagcgtacatgttctcccatctaccatctaccatctgtcgtctccataaaactcatccatttgtcaccaatcctattaatttgagtttattataaaacagattcgtgattttatgcaatcaagaacgttttcaaaatttgacattcacaaaatgctaaaactgtttaaagcatagattaatttcaatattttggaacttaatatgggtattgacttgtttcttgaacgttaccttgcccaatgtccataatgaaaatcacaagattttttatgatggttaaaaaacaattgatagtgaaaattggggtagtctcagatacacatgatgatattgaaaatactaaaaaagcaataaatattttcaacacgacgaaagtagattatgttttacatgccggtgattatgtttttccgggaatgattagtttgttcaagaaattaaacaaagaaacaaaattttatggcgttaggggaaacaatgatggggaattaatgggtatcacaaggcagtttgatgcattaaaaaattctcaatttctaaacgaatttggaaaactcttaatttcatcaaaaaaaataggcatatatcatggaacaaactctgatttgtcaagatccttaatagaaagtcagttattcgatattttgatactcggtcatacgcatattaaaagaattgaaaaaatggggaaaacacttgtattgaaccccggatcactaaacagaaatttcttttctgaaaaaactaatgacggcccttgtgtaattgtctatgatgaaaaacgtcacatggcggaatttataaacgttaatggtaatatgaactcacattaggctctagaaaataatttgcaatttgattccttgttttacaagacagttaggttttccagagtcatttatagcataaaagtaaaaacgacaagaaaaaatatttatagatacaatttaaccactcaaagtaaataatatataaaatcgttgatatggtattttgtcatcacatgaaccgagggaaaaaatagaattgaacgaaacgagtgcggatagaaccaacaccaccgataatgacgtaaaaaataataatgagcaaagtactcaagttggaaatcaatctagtaatcataccaaagccaatgaggagagtttgggtgagaaatttactaccaatggccctgaaattcttgataaagaaaatcctaccctaattgatccgatatcaaagttgacatcaaactatttttgctttgactgcggatcagtctttactaccatagaggacaaaaaacagcatgaattaatcgagattgaaagaaagaaacaaattgatttagacaaaagtgattaaccaaacaggcgaatatcccatttaccttattgcttttatttttagaactgcttgaggactaggcaccgcatttttcatagttatgatacattaggtatcgttttgttcatatctttgaatatctataactactttatccccgaccttaatctttaattcatcatattctttcatggttactttgaaagtaggggcgtcgcttactgcgcctccaccaaacatattagatatatttgacatggcttttggtagattcttcataaggtcttctggagaagtaaaagccattacattggaaccaaaaggattcatttgcttatcaccagattttaaatattcatttggatccttaaatgatacgtatatataaggagaaccatccgtggatgcttcaattttggcaactatgaattcttttttcatctatacttattagtgataatcgatataataaatatttaattttagaaaaaaattaagagattttatatactttatttttctaaggaaacgacggttatgtattcatcggatcctatttgtatgccttaatgttgccaaatcctgttcctataatataattatttaattcttcctcgaaatcaaacctaatcttgaattttcaatccgtctctttcgccatttaatgtaatgttttgtcaacatatgaaacatcgctctttataaggggattatctgtatatgcagaacttaaatgtggatcagtcctataaatagaatcgatctatgtagtccgtgtagtccggatctccgtcattctcgaaattctgtaatttagttctataattcaaatcctatattttaacgaaaagattgttaacttttcctatagttatcttaccaccattacgatttagtccaagtattgcggacaaatctattttgaagattctttaacataatttttgacccaaatatctgatgactattttctatgtcttcggccgcaacgcttctatgggactcacctttgatgccttccaagctggcaatagtcctgcaattacacttaggacaacagagattatccatacggtgatcatatcactcataaaaaaaagaggtatgaggggagggtcgccttcatttctaggggtggtggcctgagacagtgcataaccccctccaacacctccaatcaagcccaaagaggcaccaagcatacctattatcagagcttcaaaaacaaacattgtcaaaatgttagagctttgtgcgcctattgcttttaatgtaccaatttccctgattctttcaatcatggaagtatataatgtggttattattcctactgcaccaacaattaatgagattatggctatgctcaacagaaaagaggtgatcccacctgtaaattgttcaatggtctttagtatagcttttactgtggttacccttatatcatttccatacaatttcttaatttcgttttctacaacatctactaattcgttagatgatgctactacaaataaagagtcgtacttgcccgatttctgaaaaagggaatcaccagcatccaagttaatgactgctgcattgtctatggttggattgcctgtagattccattattgcagtaaccaaaaaattcttcgaatttgtatcttgttcgccagttatgtcatcaataaatgaatattctaattctatggtctctcccaatgttacaaatggattatcttcgccaggaggattggcaatgttttctgctattacaattgcagacggatcattttgtttgatttgagagccctcttgtaaatcaagggttggggcaattacaaataacttgtttggatcgatagatagtgctgcatttgttttttcctcgcccctagatttgatcaatacctgtgactgataagatgggatcacttcatcaataaatggtaatgaatcaattctgtttattactgctgcatttaacgttatcttggagcccgcagagcctcctcatcctcctcctcctcctgtggagccaacagtactggagccctcttcttggccgcttgtaacaaatagaatgttaggagctaaattgctaaattgtttattaaagaattcagtaaatcctgctcctacaccatttactgccactagtagactagttccagccataaccattagaatggtcaggagagacctgatttttctctctttaagcgcctgaaaagataaaatgaatatttccctaatatccataaaatctatcccttctaactacttgtacataattagatccaaatcttatttgatgaggaggactatcagggcaatattgtaaaatttttaaattatatataatcaagacacctctttaatatttaggatcaaacggaaactaaagtgacatgatctgtggatcttatcgttaattaaagtggatttgtaaatttgatgattcttttttgtctttattttttctgtcactatactttttatccatgttattgtaatcatcacaattatcactattacatatctcaaaatagacttaaagttatctaagatgaagtgaaaaagtatagacttgtatgcctacatggttaaattttattaaaaaatcatttatgtaattatgttttcttcacgttctatttccccatccttgagatatattattcgatcagttttaattgctaactccggattatgggtaaccattagtatagtcctattatatttattggatagcatcttaagcaaattgaatacttcattacctgttttagtgtccaagttacccgtaggttcatcagccaaaatgatggatggattattcattaaggctctagcgatggcaactcgttgctgttgaccgccactcaaattgaacggtttgaaactgcctttgtcttcaattccaagcaatcccatgatttttaaggctctctctaaccgctcatttttatttaatcccgatattatacagggaatttcaatgttctttaaaacagacgctctatttatcaaattatacgattgaaaaatgaatccgatagcattatttcttaaatatgccagatcacgatcatttaaagaaaatacatctacaccattgatataaatatctccagttgtcggtcgatctagagtccctagtatatttaaaagtgtagatttgccgctacccgatggaccgacaatagatacaaactctccctttttgacctcaaaatcaatattttttagtattggtgtttctccctctgttgaaggataacttttgtaaattcgttcaactttaaggattggatcagaagaaggatacgaagatgccatttaaaatatcaattcaattttattactcatcaaactatataaaaattgaaaactgctcttaaattttatcacgggctctttctactgaattattctcgatacttgtagtaaaattgctctgatatcactattgattcaatgctgtagccaaaatttaaatactgaataatagtaaaatatgatataatattcttatgaaaaaaattaatttaataatattatctacttttattataggtgtaatgctattaaattccgaaactgggggtactgtgtcttatgctcaggagaaaattgatagaaacataatacctttgcttatacctccatatcagatgattgaggatcttgggtcatcagatttaaataaatttaatctaacatatgtcaacaatattccataagaaatagatagtttatagtataagattgatttctaaattaatagtatagaaatatttatcaaaatccttaatatgtaaatctaataatttaattacacatatgaatcgtggattgaatttttatggtattatactcttaacaatagctactattctagttttttcccttactgactttggagtggttcatgccactactggtattgatctagatgataatcctgttcaatctaatcaagtacctgacttaaaatccgatccaaatgataatgaagagagcactagcaacaataacaataacaacaacgatgacaataacgatgacaccaacaacaataacaataacaacaacgatgacaacaataatgacatgagcagcactagcactagcagtactcctactagcactagcaacaccaacaacgatgacaacaataatgacatgagcagcactagcactagcagtactcctactagcactagcaacaccaacaacgatgacaacaataatgacatgagcagcactagcactagcagtactcctactagcaccagtgccagtaccactacttcaaccagcaatgataatgtgcctatgtctttaccgtttaattcaaatatggcagacgaatcagacgatgagactgattattcaagtataatcccgttcccatgattttgaaaaattctaattttatacgttagacgatattatggttttatcatttcccaaaataattatttgatcctataaattcaccatgtcccagattttcaggaaatactataccattttccataattattttgccccttgagatggttgtgatgggccagccttgcaatctaatgccatcatatatcgtgtagtctgaagaagattgcaagaggtccggcgttacttttttgtaccaaatctacatctataataactagatctgcatctgaacccttttgtatagtgccttttttaggaaacattccaaagatttttgaagtattgtaactggtcaattccgccaagcgcaaaattggaatctgtcttaaatttactccataatgtagtaagacaggtagcatcgtggccactccgggaaatcctgctagtgcggtccaaatatcattattttcaccggactttaaactcaatgtatttgcaacgtggtcggttcctatagtgtcaattactccgttttttatagcactccataaactagatatgtcattcttggagcgtaaaggtggtaccactttgccccttatattattaaaatcaaccgagtgagttaaataatgtggacatgtttcaatatagatattacatcctccaatttgtcgttcatacaaaatggcgtctaatgcatcattagatcctatatgaacaaagtaaatattggatccaaactgtctagccgtattcccaatcttttttatagcgattacttcgctcttggtaggtctacatttagaccatatgtctagggggttatcatttctagcatgtgataaattattttttacatttgctgtgctcgtatctaaagtcctgatttctgtttttgacattgctattttcttttcctcaatgagatctgcacatgtattatggtcttctgcgtgaaccagaacaactgagttcttaaaagaagaagactcactgaggacgctactacagagttcatctgaaacatacacattttttggtagatgcaaatttttacacggatccatatccatcaagatcctattatcagttgaacctaaattcatgtagagtttgaatgaatgtattccactttgaaacaaatacgaaatatcttttacttgatcaaaattcaatattgaagcatgtatgccatagtctatgaaatggttctttgcactagcttctagatgctttgatattttatctttatatgattcgtatattctaagcattcgcataatggtggtgaccccgccaacagcagcagatttcgattcggttgctgaagccacttcaataggggaaaatactccgtagtgaacgtggggatcgattaatcccggtaaaacatatttaccatttgcatttattgattttgaataattaacgctatctgacgaattagttagttctttaatttttccattttctattagtatatctcttttaataacgcctattttaggtattacaacatttgcattctttattataagatcacagttattgctattgctagtgatattgctatgatcagaaccgtcaccgttactcgtattcatcaactcataagcaaaaagattagatctatctaagttgtctggttagagtggatggattttcgtagactttgtattgactatttttaagtgcgcaataacaaacgcttgcaggtcgtataaagaaccccgtctcaataatgcctggtattttttttagttccatatccaattgaagaacattcgaataatcattaaacataacgtctaaaataagatttccattttctgttatatagggatagcccttctccaatgttctaagtattgacatcccatttaatttattcaaaaaatgtatcgttgcagttctcccaaatgggagtatttccaggggcaccgattcttgaaaaacgccgaacaaattttgattcgtctccgacaattattgttttcttggatgaatagtataggatcttttcacggaataaggccccgccgccaccctttatcatgaagaatttattatcaatttgatcggctccgtcaattacaatatctaaaagagggatcaatgattcatctactatgtttaattttttcttctcggcttcaatttttatttgtaatgaggtacaaataaatttacacctttctgtgatggaaggtggtaacagatttacaattttggataccgctcgcccacttcctaatccaatgatgagaagtttatcggacatatgattttcgatgatatgttgggctatattttcaaagcttttatctatagagccattattttgagaatcagaagtggaagtagacataattattcataatgaagatggtgaaagtatatttaaatcgattgaagcagcagtatcagcaaacgcagtcaaagccaacactcgggtcaaagcagtaaatgtggtcatgatactattgtaattcacataaaccattttatgcttaattatgaatcccctaatctctttaaggttttaagaatatctctttgtattttgtcaatttcatttaagtcaatatttccaatcgtggactgcttcaaatctagtggagtagatgtccttgtaccatcttgatttatttcggtataatctttgttgatatcgttaattgatcttccttctgtttctttcaatccttcatttataccaaattctgattccccttggttgtcgttatcaacctgagacaatgattccttgcttctcttgttactaaatttcattgtttttatcttatttaatatcgagttagtttgttttggttttgagaatgcatttaaataattcttgtcattatccttaaaatttgattcattattgcctaatcccaaactcgctagctttgtgtctatttttttaacataatctgataaaattgaatttaactgatttctatactcgtatatttcttggacctctagtatcgggttaagttgaaaagcacgcttatcatactcatctaaaagattgatgtatttatgagataatctatccctttcatattcatctattcttttttcctcaaaatgttgatttatcttgtttagagcttctaaagcaactgatttttcaaagtaaagactgcttaactcatacttgacatttccgagaatttttagccgactctctcttcttatttttataatttggaaaacaaaaagggcacaaattatacctaacatggccgaactggcaactatgagtatgtctatcatgtctatctaataaccataatgacgtattggtttataaaaacaaaaacttggaatgttaaatcagtaaatcggagggttattttacccgtctttttatccatttgtattttctgagctttggatcagggtatccacattttgcacaagttttgccacgtttgtgaaatgaattatgtccgcatctcctacatctaatatgtgtctttttgcgggtaaatttacccatagatgttgttccttttgtcaaatccttttacctcaaaattaattgtagttatttgaactgaggcggagaaattataaccacattatctcctcttacaacgatatttccaatctcatctgtctttccttcttctaatatttcaacggaactttctaataataaattcatgtgttgatcaaaaccctgtaaatttcctctaataaccttaccgcccttcaattttatcaaaacatccctaccgaggctttcatcaaggactttaactgccatatctactgacaactttatctaacctattttctatcaaatggatgtcctatattaaatttagtttttactcgtttatgtgattttaaaggactatctaaatttagggtctgttattaaagccgatattttttctattatctgggaaagcattttctttccttctatgaccttggcattaaatggatttccccatattccattcttagtaaacttcacaaacccggccggattgttaattgacatgtttgtacctaatttataccaggattcgctttcttgaccgtttatgtctagtcctgtttttgctagatccatattaacaagatccggatggatagccatcatgatggaggtttctatttctcctgcatgatcaaacccgttttcaagcatttgccagtagttaataaaataaaaaaagtccgtattcatggcatatttcgatgacagattttgtcctacatattgtaaaaggccaatattcccgtgatgcccattgataacatacatacgtttgataccgtgcattgatagcgattgacatatacaggagatgaaatcaactagtatgttatagtctattgagatattgaaatgtggctcatgttcgtatgatacgccgtagaaaagcgaaggaagtaagaaggcttttgatttagttgatacaatatttgaaatatgttctacaataagggtatctgtcgaaaatggcaaatgatctccgtgctgttctatggaaccaagaggcaaaatggcggactcgtaattggaatcttttatcaaattagaaatttttttttgacttaaattcttgatttccattgttaatttaattaggatcgttgcgctgtgctataaaacatatttgattatttgtagcttactttgccccaatagacctctaatttatcttctaaaaacagctttactgcttcaagtaatgcaagagcttcagcaatttggccttttatcttgatagattctaatgtgtcttctgtcatcaccttaaacgattcttgaattattattggtccttgatctagatcttctgttacaaagtgtgctgtgcatccaattattttagcgcctctctcataagcttgtacatatgcaaaagctccaggaaaagcaggcaataaagatggatgaatgtttatgattctatttgggtagcgccatacaaaattaggtgttagtattctcatataccttgctaagacgatgaggtcaatgtcgaaattttctaccagctgtaaaatttcaccttctgcaacactttgttctgtatggtttacaaaatgaaatggtatagaaaaggagtctgcaatagattttagcttttcatcagaaccaattatcaacgagatattgcaagttatttctccagaggcgcgagaatttagaattttcaacaaacaatggtcttctctgcttactagaattgccacgttcttgattttgttctcttcatggaagtgtactttcacttccattgctagctttatacctaactcatgcaattccttttgcatttttggtttatcgattgttggaaatgacgcctcaagatgcattccgaagagtcctttaaccacattctggtttatcttttcaatgtttccaccatttcggaaaatgtagttagtcgtatcagccactattccttctttatctttacctacaatagtaacttcaacatgtgttttaatatttttagaatcggtaatatttgtacgagtatctcccatttatgatgaagaatattgattatccgagataaatatgatacagctaaatttatagagataaagttttttaatccatttagaaccgactgctcacgtagatgcattcttatccaggttgattgcacttgaaaccaattacctaaacggaagcaaattgtctgcaatatgctaacaaattacccgacaatcttttgttgaacatttatcacatagtcaacaaatttagtgaactttggcaataatgttctagtttttttattagtaaaagtatgatgtaagataatagcatatttattttaagaactatacatattatacacattaccttaacttatgatgtttacattaaacaataaaaaaccactaattttagctgtggttgcagtggtaacttttgctctgtttttgagtcccactttagctgtgaatgacgtcatggcaacagacaagaaaaacaaaggaaatgacggagatcaagacattgatcaaggccaatcttcacgacaaaatgcacaatgtgtctctggtgaagatgtggtagcatcatgtaaccaagtaagcgtccaagaccaagacaacgaaggaaataacgcagcaggacaacaaaatggaaaaggtaaaggaaatgacggagatcaagacattgaacaagagcaagaaaacaaacaaaacagtcagtgtgtagcaggagatagtgttgctgcatcatgtaacaatttgagcttccaagaccaagacaacgaaggaaataacgcagcaggacaacaaaatggcggagataacaaaaagggtaaaggaaatgaccgagatcaagacattgaacaagagcaagaaaacaaacaaaatgcacaatgtgtatccggtgaagatgcaatcgtatcttgtaaccaagtaagcttccaagaccaagtcaatgaagggaataacgcattaggtcaaaagtagtttctatccaatacctcacctcaacctttaattttttcattctattatcgatctgttaggttcaatttttccaaccacaattttatattagtcaggactaatgcattttgcttagattttgtcaccaaacaatcgacattagatacattctttcattcagtcattcattccaaaaaaattactaaatctaaaaaatttatttgaccagtaatcccatatccttcgacaaagaatcaacttaatttattaaaaggttgaatttactattaaatataaaatgggtagtagaaagagaaaaactgcaaggccagtacgaaaaacaaagtctactgaaggacgatgtccaaaatgtaagactatagtaagattcaatgtttctggccaggtgggcagcgagatctatgaatgcataggctgtactacaaagtataaaattgatgagctgtagttataaaatggaacagtataatggtagaatatctgatgttgaatcacgggaatgtttttttattgcaaaatttttagatatttagtgtctaatagaatagagtacaccaataaagtctatttatacagcagtgggatgcctgcagaattgatagatagaagtaaagaaaaattgcatgaacatggagttaatttaaacgatttaatagtaattgaatcaccagaaaatgttcctgaaggagcaattatgataacgctttggccacactatttgtctgtagccaaagtgaagagagtaagagaggggtctatctatgcgcctcagttatttaacatagatttatagctcagatacaaaacaaagcatgtttttaacttttttttgcaaaagaggcaagcataaagaatgtcccggtgattggcccatggatgagacttgcggtcccgacgaagattgctcatttgatatgaaaatggtaagatgcgaatgtgaatgccatgccatgccatggcatgatataaattcgatttcgctcgaataaagtaggcaattaagaaaaaaagagtctggtttttgttttagactctatatattttagtgtcaaaaatatattctattggctcgcataattatgtagtaaactaaacaataaactctcagaataaccatttttcatgatctacaaagagctgaaagttgttctgtttcttttctttttattagcctttttattagataaatacaagaaataataatatactttttaaagcaatccaattacaactgtattaacgatggaaaataaatatactaatcattccaataaatctgtttatcatggaaaatgtatctcatttttgaacatttctgaaaagattcgatatgttggaataattaatagatttggtagaacgatatcaggaaagctgcgacagaatgtaaaacctttgttatctcctgagcaggctagagacgaacgttttatagaatctgtgagacaacagctgcgaagttcctttgagtcatcaattggaaaaaccgtattctctattacaaaaaatgaatttgttactttggtattaattccaactcaaactaatgataatgttctatattatgtaactatagataaggacgttccactagatgaagtcaataacatcataaataaaataattgaagcaagtagataaaaataaaagataatttatactaatctagttagttaaaatttattctacttctcatttctttatccttaatgatagctggatgatgtggatcaactagaattacttcaaaccaagaatacattccgtcttgataaagcatatatgatcccattacccttaaattaacgaacttttcatttacacgtctttcagctactcttttcatgctgatgctttgtttaatgtgaactacaccaatatgttttggtcttctgcctgagacaggacgttgctttctcattcctcctctaccaacacgagccctaactacaattatgccttgtttagctttgtaacctaatgctctagccctatctatacgagtggggtgttctatcttatgtattgtgggttctcttctccatacatacgctttattctttatttctggagatctcgttttcaacattgtcttccatgtttccgcaatatggctgtacatgtttttgctttgtttttacccattaatattttatttgggtgagaaaccatcaagcaaaatgatattaattaaataataaacttgaaaattagaaaaaacagagtagagaagagttatttagcgtctatgcattctttctggctttttctgtcctggttgaacccttttttcaaatctttttatgaaattattcttattcctaactttagaagaagggctagttctttcacgtgcttgtattttgggagtttgacccctaacctttccagctttagttaatgatccgtgagtcggcatgagctattaatattgaaactcatatttattatatgcattttgaaatcataatatataggcaacaattaccatgattgaaatatttatggcaatcaaagactaaatcaccattatttaaattgaagaatctcataatttgatctgcaagtaatgtctgtattgaaactagactacacgaaggaaatccaaagactaaaaaaagaaaaaaatgcaataattttagctcataactatcaaatttctgaagttcaagatatatctgactttgttggagattcccttaaattatctagattagccaaagaaacggatgcctcaattattgtattttgcggtgtccattttatggctgaaacagcgtcaataataagtccaaacaagagggtgttgatacccgatttagaagccggatgttcacttgcttcttctatcaatccactagaactcttaaaatggaaaaatgaaaatccggatgctatggttgtaagttatgtgaatacctctgcagagataaaggctctatcggattattgctgcacatcctccaatgcagtaaaggtagtacagagtattccaaataaaactcctattctgttcttacctgacatgtttttgggagcttatgttgaggaagtaacgaaaaggaataatatcaagatatggcctggtgaatgccatgttcatgctggtattactgacaaagatatcaactcgatactacaaaaatattcaaaagccgaatttttggttcaccctgaatgtagttgtacttcttctacactatatcatatatctaaaggcgatataaatagagattgtaaaatattatcgacagaagggatgatgaaggaggctaattcatcaaaaaataatcaatttctaatagccacagaagtgggaatacttcatagaatgcaggaagaaaatccatccaaagaatttatccctgtaaaaaaagacgcaatatgcaaatatatgaaaaaaataacaatcgagaaagtatacaattcacttctcaatgatgtttatgaggttaaagttcctgaaaatatagcaaaaaaagcaatgataccgatagaaaggatgcttgccatctcttgatctgtcccatccttccatctcgtcccatctcattcgtatgctttaccgtatctataatggagttggaattagagtagagttatactcctagttagatttaatccaatgcaattgagaactgcatacatccactaggtagttcgcattcaccaaacctaatactaataagaattacaattactctcagtgatatcgttacttttactatcataaatactattacaattaattaggtttatcatagctcattaaaattgtgaaaaataatttagacggtcatttgatacatatgcatataacattacccgggaatttctaggctaaaatctattgattgaactgaatgagttaatgacccaatagagataacgtctggtctagctatggcataatcataaatattatctaaatttatacccccggaaatttcaataatgatattatcacgcaagcctaattttctaattctatcaagcgactctttgacctcttctggtttaaaattatctaacattactatgtcggcacctgattttatcgcttcaactatgccaccaaaatcaattacctcgcattctatttttcttttatttccatacaccgacctggccttttcaatggcttttttcacagaaccaacaactgcgatgtgattatcctttattagtataagttgatcaagccttgctctatgagagataccgcctcctattaccacagcctttttatcaaaataccttaatcccggaacagtttttcttgttgaggcaattcttacagttttcgataattcttctaacttttctataaatttattagtccgcgtagatatcccgctcatacgcattaaaagattgagtgctgttctttctccttttagaatcgaccttgatgacccttctacacttagcacatctgtaccttttgcaatttttgctccgtcatctactaatagggtggcttcgcagccgcaaatatcaaaaataattttagcctctaaaagtccgctaactattgtgctttttccatcgtttttgcaaattattgttcctttagaggtggttccttctggaatcagtaaattgcttgtaatgtctccggttccaatatcctcatttagaaagccaaccagagcagcccttttttctatttcggatttgaacggttgaacctgctcctgttgctcctgctctcgatttaaatcactagagtttgaattataaaaaaaattgttatgatttttcaattcattaaattattatgtaacctttaaagcatatttgtgtggaacagatattcctagtgtagctgcaacctttgatttttctggatgaagtatcaacataattccgaaccagtctttggatagttcagtagacttgcatactgggcacatttttcctgtagttaaggccttgcattttttacaagcatattctcttaccaacactatcactactcagtataatttttatctcttgtctttttttgctgccttaacatatgaactatctgcaccttttttgtctgcattgctgttcttaccgctggaattttccccacttgctcctccttgcgcacgtcttatctctttttccacccattctagtgctcctagaaacggttgcctacatgtgattcctattttacccattgatgcgctctttcctaagctaattgctgtgattcttgcacgaattttggagcttatccgtaaagtcttttcagattgatttgataatattaaaccttgtttcacatcgctttttaggtagtcatctgtgatctgagataagtgtaaaagagcgtcggttggacctattctaacaaatgcaccaaaatcagtaatttctactacctcaccctctacaacctcgtgaagttttggataaaacgttaatgcggtaaaatttactttgtgatacgtagctccatccccagcaataaccttgcctacagagtgggtttctgcatcaataatcaaaattacgtaccctaattctgcattaaccatactttcatatttttcttttaggataccaattgcagttaactttagagaattagttagcttactaggaggaattcttactacatcggacatatgtgctatagcaaacataataaagataaaagatatccagaactatcagtttatgaactttatgttttttttgattaattatgtgagaaaagttaacttgccattttgactattttcattatcgcttttgagaatgaatgatttaaatagaatagttactcgatttttatatcgtcatggttactgtagataaagtcattagtgccttaaagaatgttaaagatccagaattacacaaagatatagtgtctatgggtatgataaaagatattactattaatgaagataaacttgcttttacattagaattaactacgcctgcttgtccatttaatagcgaaattgaacaggatgtgagaaatactattacaaatttgggaatcaaggatttggaccttaaagtcacggccagagtaatggagggcaggacgataactatggatcaaattttgcctggagtgaaaaatatattagctgttgcaagtgggaagggtggtgttggaaaaaccactgtttcggtaaatttagccgtagcccttgcaaaaacgggtgctaaagttggcatattggatgcagacgtatatggaccaagcgtacctttgatgttgggactaaaagatgtccccgaggttttagagggaaaaattcagcccccagttactgaaaatgttaaagtaatgtcaatgggattcttctacgaacagtctcaacaagctggaatataccgtggtcctattattgcaggtatagtaaaacagttcataacagacgtaaattggggcgaacttgattatcttattattgatttgccacctggtactggggatgctccacttaccatggcacaaacaataccaattactggaatccttgttgtgacaacgcctcaagaggtcgctatgaatgtagccgtaaaatcaatcggtatgttcaacaaattaaacataccgataataggtgtggtagagaatatgagctatcttaaatgtcctaattgtgatgaaaaaatacatatatttggagaaggcggaggaatgaaaattagtgaacagtataaaattccatttattggcgaaatacctttgacaactcagatcatgaaaggaagcgatagtggagtatctgttctaatttcagaacctacgtctgaatatgcccaggcttttaataaaatctctaaaataaccgcaggaagaataagtgttattgcatcagaattgatggatcaagaaaaagaacaacaaaaatagagttctgctttatattcattacccgaaaacccttagatattaaaagcaaacaaagaaactcaatcttataaaattttaaaggtgagaaaaaaatttgaaaatagatcaatcccaattggatcttctaaaggagccatttggggtattaattaaagatgttgatatcgataaagaattcttaaaccgagaaattggtcgtgcacacaagattataacggtaggagatactactactgaaaaaatggtacgtttgggatatatccctgatatctcggttgtagatggaaaggaaaaaaggatcaaaaaacccaaaatatttgagtatccaatagataaaattttacatttcaataataatcccggagaattgaatgaatatgtgattgcagagataatgaaattaactcaaagcaaattagaaagcaaaatccagttcattattgagggtgaggaagacttggttgcacttccattcctaatgtattctccagataattgggttatttgttatggacaacccaacgctggtttggtaatagtacgagtaaacgaagactctagaaatagggccaagttaatatttaataaagtctttaacatttaagcttcaataatgcagggtatgatgatacggtggctgtatgaatgtataaaaagatgatttgattttaccatttactgaccctgaatttgtttttttagttatattattagtattcatcctaattcgttttcaacaaagaatagtgaattatgaattgatcatgactaaaaattatataggtcaaattaaattaaattaaattaaattattagtagagcatttttgtagtattttttttgtgtttgcaatattctttttttataaatatctatatgatctgaccaccctgttagcaatcacatccgcaaccatccctgctgttatcaaaagtatccataccgtatttcttcatacaggcattgcatacactttcggattcattacttatgactgcatcacaaaatgaacatactttggtcatatactatctatagtatgattaaaaataaaaccttatctgaatttaatactatcctcttgttattttttctttataataatgaatggatcatgtgcttaggcgcggttgctgtaaagcttgtatatcgttcctgtctcatcactgatatagttccagttttcaggattgatgtctacgagagaaaaatattcttgttcctcttttgatagaacatcataaatcagctgtcctactattatattattaaccttggcatgagtagtcattttggttgcaatactaatggtatatcctagtatatcgtaagttggtcccttatcagatatcaattcactggttttttgaatggttttataatcatatcgtgttaagtcgcttacattctctatatatggataatattttacgatcacattatcaccgtaatcaatgccgattctaacaccgatttcaggatagtcatactggctaaaaacagggttaaatccttgattgatgactttaatcatagtacgggcgcaatttatcgcgttaatgcagagtgtatacaaatggttagaactaacattaaaaaaacctattattgcatcaccaatgtattttaaaacatatcctccatagaggcggattatcttggtcatctcttgacagaaagtttgaattattttagacactctttctatagggaggttcatggacaattttgtagaccctactatatcgatatttaagattatcagtttaattttttcattactataactgctgagaatttcttgtgtttcttcaaagggggcagtaaaaatgggatctgattgtaaggctttccacatacttgattgggaagctgtaataattttttgaatatctattagagcgtcaacgtaaaaaacagaggcattatccacctttttgttaccaattagcctgttattctgatgatcttttttttctattaaattcttgataacatcttctacttcctctacctcaatatctaactgcaaggcaataatctcttgaggaattccggaatcaaatagatttacaaccgtttgatgttgctcatatttgtcaattttcgttatttgatccttttctaaattcttttcatctgattgggaaattctcttttcacctacaatgatattaaatcatggttaaaagtttatagcagattatcatttataatttttgttgagcacaacgattcaatccaagtaattagctctaaatcgcataaatattgaaataaagacaaattctaatttacacgctcaagttcttttgactttttataaagtttttttactggagtatctgggttacctatatcactaacgccgcttgcatcatcactactaccatcatccacactatcgccatcaccgccaccataactaacactatcttcttcatcattaccgcccagtcttttgagagtagtcaaaatctcttgctctattttctctatctctggatttgtatttttttctatagggaaatcgttatcagttatacatttgtttaggggttcgttatcgttctgttcaacgtttattggtttgtcctgagccgtcgaataataaggattattcctggttgatacccgcatagatggatcgtagtcaggagaaaggtacgatttgggtgtaatcgagggtactgacgtcttcgatgtgtatattgattctactgtcgagggagaatgcaatactgtccctggtattggtatagaattatttttcaaaatatttggtttaggtattgtactttgtcttgcatctattgtttcagaatctgtcatcgtttgattttctaatgtgggatctgttgactgatctaacgaatctgattcataatcagtggattctttgaatcgataattacaggccggatcctcaatagaatctacggatgaaccaaatttatcctgatttgtggatattgttaggacttggtcatataaataagatagttttgattcaatattgctaattttatattcgattttttcatttaagctaatattttttagatgaattttatttattttaaagtaaataatcaatataatcaaagcaattgcgatagtttgagcaataattgcaactaccaataaatcggatgtattttcaaagccgagcattttaataaacaataacgataaattttttcttgcttttaagtctaattattcgattagttgagtggtgatcacacggctgtgatgtttttcgtattcataagtagactcaaaacaatgtttttgatttttatataacgtaaattggcaatttggcatgtagataggtaggtaggcaggtagaaaaaatgcctaggtaagaggagactagacattccattgaatataatctgtatttctgataagatacgtaattcgtttaaagacgctttttgcatcatctccacatccgtattgggaataaaaattgtttcttatatagcaggattttgaaaatttctgatcgactaactggacatcctggtatttgatcaagcccaggtttattttgatcagatctttgattacttggtataatccctttcttgaggcgtatgctttgtctatctttatgtaccaaaacattctggttgggtccttggaataattgttaaatactaattccttaagttcgagggacctctcaatatcaaaatgtcctaaaatttctatttttcttttcgatagacggtaaacagcttgagcaaattttgaacaggacgaacaataattatcatatattagaacgggaaaatgaaacttgaggtcttttttttccatatctattattatacactctaacttttattttattaacaattaatatctaacctaaatctctacacaagttactaccctcttttgtttcaactttcgaggcttctaagaagtcagattatggatatcgtattcgatcgcttgcagaatatgataattatagcacctatcctctaggaatttctgagcacatataccagagcgaaataaaagattgacatataatctaattataacctatattcgactggaccatatgaaaattggattattttgggataaaaataggcaattttcatactgtggagttgttgatgaccatcggttcttgtcagatagccgtcagatagccgtcagatagccgtcagatagccgtcagatagccgtcagatagccgtcagatagccgtcagatagccgtcagatagccgtcagatagccgtcagatagccgtcagatagccgtcagatagccgtcagatagccgtcagatagccgtcagatagccgtcagatagccgtcagatagccgtcagatagccgtcagatagccgtcagatagccgtcagatagccgtcagatagccgtcagatagccgtcagatagccgtcagatagccgttaaagacagacactgcttaacttggaatggtaaaatcatcatcaaaattttgatataaatactctttttttgttatatataacatgtataagattgggaaaggcgattcctcaagcaatagaggtcagtccttagaggctggttgagaggtatatcgcgtgacagcatagccatagagaacaaaatagggtatcgcagtgtttctaccataattgatcaattccgactccaaatagcagatatggatttattgagagcagtttctatagagttaagaaagaaggaccttgatctatatcagttaggtgcctctattagattgaaaaggaaattagacaagataaacttaccagaagaacaaatagaaaatgtccttgagcaaatgagcatccattgctttcaggaagatactgatattgaacaattctttgtccagatcgacaaagttacacagatgtctaatactcttggtatttcaatatttgatatttcagaaatcattgaaagagaaaaacgggaattagcccgattagatgaactgatattcattaatactaaagaaattagtagacagatagtagaggaaggaattacgaagaaagacttggatgaatatagaatgacaagaccgcttgcagacagaataaagcagctggagtgggaatcaaaagagaaggatcgaattataataaatatacaaaaaaatatatcaaagcttagattgaggtctgatggacaagatgaaattgtagtagatctaagaaaatcctatttagattgaaagcaggtcaaaaaaattgggaaatatttaatttcctatgcactatgcaagcgatcccagattataaacatggattaaaggtattaaattgagacagaagtgtgaggatatagtttaagttcgagttgacagtatgatatgaccaatggacaaattgtatgtattggagtttgatgttgcctataaaagcaataaactaggtggtctgattccgctgttgtcaaaataatcatgtgagccactatatagtcatcaatcatccctatcaatgaaatggattggatatatagaagaaaatatttaaattgaaaaaaacatttcagggtaatgtgtggaagattttaattccaaaaaaaatagcatacggggaaaatgcagcaaaggaatttgattaccctgaaaatgcgttaataataacaactactgagagcaagatttatgaaaaatggatagagtatatgggaataaaaaattatcacatttatgataaagtcactcctgatccagctattgaaaccattgaaaccataaaaaatgaatttgatggaaagaatgtgtcctgttatattgggttgggcggtggaagctcactagatgtatgcaaatacttgagcaagatgactggagtcccaaaaattctgatacctactacatttggaacgggggccgaaatgaccacttatgctgtgattagttttgatcataagaagaagctgttacaggatgaggctttcttagctgatgctgctgttatcgatccttactttttacctgggactccttttaatatcatgcgtaattctgcatgtgatgcagcagcacaagcttctgaaggatatgatagcaagttaggaaatccactaacaaaactattttgtaaagaggcatttgatattctagaggatgccataattaacgacaaacctgagttattaccttatggtgcaatgctttcaggcataggctttggcaactcatcaactacattaggacatgccttatcttacgtattttctaatgaaggggtgccacacggctattctttatcttcgtgtaccactgttgcccacaagtttaacgattctatctattatgagagattcaagaaaatatgccaaaaactaaaatttgagcccttaaagcttacgcaacctctcgatgccgcagcagacgttattatgccagatagagggcatttagataacaatccaaaagaagttactaaacaggacgttataaaatgtcttgatgagattgtaaacagtaatccgcttgcataaaaaactcgctcacttttttatttatggttaggaaaaactataaattcatattaattatttatcaagttatcttatgactaccattagtaagagtatggacattgctgcacccctgagcgaagttttcacttattttgcaaggccagagcatatggcagatcaatttccagaaaatatgggtctaaacgtaattccattagaagttaagaacggatttggagtaggtacaatttttagaattagcggtgattttgatggcaagaaattagaatgggattgtgaaaccattgattacattccccataaaaaaatagttgcaaaaatgattgaagggccgtttaaacattggcagattactgttgattttgatgaattagaagagaaaaaaacaagaacaacattaactgtcgaatacgatatgcccatgggacctcttggaggattgcttgacaaggtgaagctaaagaaaatagctgaaagagggatggaaaacggcttgtacagagttaaagcattgttggaaggcaccggctcaattccagtctatataactctagaagcctatcgaaaggtcttaaaagagaaagagaggctgaaatgctcagtttctgaggcaattgttgatataataaatcaaaatcaacaacaagcaacaacagccaaaccaatccaataattttttgaatctattctaatatttattcagataatttacttagtttagtttaaatagtctttaactaatttcatttaatcgtagggttcgtagctcagccaggtagagcgtctggctcttaaccagatcgaaagaggttaaaatgtcgtgggtccgaatcccaccgaacccgctaccaatattagtaacattttagaacgcgataaaatattatataattctaaaaaagggattatgaaatttttacacccatcatggcatatgggaattttctaggaaagtttctactacaccactaaactgttctggatattgatacatcaatccatgaccagctccattaatttggacgtaccaggctcttggaataagttctgccattgtaagagaatttggtgcaggagtagctgcgtcgtcagtacctactataaccagtgttggttgagttacagtttttagtctatcacaagtacttgatgaactgcctgccgctgcaatctgattgttaagcgtttcattcagaactgtctctgtagattttggaatactttccagataatttggattttcattgcgccattcctctgggaagaataacggtactagtcgtgctattctttcttcggcagttcctgttccattcataaactcattacgaacttcctgactttgtggtactgaatttggattaccgcaacctattgcataaagaataagtcttccaaccttatcaggataagttagtgtcaattcctgagcaattcttccgcccattgaccatgaaagtacatccgctttctggatgtttaatgcgtctagcaagcccgcagtgtcatttgcaaataatgatatcgagggctcttcttcaccagaagttgtgtttcccattcctcggttattaaaaacaattactgtatggttggctgcaagggtttctaacaaggtggggttccaactgtccatattgaaggagtaaccatttatcagtatgatggggtcaccttcaccaaacgtcttgtaagcaatgtctatgtctcctacacgaactttttgtacagggatgtcctgaatgtttagagtatttgtattttcattactcccaccagtgttatttgagatcatttgacttggttgttggctatatgcaaaattagccaagggtgcagcaataatgagaagtgataaaataatactgacgataagcatgtttcattgatgtctgttgataatgttatttaaggaccagtgtcattatcttttagaatttactgacctttagctttgaataattcatttttatttttagtagactcatgaggatatcctcatgagttccaccgaacccgcattgtatacggaacttaatcccaccgaattgatatggttcgtgaaatttaccctaatacaaacagaatgaagggaattggctctttatttagaccagaactttgtctcctttttgattcttacatattaattctaaaacttgtccattttttatattgtcgtataattttacaattaacttaagaataatttatgtatactctctttagtcaaatgcaacttgaatatttgatcatcattgagaataaacacctggtcgtgtgattcaaacaactctatcatttctgatgtagatgcattgaaaagattggtcatctcgtaggcacaaaataccagaccctctagtctattcttatcatattgtttttcaagagaaattgcttcggaaattgaagaagttgcaatatcgttaatgagaaaatccaccaaacatatttctttattattagaattctgcgatatgttttgcaatatgtctttaatatgtttcattttatctttttgagattgtttgtactgtactatcgttccgtcaaaccaatctagtttttctaatgcttcggtaattaaagtatttgaagaacgggcaaaacatttgaaccattcgtcttctcgagtcatcttatctaatgacttgatcaagtgttggatagactcttcgttatcataaagaagtaaatgatgtctttttgggatttcatcctgtttttttagccactgatccacggcatcttttacaattgaattgatggagacacctttctttttcgattgattgcccaattgcgaatgaatctcatcgtcgaagcctcgaattatcaaatttcgtgtcatatctttatttacctggtcgtgtcttataagtgatatcacgctatcaactatagaaaactatatataatatgatatcgtgatatcaaactatgagccttataaataaagaaagtgaaaaagaaaaatctgtgaacactaaagctgagaatgtttggaaactgggagattaccgtagcatatctacaatgcttccacccatttctgctcatttgatcagattgctgaatgttcaatcgggagaatccgttcttgacgtggcatgcggtaatggtaacacagcaattactgccaggagaaagagtgcaaaaataactggaatcgatataacatctgaactattggatattgcttcagaagaagcgaaaatagcgttactagatgatatagagtggaaagagggtaatgcccagaacttaccatttgaagatgaatcatttgatgttgtcctttcaacctttgggcatatgtttgcaccccaacctgatcttgtcagcaaagaaatgattcgtgtaacaaagaaaggtggtagaataggcttcgcaacatggccgcccgaattggccattggatcaatatttagagtaaatggtaaatacctaccgaaaaatcctgatgcaccgccctcaccaatactttggggaattcctgaagttgtaaaagagagattaaatggaatatcagaaatctactttgaaagaggaacagcaatatttcctattcttagtcatggtcacttttgggagtttatgagcacaaaatatggcccattacttaaaactatccaactattaaagaatcaggacaatactaatcaaattaatttgtttagagaggatttcttacgtgctatagatccatatgttgtagaaaatagtataagactaggttaccttttgacggtagcaagaaaataaaacgtgatttaagtggtaaatgaaatgaaaaatatgcgtgaatttatacggatggtaattaaccctatattgactactaaagcaataaactgtcgtaaagaatcctcatatagtgtattgaaatctcggttacttttagtaactttgttaggtacaataatgatcacatctgtttctccaaacgtccaaaattacggtgtgaacacattaaactatgttttcgcacaggggaatctaaccagcggtttacaacagttcgaatttaatgaagatctccaaaccgctcttcctaatgatgacgaacaagatgacagcgaaaatgctccagaacaggcatctaatgaagagtcacaaactacgttgccagaagagcatacattagaagaacaatcatcatcgactgaatctactttgaacgaaaacaatacactcattattgatccaagtgacccccgtcttattggagaggtggagttaaccgatttgaagactattcctcaagaggttcgtgttggagatgaatttaaaatacaagctaccataaaaaatggtctaaatgaaccgataacttacacaggaaaaacatgtggagaatcaccactaaacgtaaagtacgatgacaaggttactgttacacaattactccattgcaatgcaatcagcactgacacacttgctccaaatgaaatggctactgtggaaagtagaggatatgagatagctacagcaattagccctggaacttcaaacgtggatgtagatctttactacaatgctggaaatagccctaaccaaggaatagttacacgatcgtttagctttgatgtaaatgacgaacgaaaataaaaacactttcttatccgattaaatcgggctctattatattttaaggacattcatttgtaggcataagtaaaaagcaaaccataacatacctaactttgctatttttctttactaaaattctggatggttcgcggtttcgatttttagtaccatagcatcaattcctctaatttttttcgttaaaaattcagctgatttgattcgaatgaatatatcatcaattccctaaggttttccgtaagtattttcatatataatatcaagaagaaggacttagttaattctaagttacaatgttaagtacacaatatataatataaaataggaaaattgtataaagttattctgtacctagtttaatttatttagtggaaattctttggtccaaaaattaaactggttggattaaattaaaaataaaataatatcctagttagaatacatgactaaaccgattgtagaattaatattaaagaaaaagtgatttaaaacttgattcgagtccattcttaattagttagaataggatattataatctcattgttaatttggtattaatagttttaaaatctaatagctatcaaaaaaaagaatagaaggttgcccacttctggtctattaatattgcactgggtccattataagctctcttgggccgcaatcacttggaggtgcagcaattttacaggtagtacaatatttatcactaagtatttgaccatcaacttttactcgtgtacaacaggttacgggaccgccgtcgtatttataatcgcatctatatttaccttgtccagattgttgaggcgcattcttagatggggtcgactggtcgtttgaggatatcggtccatcttgtccagattgttgaagcgcatacgccgtatataaagaagttgaactataaactgaaaccgcaagaattgatattgtaacaatcaacactatcagtttattcatccttgttgtaagacctcctcgtaagtgctctctttattagttgtctgacattctcatttatttgatatattttttccatatagtgatatcacgatatcagatatataaatctaactaattatgatatcacgatatcataaatctaaaacaattgaattatgagacataaaattaaagaggtatattcattttgcttagtataataagtttatcaggtacaactggaattaatttggaattcaaaatgtcgatgatcaacgttccaaactatcttcttcgcttagatgaaaaatacttctttactctaaaatgtgacgctctatcgaattttaaacaagtcatcattcacttttaatggtattagaattctacaaatatagtcaacctcattacaatgcattggtatgaccatagccaaaaattaattgttagtaactgttcccatattccgcttgaattaaaatctctgccgtgccagttttaaattttaataataatgattttccgttagttaagaggacgaaagaacaacgaagttattaaattagagacttgaaatttctatagtgagacaaaatttggcttattattattatttttgtactttttcagcggcttgcaggataaagtctgcaattttatctgggtttgatataagagatgcatgactacagttaattgatatggtagctgcatttatttgatttgcaaatttctgttgtaagtttaacggaatcaactgatcttctgtagatatctggtaccatgagggaatttctttccaggcgggagggcccgattttgcttcaagaatagattgattaatcggtttttgtacggcttgccagatggccacctcagaatgattaacatcgtaagccattacatcatggaaaaatattggattcaagcacaaaaatccaccgctatcactaatcaaaaagtcttttggaaacagggtaacgtcgatatagtcagagatggattcaccctcatttggtgcaaatgcggcaatatggactaatccgtttactttaggattattgtgtgcagcattagtcgttacaaatccaccgtaagaatggcctacaagaagtgttggtctacccattaaggcgattgcacgagtaaccgtagatatatcatcggttaatgaatgtagagataattgcactgccatgacatcatgacctgcttcttttattatagggataactttatgccatatacttccgtcgctaaatgctccgtgaatcaaaactatatagggtaacatcgtattcaaattgttagatgattgtatatgggatatagcaacattttgtttatattacgtccatttttataattatatctgcctgacatgccaatttatcccttagggtttagcctcaaagaccatgttgaacggtgtttgagttgccaatctgactttagaaaaacctgacgattttattaactccattattttttgcttgcctgcttgtgctcccaaggctggaccattctcatttaaagaagcaggaacacataccactgaagataccgagtaaaatactctaccaagaggattgagattatcctctaatttatcatttgcaaagggttccactatcatcaacgtaccgttttttttctttagtgtttgaaggacatgtttagcagctcctgctggatcacccatgtcatgaaagcaatcaaagaatgcaaccatgtcatagtcatcacctggataatttgtagagtttgctatttcaaaggaaagattttttaggccttctttttcggcttcttttcttgcccattctattgagggtttgtgagaatcaaatcctacgatttttgagtcaggatatgcttttgccatcagaattgatgaagcaccatgtccacatccaacatctgctactatagctcttccgctttttagctttgattctacgttttcaagcgaaggaatccagctattaatcagatttgcaacatagtttggtttaaagaatcgctccgttccttcgaagagataatgatgatgatctccccatccaagtccttttccagttttaaatgcttcaataattttttagtcatccttaaaaagactaactagagattggtaaaaacctgctacatatgcggggctattttcatcagtaagtgccatagcatgctcattgggcaatatataggtactattattaggattgtaaataatataacccccagctgcttgacctgaaagccattcttttatcatacggggatgtgttagggttttttctgcgagttcttcagctgtcaattcccccgcccctgccattgccttaaataaccccagtttgtctcccacgaaagtaattaaagctccttctgctgcaccccagtcgtttacaactctttcgataaatttatttagtttttcttgatcaatttcattcgttaattgattcatagtattgctatcacgctagcattatttaaagctatccaatttgatagcatgctagcacttatataatcataattgctataataaagtaatggtgcatactctagtcattcgaggatttgatcatgacacacactcacaattgggaaatctttccagagaaaaaggagtatctattaactcaattgtaaaagacgctgtagatcaatggctaaaaaaacaaaaggagataccaaaaagacatcatttacttctatatgaagatgataagtcgatgatccgcttgctaaaattaatggataaattcatgtcaggtgaagataaatggttcaagtgtttcataccttcatctaatttaagatatgttgaattattacgcggtttagattggtatgatactaatgacgagaatatacaatatgatcattctcaaaaaaatacaatagaatactttaattatactttacaaaatattgtgaaaaaatccaaaaatagagaactatgttgtgtagactttcttcttaacgatattgcaaaatcagatattaaagagactcttgaaattgaaagagcgtacaatcaaaacaagttaagtgggctcgctttctgtccttacaaaataaaggatttatcaaatacaacattatcagatattattgcaatatttgaagcccatcaacaaatttttgtagtcaaagaagatgaattatacaagttaaatattaccaaagaaaacattcataaactattcttgagttaaaatgaaatatataaagaaataacgactggccacatgttcttaaattattaacttcgaatttggtcgttagtaaaaaaactctcttaggttcttcccatattcaagatatacctttagactacataacatctgtgtccaccccatacaactaatatgagattcatctaccgattcctgggtcattgtcttccatccactctgtgaaagtataatccgagtagcattgtttgctattttttcaaatctaattttttgtagaatacgagtgttcttttcagcttgactattccattcaaaaataatcctttgattctttacagattgaatgacaaagatagatatctcttctggagactcctgaaatcgccatttaatctctctaccttcatctattggactacttgcacctcctgtagtaaaatatttacttaatttatccggattatatatagcatcaaaaactttgtcaatttgtttatttatttttgcttgaacagagaatcttaaaaccataacctagtctgaattagtatatatgttatattataagctgaatatctggaatcaatattaacggaatccatctttaaggactgatatcgtcctgaagcccaccaggcccattcggaaattaaatcattttgaatagatttggtgaacatggcgaaactgtatgagctttacgagaaggcgatgtgtatgataaaagctttgttattatctacatatactgttctaaggattgttttgattcgtagataacatgcctccatcacttaaacttgaaatagtttagggcttattcctgtgatatggtagttttcgtcctagtgcatgggaccgggtgcgggggatggtggtggcgctttttagtaccgttgttacgtggcgcaggttatgatgtctatacaccaacactaactggaataggagccagctcgcatctcgctcatgagctaaatagaataacattaggtacagatatcaaggatataacaaatctgttattctatgaagacttatcagatgttgtgcttgtaggtcatagttatggagggatggtaattacaggagtagtggccgaagagtcacagagactatctcatttagtctacctggatgcttacttaccttttgaaggagaaaatgaggttgcactatggccaccagttcagaaagaaaaatatctttctgatattgcttctggtatcaagtttcgctcacccgtaaagtcatctgatctcggaataaccaaccccgaaatgtccaaatgggtccaagaaaggctagcacctcatccatatagtacctatgaggacgcccctccttctggttctccacagagtgcttctattcgtagaacctatatacattgtacacagggacctatttcatcatggatggacccattttctgcacgggccaaaaaacttggatgggatgtacatagcatgaatgtgggtcatggtgtaatgattacacatcctgacgagctagcgaaaatcctcattcaaatagtaaagcggtaactaaatcaagaaattcaaatcttaattgtattttaatagtttttggattcgttgaataggagatgaaatagatctttaggatatgttcttaaatgttgattacaggcaaatttggccctcatccgacccggtccacacaacggtttgatgtcttatttaatatcattacgttagaaaactattctaaagattatcttttattgtttgccttgtattaattaattttaaatgtcatatggcgactacatgatatttaatggagccatatcattcacccagagacacggagtcattcttcgtaataattatgaaagttacgcgaatgttttcaatgtaagattctatttctaaagtcggtatcaatattaatcccctccgtccattatctagaatcgggtggtagaatatagtcaaatttgtttcacataccaccgaacccttataccatacgggacttaatcccacagaatagcggttgattgtagggaagacacgggtctggataatatcgaacccaaaaaacgaatttatggtaacgatgatgtataataacaataaataatttaaatgaaaattataattttaatttatatattggtataattatttacatagcaccaatttgtttcatcatccctactaaatcgtaaaagagcttttcctcaactatttcctcgtttttccaatgggcaactgtacaaaactcgatttggaatcttttgtttgtaggttcgatagtttttccatccattcctttcagcggtcccttaaaggttccagtgaagttagctacagagcaagtccattctccttgaccaaataatatcttgtatgggtcattgtcaatgtgattgtcaggaaacgctttgaaaaaatctattgattcattcttgtggttgtcccttcctttggttggctgtggctgtccgggccaatatatttctgcactttcggcgtggcatttgataaaggtgtcccagtcttgactattccatgcatcatccaaagtcttcatcaattttaggttaccgtctaaatccatatctgttatttgtaaacaaaacaaataagattatacaagtgtaggtatgttcttcaagataactactatgataatcatcattctataatacgatctgcggttgactaggtgagtattgattaacttttggtattaaatatatcggatgtgtaggctatatgtgagcattgacactccccgtgaatttatagttagtccgtctctgaaagtagatcacgttcatctgaaagtgtctaatttacatgagacagttaagttttatcaatccaccctagggtttactgttttggaaattgattcaggcagagatcttgcgtatttgggacctgccaagtcgacatccggaaagtcatcagcgctattggttttagatcaagtggatagcgataagaaggcatatagcactgatagagagaggcgagaagcaggactttaccattttgctatattgctacctcaaagaaaatacctcgcatcatttcttcgccatattcagaataacctagatccacagttttacgagggcatggctgatcatggagtgtcggagtctatatatcttcatgatccagaccataacggcatcgaagtttacagggatagaaagccatctgaatggaaatggactggtgaacacaaaatacatatggtaacagaaccattggatgtgaacaatcttttaaaccaacacagcaacgagatgtggaacggttttcctgtccatactactattgggcatgtacatcttcatgtctctaacctcataaaggcaaaaaaattctatcatcagtcgcttggactttaccatacggcaacatatccaggagcttatttctttgctgcagagggttatcatcaccatattgcaacaaacgcttggctaggaacaaatattttacaaaacagtgctgataatcatagtaagccaggacttgaacactacgcattaaggatagccggtgacaacgatgatctaaaaaaactattgaaccatttacgtacaaatgagataactattaataaagatatagaccattccgataaaagacatgattcttcattttatatatatgatcctgatggaataaaaatacaattattattttgctgaattgtcaaatgaaattcatttagaatttggttcattcataatagtctgtttatgaatatcattagtctataggtaattagatctcctctcatattcgtaccctgatatctcctattccacagtttctttgtacagatacatgtgattctaaagcctcttccttttctgtggtattttattattcgctaaatggatatatcaggttttaataatattttcctaatagttattcatgcttaatacaaaacccgaaaatgccagaaaagctggtcataacatcaattccatttttactgataggtggtctcctaggtcaatgacaggagaggaaatatctgatgatgaattgatgagcctctttgaagctgcaaggtgggctccttcttccttcaataaccaaccatggagattaatatattcaaaacgaacaggtagtcattggtccaaatttttagatctattgaatgaaggtaacatgacctgggctaaagatgctggtgttttagtagtaataatatctagaaagaactttgaatataatgaaaaaccctcaataactcatcaattcgatacaggtgctgcatgggagaatttggctctggaggcctcgataagaggaattgtggcacacggaatgcaaggatttgattatcaaaaagccaaagatattttgaatattcctgatagttttgatgtcctggcaatgattgcaataggcaagagaggtccgatagataaactacctccaaagttacagcaggtagaacatcctaatggaagaaaaccgttaaaagagattattatggagggaagttttagataggtaccttaatataaatttaaaagaacatgccagagaggaatctcgatggactgcatgaaaattcccatctaatgaattttgaaacttgataagagaatagtttaaattctctgatgttgattcttgaagatattcatatagtaaaataataaaaatatatataaatttatcatatcaggtaacgaaaattctgtatcaattatagtttatgatggtctaattcaatcaaatgttaagattatgtttgtctggtgattctatcctattctctgctattaatacagtttaataaacaaagagaaaggttagacttaatataattcctatgaacaaatagtggagattataaacagataacaaattactatctacaataccaaagtcaaccaaattcatttcaattgtccacggtatactgagaatattcactgtcgattactaagaaatgaactccttaagaaggatttacaagatgcatttaagaatgatcaacacttgtaaacaaatattgctatgttaaatccttttactatattgcatttttaaatatagatttcaaactatagtggataaagcaaaggaataatcaaaatgttatgctgagatgaggaagtgaattactaaaacttgtgatgaagtttttggttggaccctttgtcttattgttagaccgaatctgcaaaaatagatcggtaaatcgtataaggagtattagtatcagggttaatatatttccaattgttctctggaattgataccctgacaaaatccttttgtgctttttcatccaataacttgaatgcattttctcctaaggatatactatttggagcagttagagaagtgatttttgatacgatattcatacagtatcccaatatatcaataggcgaatttttttcataaccgtattgaatgattgcattttctccttcatcaatacctatcttgacctgcaattcaggataattatatttttcacttagaactgaattaatttctctttttataacttctatgattgattttgcacattcaattgccattgtacagttattgtgtttagtatcgttgtttacataaggaaaaaaagaaattactgcatctccagaatattttaatacataaccatgatagcgttcaattacacttgataattcatgggtaaaagcccttattaagaatacaagatcttttattggcaaggtcatactcatttttgttgaacccacaagatctgcatacatgataataagacccatttttgaatttctatgcttcatgagaaaggcctgacttcgtttcattgcattgttaatcatctttggccataaattatcaagtataacgggagcatgcacttggaaccagtataccattgattcttcttcctgttttcctttatccaataattttatgacagagtctttatcttcaaattctgttgtttctgctatttggattaatgtttcatatgcaaccaactcatcatattctattatgtaatcttgttttatttttacaaattccgcttcttcggcaaaagaggtaatttcatcagtaaaattttcacttttagtacctgatggctttagtgaggcttgaatactgttttctttctggttatttatgctagatacaattgatctttgtgttatttttaggccaaaattatcgtatctttttttaaactcaataatcatttgctccagtttatttttttgattaacagtgtgttttaaatggggtatcattctttcccttacttcctctataaaagtttcatctattcggattggcaacctttctaatgcagcattttcaagaagtaatattttatcaagatattttactagatttttaatctgataatcattagtttcttgaaccatgccttacttgtacttacgtgaatggtatttaataataacagtacatatccttatctatgtagcccgataagaaaaataatgctgggatttgtattttagcgagtcgggaaacccattatcctatcaaacttaagatacaaatgacagagccaaaaaaattagacaaagtaagaaatttttaaactatcctatttttcaaaaaacaaatcattaacttctatacatcaaaagtagaatactgaaattttttacattaatctattatggtgtaataggatattatccttgattgcttaatgtaaaaattcagatcaactgataattgattttaaaaaatgatgtaaatataaaaattagaaaaaaatgccgttagtaagccttattgtcaaaactaattgtcacacctgtttccatttaagataatgataacagggctatgataacattaaatggtatctttatattagaaaaaaagtcaaaagaaaaaaaattagattaatgaggggattaggatatgtctactgtgaagtcgaattgttgcctccgctactgcctactccgatttcttcacctgttcccacatactcgaacgctataagtgcgcctggactccatagagtcagggttggagtaattggaccttctttcattgcttgtaccggacctctaggatcagtaattacataaatggtgcttccatccggactaaaggcaatgtctcgatagcgattctctgagcggaaaagttcttctggttcacctgagactgatgtaccgttatcgtctaatgctattttaaagatcttgcctgccttcaatgttgtcatcagtaaagtattctcccatcctggaagaacatctgaagtataaagacgcaagcttgacggtgcgacggttggatagcatgtagaggtcaactctccacatgacttggctgcctctgtaaagttaaaacctttatctactgtgtagaaagtttgaataggaggtacaaaatttgttgagttgaattcactttcattttttacagtcacaccagcaggtgcaggtgcaacatcattaaatgtcaactcattgcagttctctgcagcagaccagttatagtactgatatgctttgtcgtcgataaagcctgatacatagggccagccatagtttccacctgctacaagacgattaatttcgtcatcggaattatcaccatgctctgcaaggtagatatcgcctgttggaccgaccgctataccttgtgcattacggtgaccatatgtgtagatgtgactttgaactccgtttatgacagggttgtcttcagggattgagccgtctggattcatacgaagtactttgccttcatatgtgctccagttcttggctgttacctcttcagaagttggaaggtgttgtgccatgttgtttaaacatgctaaagccagttggtttttaccctgatctcctatagtataataaagcattccatcaggaccaaaagtcatacgtccagagttatgatcactgcttcctgaaagtccgctaattatatctactggctcgctaatattgttagcaacaggatcatatgtgaatcgagtaattttggtgttaagctcagatactcctgttccttcagctccctcgctaccagagtcttcctcataggtataggcaacataaatgtgatgtgtgttgttgaagtcaggatcaaatgccattcccaatacaccatcctgacctgcggattggttaacgttagggataggcatgctgctgagctttgtaccattatttggatctattcgtacgatatcctttcctactcgttctgtgatccagagtgtgtcgtcgggaccataaagaaggttcaaaggagcactaaggtttcttgctagtacatttactgagaaaccctgttctttcaatagttgctcacgtgcttgctgttgtgctggtgttaaggtctcattttcagatacgggaaacggatcttctccttgtgccattactgtttgaacaatactcatatttgaagaagcagtagtagagaggccgttaaacatagcaggaactactgataaaagtattagtccaagcaatgctaacgtcttaatatttcgattaaaatgaaattttgcatttctatggtttatcaatgcaaaagctactaagtaacaaactatataaagaatcatttagtagtttcatgacccatcgtatttttgaataaatcttactgactcttttacaaacttatatgttaaggataaatacatcttcatcaattcactattcattacaataccaaaattaatacaagaatcataaacaaccgtgttgtctctaaccaacatttgtcaagttggcacatacaataactgtagtaaacatgagctaaagttattttgaactttaaacaacaaaatgacaatgcaatatgtaaaatacaataaagttatggttaagcaggggaaaagagatgatagtaccaaggcaattttggattttttaaaaggaatcgaaacacaagagagtaaaatgaaagggtttattgtaatggatagcttagaggatccttccgaatctatagtccttactttttgggaaagtagagaggatatggacaagttttatcaaccggagaatcacctgttatctgatttggttgaaaaactcaaaccttcttttgaaatactgcctgaaagaagagattataaagttttgactttaaaatctgattttcataaaattgacaatactttttgtattgaagaaaccaagtattaataaagtaattaaagaattaagagagaaaagttttattaaaaataatttttatcttatttgaactacaattctaggagatatttatactatcatgaaaaaaatactaccgtgacaactgataagagtcaccatcaaggtatctttggaatacatcatgttactgctgtaacaggtaatgtacagaaaaatattgatttttatacaaatattttgggacttcgattagtaaagttaacagtaaatcaggatgatccaacatcttatcatctatactacggtgatgaattgggccgtcctggcactcttcttactttttttcattggccagatattcctaaagggtatcgcggaactagtgaggttgctgccacatctttttcaattacagaagattctatagtttattggacaagtagattcaaagataaagagatagaatttaaaggaccgtataaacgatttgacgatgaacaagtattgacatttcatgaccctgacggattggaattagagatagtggctcataaatctgcaataaataaaggtatgaacgaatggaaggaaggtccagtacctgttgaacaagccatacggggttttcattctgtaactctatccgaagaagggtatgaacgtacagcttctgttttggttaatgaattgggattcactcctacttcacaagatggtagtagatacagatttgaaattccctctaaaaatggcaatagtattgatggtaagggagatggtctgataggagcaaacattgtcgatatagtttgtttaccctatacacagcgttctatgaccggaattggatcagtccatcatgtagcttggcgtacaccttcagatcaacaacaacttgctttacgagataaaatagtagaaataggattaaatcccactcctgtaattgatagagtttactttcgttcagtatattttcgagaaccaggaggagtactctttgaagtagccaccaatccgccaggtcttacagtagatgaaaactccaagagccttggaacacatcttacgcttgcaccttggcttgaacctatacgaaatgaactagagaaagtcttacctaaagtgcaattgcctaaaaaatgacaattatctatctactaaattagaaaattaaaaataccaaattaaaagaaggatgaagaaatgagtcaacttggtttcatacatcgctatatagtatcacctagaattaaaagtattaaaaatgataaagatgatagtgacaaaccctcttctttgactttattgttgcttcatggtacaggtggaaatgaggatgatttgatacaagttggtcaaatgatatcaccgtctgcttctttattgagcccaagagggaaagttttggaaaatggaatgcctcgtttttttaaaagactggctgaaggggtatttgatttagaggacttgaagtttagaaccaatgaattggctgattttgttaagggagcatctaatgtttatggatttgatttagataaaacagttgcagtaggtttttctaacggtgcaaatatagcagcaagccttctgctttcatatccagaaacgataattggtgcgattctgtttagagcaatgatcccttttatacctaataacctacctgatctttcaaataagaaagtgctgttatctgcaggaacgtttgatcctatagtatcagaaagtcagactcaaagcctgtttgatattctagaaaaaagtagagcaaatgcgactttgaaatggcagcaatcaggtcataatcttacagaattggatatcttggacgctaaagaatggttgtctaaaaactttgaatgattactgacgctccaatttacttctatcccattttgcagttactgccgctgctttgtaggtgctttgaagaaaatccatcaatagtgaatcaggtgcgtcagatttttggactgcctcgtatggtaaaataaactcatgcaacttcgaatcataaaacgcctcttttggtgaaatcgccaaagccttttttctctggaagaaaaggtggaagttgtatcaacaaccatgatgttttatcaaacgaaggctctaagaagtagattaatattgattcgtattttccatacccatcgtcgttttaagagggtaatatgtttatagaacattgaacaaatttaggatgtgtcatctaacaaaattcctcacattttaattctgttttactcaagatatggaaatacatcccagatggctgaagaaatagcatatggtgcgaaagaactttcaggtataagcattacaatgagaagaatagcagacgatgttccaatggaagtcatatctcaaaatcctgaatggtcaaaaatagttgaagacctaaatgatcgttatccgtcttcaaatatagaagatataataaaagaaatgcctaattacgacgctataatatttggttcgccaacaagattcgggaatatggccgcaccaatgaaggcattatgggacaggacaagcaccctctgggtaaatggttctttaattggaaaagttggggcggtatttactggagcgtcttcggtccatggtggacaagagaccacggccatatcgatgatgtttccaatgttccatcatggtatgatagttgtgggcgtcccctattccactcctgaactagtatttagcggcagtccatatggaccaagcagaattgttgggccgttatcaaacaaagagattgatgaagcagacagaaaagtagcaagggcgctaggaaagagagtagcagaactaacaaagagaatggttctaaacccctagtctttcatttagagataaatgacgttattgaatcttaaagggatagcagtaacactttcaactatatatcaagtatgacatttttggacaattgaacattttctataaaaaaatagacaaatccctatgtttttgttatatatcttagacagtaataaataagatgatctgtttggtattgttctaataaatggtgatgataatcctacctaccatgagttaaagtgtattattttttctatcgaatctcttgatgcaggtttaaaagaggttcccttatagtatgctacaggaagtaaggccacttgcataactttttcatatgggatattcaataattctgcggcttctttttcaaacaaaaggtgaaaactagtccaagttgttcccaacccgtatagcctggccgcaagcataaaattccaaactgcaggagcaatggatccccatatagcactttgtactctcactggaacatttgacccgtcggttctgccttcaatacagggaataacaaatacaggaacagtttttaaattgtctaccaaatatttggcagattcatatattttcctttgagtttcacttttctttgggtcatcagaacttatagtcttggcgacagaagttggtgaatctatataggattgccatccttttctaaagagatccgatattgaattctttatggattgatcagtaataatcaaaaagtgccaattctgtctattagaggccgtcggggcctgctgggctatttctatgcattttttaattaattcaatttccacaggtttttcaagatcaagtctctttcttacagctcttgtagtggtaagtagttcttcaggagttaaagaagtcatacttatgaccctaaatcttgatttataagattaatgaaaattccgacatatgtataattcattctaatggaatcaaattttaattcgtctaatcttggagatattggaaatgtaaaatcgttattcatatactgacttgaatcaaagatagactttttggattacctacaaaggaaatgatattacaaaaccaagatcaaaacctcaaatcattgaatacaactaaatattgttaagatcggatttgacaatatagcctaacttaaaatttatgatttcatctttatataaaacaaacatattgtattcgtagtctccgagagtctggtttaattagatttagcatactcttcagaaattatgaattggtcgataattatcctttcataataccgaggattcgaggattcgttaataggaggtcttgcgattatagaggctcggagtcatcggaggcagtttagtttattttatataaacaaaaaaattacaatccgatttatgatcactttaattatcttcttgtaaaatattttgaccttatatcttcaggattagagatttcaactaattagtctaattgccatttaaccgaagccttataccataagggactaaacaggacaatatcgacaagattccctgtattttgaacacgacttatgaccttttgttctgagtaattcatcttaatcgatatgaaatactgggaagcatttgaaaaattacattatattaacagggccgcacccaattatgcaacctgtaaataatatgctttaggagaaccatctgttaaatgcaaaaagataatggaattgcaagtgaagatgtaaatcaagctaacttgaggttttactgtgcttttgaaaatctatctatcgaatcaatggacaagatatggaaacatgatgaaaatgttgtttgcatacatccagggtgggatttatttaccggttggttggcaataagggaaagctggacaacaatatttagcaacacagagacaataaggtttacaatcacaaacacaaaaattaagatctttgataataaaattgcagtagttgtatgtatagaaaacatagaaacaaaagatccatatagcggtcgagcgattaggacgggtgtgattgctaccaatgcatttgaaagaatggaaccaaattgcgaatggttacttattcatcaccatggttctcctataacaaactacattccaccaaatacattttcttactgacgatttttaatttacaattactcacagatcagtgactctttccaccggagccgaccgagacatatagtttccctttgcatggctagccgcacaagttttttgaggctcatttattcataaacaattctattttaacgaaatatggaattgacattagttaaaatgcagaaacattagtttgaagttgcaaattcagctcttagccacaatctatcaaatatagttgcataggatgatactgtggattcgctatttgtataagtggcaagaccaaagaactcaaagttatcatcttcagattcagtcttgtttttaggaaacttgttagatttgatgataactgcagtttccctatctactatgaacacatttagtctatcgtaaatatcactagtaataaattgtgtttcgaaaagtttgggatacttcctttccaattgatcaaaagtatcttcaatttctatagaatgggtactatctattaacttatcaccatgaataattatttgtatacgaatttgttcgttcaactgttcacctagtaatttagttagttcaatttcattttcaaatcgttctagtatttttctgtcttgaaatatcattagaatttcttctgctgctgacgaaattatcttgggaattaggtctagagtctctattggatcttgtattgtttctatgaattctctttttaatccttcttcgattttctttaatcttttcttggctggaattgccttgtgccataacatgtcaaagaaatattgttgttgttctgccagggctcttagagtgctacaaattaaaagaggaggtggtgcggattcagtagattttgcgcttgctctatagtatattccgtctcctattccaaaattccccttgatttcatctagatgacgtagttcacataatttaatcaattctttacaatatcgtgtgttttcaagagtgatttcagtaattattctgaccttgatacctctggattgaagttgtcgaaatgcaatagcgactggaggaattgcagtatatgaataaggaacattcttgtcggcgcaaatatctgcatattcttttaattctgaccatagttcattatttatttttataatgttttctgcaccgtagataacctcggtcttttcttcaggaagattatctgagtcatgaaatgggtattagatacaaaatctgcatttaaggatttagatattcttataattggtcaacaggttcaattattgtcaatgttttcgttggagaaagcggctgaaaagacaagagtactgcataatcctgcaaaaatgattgatgtatctctacaaatttattcacgaataacagaatatatggataccatttgcgatgatagaggtgtagaagtaaccataaaagcgacacccatctggaatggaatgaatgacttgaaaaacaaaggagtccgtctaagatggataacaaacattactccagacaatctgaaatggtgtaaagaattcatgaaattggttgaggttcgtcatatagacggaataaaaggagcatttggaatcctcgataatatgtattatattgcatctgccaatgttttaagacaaggtagaatatttcccagcgaattgatagtaagtaatgttaaggtaatagttcaacaacagcagcaaatattcaatttattatgggataaagctatacctggtaaacagagaataaaggaaattgaattgggcactaagcgcgagtttatagatacaatacgagaccccgacgatattatcaagtcatatttaacattcttaattctgcaacttacaatatagaggtattattttctagttacgctactttccacggattatcaagtgcaggcatcttagaccatttaataaaaatgaaatctgaacgaaatatagaagtaagagccttacttagtgttaaaaataagaacgaaataaaaaaatcaagagatttgtcatttgaaaccaaattcaaaaaactatcaaaggagtatccagtcaatctgcgatatttatcaaaagaattgtttggatcaaatatcacaacgtttgtggctgattcagcattctccttagcaatagaaatgaatgactctaatcaacctaaagatttagacgattcgttcggaattgcagcttattctaatagccaatctactgttaatacttaagagataatatttgagaacctttggaataagtctgaatttgaagcattgaaaaaaataaattaatttagtattcgatttctataatttacttcacttaactaaatccacattactttattccgccgaacccttataccatacggaacttaatctcaccgagcccgctatcttgttattgatctaagatctaaaatgatcatagattaaataatatgttatagtaacatcattgcttttatcggatagaactataatttcgcaagaaaatatagtcttattcaataaaggcattttgtcattaattatcatatattggtttaaagattcaagatcgaattcctcacagatctgtgagtcttttgacccaacctacttcttcacctcattcagttcttcttaatacctaaataagacaaattattgatattctgaccgacttttgaatctgaatatcataccgatatcaatattaatcccactctgtccgttagaataaaaagaaaagaccaaaactactaaaaacacagtggagcgaataacgaattgctttgattgaccataagttagtgacttttaccatataatgtgaggatgctataattttatatgtatgaaatcgtttaaagaatactgtttccgtaaagatgaacttcagtatttaagaattacaatcccaaaggtattctactgaattagaagcctagatctggtctgatttagtcaacataggtatttgaaatcgacaaccctatgaatggtaaaaagatatatccctccattcatgccatgatctggctgaagcttttaaatagttaaaaaagagggagaataaaagcgttgtttgtaatacattttaatttaccagtggcaggctaaaactaaatgtagcaccaatgccattcttgttgttttctgcccatatctttcctccatgagcttctactatactttttgatatataaagccccaaaccagttccactaaatgagtttgaaacaaattttttaaatagatgaggcattatctctagatcaattcctattcctgtatctataacagtaacaaagactttttcagtgttttgtcttcctatttccacacatatcgatccttttgttgtaaactttattgaattacgtataaggttggataacacttgagttatcctatttttgtcaccttttacaatcagttgtgcggggggtcgaatatttaatttattacgattatttatttcgttattaaagtcatatttacatacatatgctatattttcttgctttttttctatctccatcacacaatcatttatcgtatttgagatgacttcaagaagatcaaattctcctatgtcaagttttaattcattactttcaattctagttacatctaaaatatcgttggtcagtttttgtaatctttttgcatttctatatatgatcgacacatcggtttctatttctttcatatcgacctgttttttattttgaaaatcttctataagcattcccgaaagtcctataattggttgaatcggcgttcttaattcatgagcagaaacgtttatgaattcatctttcatcttttctgcttctttgacttttagatattgatcccggataagtacgctgcttttttttaaattcttggtatattgtatgctcgataaaacaagtgcaataatgttcacaaaatatcctgcatctttaattacatgagctaggttatgcgatgtatcaaatgaagcagcggaaaacgacattatgatctgagcaaaaatgtcaattacgagataagtaatgatccctttatagagaacatcatttcttaagtaaagtcgtttcttatagaaaaggaacaaagtcagaacaaataaaattagaggcggaatttcatatggcctatgaacagaataatcatctaaaacagaagcaggaaagaccaaaaataacgagctcaaagcaatactagatgccaacacacctaaaactactatagagataagggaattatcttttattttattgttgatttttttaggggtttcaagtgagcgattgtttcgatcaatattatagagtctttcaagatagacaagatccatctcttccatttgatctttagatatggaggaatattttactactgcaatcaaaagcatagcactgaggaaaaaccttcctgcaaaccaagtctgaggaataaaatactttaagaaatccatattttctattaatgttaatgatactattacgtgtaacatatcaattaatccacttattagaaatccgataccaacaaataggctaaagctgtcctttaaaactctggcacgaaggacataatagaacgctaatgctgaaactaaaataactgcaaataattcaatataaaaatgatggatttctgatgccacccacagagaaggatcaaaagaaatgatagttaatatcatcagagggaatatgggcaaaagcgtaaatttgactaagacgctaaagaatacagagttattattgttgaataaatttttattactcgttataaacagaacttcattatattaatccatcacgaattgtcgattttatttttaatatgaaatcttccggctctatgggttttcttacaatctgttgtatacttattccaggaattgaccctactagttcagctacgacatccaatgcggatatgaatagaattttgacatgaggattaattgctctaaatttatgataaagctgtataccatttattccaggcatacggatatccattaagatcaagtcatagcagtagggatttctttctgtaaaatgttgaaaagcctcaattgaatctgaaaaagccttgactttataacactgcctattcaaaaggttctgaaaggtgtaaagaatatcctcctcatcgtctattagtaagatattgatagaggaattatcttcagattttgccaatttgtttttatttgcagtattttgggcttctcggtagtcattcatggacttctctctttgaatttcatcaagtatgcttacagaatacaaataatcagaatttttaccggccttgacggtattaaggccattattttggagatttactttatttatggcgtaattattgatgaatctggatttcctagctttatcataaagtttttctccaatccacaattcctttgaagttacgacattattcatttttgcacattcattaactattgatccaaacaagtccacttcattagaattatcagacattgccacttccacctctccgtaattcatacagattctgtaattaatagaatgtaaatcattctcgtataattggctgtcaatcacactactggatgaaagcattctcattccacattcaaatacatcatgaaaagccagctcattggtttcaatgcaagtgtctggaaaatagaaaaacaggctatccccaatagttttaacaacctttccattacaattattgattacagaagacattgtattaagaaacagtgaataatattttctcaatttgtatggattagctattgtcgaggtttcgcgggttgaattaacaatatcaataatacctatgcaatattgctgtgtgtagttaatgaattttatttgtttatcatcatttgtaagattgtaaggtctcggtttaatataattatgggctcctctatcataatccatacgattagaacttaagatttccaattatctacatttcctgctaggtattacacggcactgctatttattgttattcattgttatttattcacaatagcagatctatgattgctacaaattccctgagtcttatccaaaaaaaataatctgaaaaaaatgatcttgcactattttctctttttaggataaataaaattggcagaattgacttcaaaggctctttttttcaaatgttgattaatttactgaattactaaatccatagaatataatatagaagaagatgagtatcttgttacgtcttttaaaactggacgaaagtatgaggtttttagattaaatatgatatgggtttgcaattgcaaatcatttctgtttaatgaagaaagagactcaaaaggatgtaaacatactcaaagaatcaaaatagttgatagtattaggagaattaggaatacgaacattaactatgaaaagtaaccagatccactttgatattattataataatgattaatcgttacccaattacgtaaatggagcgtgttaactatatgatatttacagtcagaacctaaacataccagtttggtatcgcccaaacattctatactttaaattacgagaatgttaaagtgaaatttatcctattcgtcattttatgccggattctaatatcgtcagtttaacaaaaaatagaatatcaaaatgctttttaatatgttcaatgattatcagattaccgtagtcaaaaaccgtcatacaataaggtcttatacattctcttcctgtgtaagaccttactagtattggatgtctgaaaaatttacctacaaggagagagcctgtttggctaataaattgatctatgaatactatcttctaacatatcaagaataatactaagaattatcccatcaaaggattgtaactttgattaattaaaatgtccgttcataggtttactatagtgattcactcttactacccttttgtatcatatgttaagtttgtatcatattcaaaaatcatcgtcaactagtatgaattttcttactcatcccaccgaatcatctacctatgtatagcagtgaccttactcaataactgacccctaaaagtatgatttagatctatattagactattacaaggctttttaagatttcagtagatagtaatccatagaaataagattggaaagagtggctgctatactatcggattttgatggaactctatatccaacatctggtataaaatataattacaatagttccgattatattccacgcgcaattgaagacacactctgtgagatttctttaactgtcccaataggaattataaccagtaaagactttgatttcatttatccaaaaactagaaaatttgcaaaaatattgtcttgtattttaggtttagaaatgtttcttttagatgatagacaacaaattaatcttaataaaaatattctaaatgaaaatagaaaagtatctaccgaggatatcgctattaaagataggatttcactttttgaccctgaaatgctatcaattaactctcatatgctaaatgaaattgcagccaatcttgaaaaaaactatcacataatgaatgttgaaaaaaagtttctaaagagtgaagaaaatatcctaggcggaattacattggattggagacataattctaattggatggtcaataaagagaaatataaagagattgtcaaagaatccgtatataatatattagatagaccacatcaaaaagaaggcaggatatccaaagaaaaatcaagtttttatactccacatctttttatccaagaatattctactcatcctttcattgatatttatgttaccaaattaactaagggcggtgcatttgattctgttgtttccaagatctatgaaataatggatatcaaaggcaaaataatatacttgggtgattcagaaaatgataaccctgctttcagaaaggctgatatttcaattggagtaaattcagataatagactcaaccctactttggattgcacctattctataaagtttgagaatttgtctatttttttaagaagactggttgataatgacttttatttctcagaatcattgttaaatttttgaaatccagatgtaagaaaacataaagtataatatgaaattcattatcagtcgtgaagggaatagagtttattttattggcagtcggggcaattttaggcgcttatataagatacaaaattacttcctttcctttgatattaggtataattggttcaaacgtattgattgtaaatatcgtaggtaatcttatcctgggtattttctctgttttattggttaactggaacctcaatcaaagatattcttttctaattgctattggattctgcggttccttaaccacaatgtcttcatttgctctagaaaatatagtaatgatagaaaataaacaaattctaagtatgatgattaatacaatagccaatgtgggcttatcctttttagctctatatggaggaagaatcttaataattcaattattacaataataattttagaataatgaccctaaaacaaatgatttgtttaaacatccgtaaagaaaaatgacaatgtaaatggaaaaagattagaaaaaactattattgaatttttgatgaaggcaaacgttttaggagctatagtttggctaggtgttgacggatttggaagaagaggcaagtcaacggttcatttggagggtttaatgataaatcaacctatgatgatagaaacaatagatgaggaagaaaagatacaaccattgttattaccattaaaacaaatgataggcgataacggctttattactattcatagagtgcaagttgtctaattggtttttgtcgtcttacactgtaattcagaaacttttggtttactttaacaattgaattaaatacaaaatctgtgcatcaacataaacccgatttcctttccagattcattattagatttgttaatactgccagtatttctaaaacataagatagtgaatagagacaaaagaatcatagagtagatgtcttaaatattgaattaagacaaagaatgagtaaagtatgggataaaatatacgaatccgatagcacattttttggtgatgaacctagccattttgcaaccctttgtttaagagaaatgaaaacaaataatgtgaaaaatttattagaattaggtgcaggtcatggtagagattcaatatttttcgcctcaaatggtattcaggtcgctgcattagattattcaaacgctggaattgaaataatacttcgtaaggcaaagaaagaaaaaaaagaattacaagttaattcaaaaacgtttgatataaggaatacactcccatttccaaataattattttgatgcagtatactcacacatgttccttaatatgaagttctcacaggatgaactcagttttattatttcgtaaataaaaagagtattaaaagatggggggtttaactttttttcagtcagaaataaccatgacaatttttacaggaaggggatggaaattgaaaaaggtatttatgatataaacggttttgaaatacgtttctttaccgaaaaggatattcaggatttactcagaggccatttccaattattttggataaaggaggaatctgaagatccagttacactttatctaatatgttctaagaaaaattcctaatgagaaattgtttttcaaaaggaaatcgggtcaaatttgtttcacatatcaccgaacccgcataccatacggaacttaatcccaaggatgagaactgttactagtaactattacaaacatactaaaataataagatgttttatcgtatgtaccatctaaatgatttctagaaatgtttttaccactttggtaaacttttcaggatactgatacatccatccatgtcctgcatcttttacttgcacaagtgataccaaaggaatcttttcaataagtgacaatgcagctttaggtgtagtaattatatcgtctgttcccatcaataccaatgttggttgagttatcaccgacggagaattgtacattccgttccaacccactatagcttgtgcttgtttttgtgtggtttccaaagatactgtgcttttgagcagcggaaattgatttatgtactctggattatttgtaagccaagactgagggaaaaagaaagaaagaatttgtctagcttgttcttcaggagtacccgaaactccacctagtgtttgtattagctctgcactcggaggaatagctttatcaccgccaggacctgcaccatataaaattaaactactaactttatctggatgtaaaagtgctaattcctctgcaatatatgaacccatagaccatccaaaaatatgggctttatctataccaggtatatctaacaaacccgcagcatcatttgcaagctggctgattgtatattctctagttccatcagatgaatttccagtgcccctattattatagactatgactttgtagttagattgagcgatctcattaagtatagttggaggccacatatccatagtcactcgcaatccaggaacaaaaaggattggaatcttatccttatcgctagtactattattttcaaaaactttgtattctacttctatatctcctacagtggcattttgtattggagacctttcaatagcttctcttgcctctgtatctttagacacaaataacacctctaaaaattgaatgaaatgtcaaaaagtccttgttaattttaaaacactgaatatattctacgaaaaatgatccattattattgattttatcaataatttgattcaatgtgtttgtatgttaatatgagtataataatattactagaagatatcatatccctttcaaacgaatctaatgatgatctattttagatggaaaatatagcttgtatattaaaacagttagttgggtgtagtttattattacgatttttagtaattaattaaagcctcaaaacccttatacataccagttgaatttggtcatttatttaatgatttaatgacatctaatcttgtagattgcatttacaataaataataaataaatctacacgtattgaatccaatatcggtttctaagatgcaaatctagataccgggtacaagcactagatatacaaaaacaaatatgctcaaaaagacaattattgcagttgtaaaataaattgtcctttgatttggtgaataagtttgtgtctttattgatttgtgcgtactgagatagttcttcaatgcaaacaatatcaatacaatcgctaaagataccgtaccgattccaatccaatttgaaatctgatcgattgaggattgggtttcgtatggatttaattcaggcgagccacctgaataccgttgtattataattcgaaactccgtcagaaaaaagctaaatttggatattatgaatccaagacctatcagtgcaatactggttcttacccatgatagaaatgtcctttcgtttgcaaggtactgttgtgagcgatcagttttttgtttatcatctttatcgtcgaccacattattttacatactcttgaaactattatagtataatataatgaaatcttaatgttatgtccatgttcgatataatggtaaaaatcaaagaaaatgattgaagacattatttggactgtctttattctaggtttatactcctgtgtatactatttctgaattatacttctgcgagtaagttatttttatatctaataaaataatatcttatgtttattcttatcataaacgggattgactactgctatagggagctcaattctatagattgattaccaaacccatgtggatatcctcatgatttccaccgaacccgctacctatttatcaataatatccatatagaatcggggaaatgaaaacttgtgaaatttgtggcggtacggtatcatcggaaactactaacactatatgttcatattgtattagtgctagagaatctacaacggcttcaaaagatttacttatacctcacatatgtggctgtaataatgcggacagaatgaattgtccaatatgcaagaaaccttgtcatcatgatacctcattaagtcctaagatattgatttcaccaatgtagtatgtaccatccaactgttttagtcctgataaataaggtgtcatattagaaaaagtctggataattcattcaaggattgatctgtgcgtcatttatagctaaaattcaaaaactcgatctttaacttaatatgatctcgataaatatacgaatgtacttaactgtttatgcttgagttgaaataaaaatagattttcagttaatcctaccgaacccttataccatgagggacttaatctcaccgcatcagatacctgttttactaatattgagttataaaaaggggtcaaatttgtttcaaatcccttatcaactcacccaaaaaccagactaatcctcattagtagaatcaaattctttatactgtaaagacaaagataaatgatttattaaatagaacgatttgctgtaaatctcatttttgtataccttaatcgaataatatacgttttatgattaatttgggcgccctggaactcatctttacgcagactcggctgtgagtttagtcggaataggggtagccctctctaagcattatcagaaggagagagaggatcgatatgttttgtcaaaaaactatttattttgaatatagttgatagtttaaatgtagcttcatatgtctctcccctccaacttctattagtaaatctagatagggaaaaatacttgtttatataatcttagggcatacaaatgagatttaaaccattagataggaaattatactgcgcactaatttttagcattattgtaataccattttccagcttcttgactttggcgggtgcacaggtatcagatggtgaaccgataaatctggtactcactttatgggtccccaattttttggtgtatgttgcacaagaaaagggattttttgaaaaaaataatgttgatgtcaatgtaactttaaatcgagagtatttggatatggttagaggatatgtagagggagaatatgatgggacatttttagtctatcctgacgccatattgcagaactctgaaggaattgatactaaagttgtattcaatactgatatatcatatgactcggatgcaattataggtaatgtaaacaacctaaccgatgtaaagggtaaaaaagtaggtgttgaggggatcaatactttttcacatttattcatgttaaaatctctggaaaaagttggtattgatgaaggcgatgttgaatttgtgaatattcgtggtccaaatatatcagatgcattaaagaaaagtgaggtcagtgcaggtcacacatatgatccatacatgtcagatactttaaaggatggatttaaaattctctccacaggtgcaattgtacccggtattatgaccaccgtattagtatttcattcagatatagtagaacaaagacccatggatattcaaaacatcataaaatcgttgatagaggcaaaagaagattatgataaaaataaagaacaagatattgaaataatgtccgtaaatacggggataaacaaaaccgaaataatcaatgggatggatgctgccaaactcctggatgtagattataacactcaattttcaatgaataaggaattaaatacaactgcttcgctatacaactcgggaaactcaattgccaatttttatgctgaaagaggggtaataagtgaatatcccgatattgaagacattattgaaccaaaatttgtcaatgaattattaattgaaaaaaagtaatttaacagaaagaatgtgaaatgagcgcaagataaatttgaaggaagactagagggtaatgaattcagattaaatttgtttcacacatccccgaacccttataccataagggacttaatcccgccgaacccgatacctattcatagtaatgatataagtaataatcataatttcttaagtatcaaaagttaagacatatcaatgaattttagatgtttcagtgaaggccgctcctacaataatttgaagtaagcctgaggaacctttctttctctctaggcctcaaattagccgcgcggaggcaattcctgaagggcccaagcgttgccatccggatcattaaaataaacgaacttaccccaaacttgtgtatcgatgtcagtaacatccactccgcgctttttaagttcatcatgagcggcctgagcattcttgactgtcatttgtagacccttaatgcaaccaggtttcatattgtctgctataccaattccaaagcaaattgaacatgcagaacctacaggtgtcatttgaacaaaacgtagtttctcgttcacggtgtggtcatgatctaaattaaaacctactttatctttataaaaatcacgtgcacgatccacatctgttaccggaattgcaatcaattcaagtttcatttccatcaataattcacccgacactgtaggtaaacaggacaatcctcaaaaaatactggttggtcaggtgggttaaatgaatagatatccatgaatttttattacaaagccatgaataaaaagatgcggtagtattgattgttgaggtgtatccatcttcatcacattttgaggtttttgtgtaagaaataaatcatcaacctattcttgttgtaacctgcaaacagagatttgtattagcaagatgtgagtagtaaattcaggtcaaatttgtttcacataccaccgaaccagctacctattttagtaacgattgtcgtaaaaccaatgagaaaagtcataaatcagtagatcaatgacatataataaaatcaaaaaatttatgataatttaaataatttatcaatatctatgcaatcttcttttgataaagcaaagttgaatactcctaatattattttgtctgctttatcctcttatcgatcctaaagtaaatccttttatcatttgtctttggaaagcgatgataagaataatcacaggcaacagcgctatagtgatccctgcagccaggtatccccattcgatcctgtacaaagaaatgaattgatatagtgccacctgaaatagagtggaattcggagaatttgcaagtacgattggaagaacaaattcattccaagaaaagataaaagaaaatatcgatgcaactgcaaagccgggcatagataatggaatggtaattcttctcaatactccaatcttggaacatccatcgattaatgcagattcttccaattcttttggtatcgtttcaaaataattttttaataatatcacgtttaatggtataataagtatttgaaacgttagaattagagaaatgagggagttaagtaatcctagatttgcaagaatactatatagaggtattatgtttataacaacgggtatcataaataaacccagtataagagaaaaaaagacccttttagctttaaactcaaatctagctagagcataccccgctaaagcacaaatagtaacattcagaatcatacttccaaaactaacaattaagctgttgtataggctttttacaatagtagaatttgtaaatacaaaagcataattttcaaatgtaacatgttcaggaatcaatttcgggggaaaactcatagtttcatcatttggttttaatgatgtagtgaaaatccaaatcaaaggaaataaggtgagcccaatgaatataaatatcgcaatataaatgaaagatttttcaatcttttcaattctattatttgaaagtatgctcatgttcatattatcccttacgttttaacgcgatgatatagataaaagcaactactatattgagagataacaatattattcctgatgccgaacccttcgacaaaagtccaaattcaaaagcctgtctatacatgtaaagggaagcaggagtactcgcgaataagggattacctccagtcattataagaggtatttcaaaaaaatttatcgaccagatagttatcaagatgacgtcaattattatgaatgattttatcatgggaagcgttagatagacaaacgacttgaatttagaggcgccatccacctttgcagattcataaatggatggattaatagataataatcctgcagtgaggaataaaatagtaaatggtgttccataccaaacatttgctataataattgaccatacaactatgttaggatctgacagccatgcgacagaagaaaatcccagatattctagtatgtagtttatgattccaaaactgtcgtcaaaaataaatttaaatgaaaaagcagcaatcaatcccgatgttatccaagggatcataattaatgcgatcaaaatttgttttcctttaatattttgatttaatagggatgaaataagaagaccaatcaaaaactgaaatgctacagatcctccaacaaatattatcgaaattttaattgaggtatgaaaatttggatcatttaaaacttgaataaaattgtctacccatacaaattcccattcttttaaaattgttgttacagagactccatggagggaaatataaatattccaaaagaatggaaataatagaaatacaaacaatattgaaatggctggtaacagataaagatagggctcatattttgatatagaatgcatttcaatgaaaaataatgtatggatttagaatttgttaccaacctaaaacttccgcagtctttttggcggcatcatccagagcttgtttaggtgcttttatgttgtgaaaaacttcatcgatagcttgctttatattttcagctatttgaggatattctggaatatttggtcgactatggccctgcgggatcatagatatcatttcagagtagtaaggtattgtactatttagttgggccgaatagttaccctcaccgattggtttttgagttggaagatatccttcttgttgcaacataggcgttaaaacttcaggatccgtcataagtgtcaacaattcccatgccaaatccttgttaggagatgtctgtgggatacttagtatccatccgcccatcattgtggtggtattaacgttagctgatggggttgggaacagcggaagcattccgatcctttcgtctagggagttccattcacttttaggaaatgttcctaacaaccatgatccttctagcataactgcaaactttttatccgcaaattcctgtccccaaaagtgattgggctgaggcgaaatacctgcgtctacttgttcctttaagaattctaatgcctttacaccatgcgaactgttgaatactggataccagtatgatcccttaacaggatgactgtctctttgctcaaggatttgaccgcctagcatccataaatatggataccacatatcaggcgaatgggcggctcccactaaatgcactccttggattttacggtcttttagtaagtcatttaacttcttggcagattcgatatacccattccatgtggtcaaattctctggattaatccctgcttgttggagaagatctttccaataccacatcgctcgaacatcagtccatgaccaaataccataggttttattttcatattttcctccttcccaattggttggataccattcatttgcccttccccaatcatttactttatcggtaatgtccataagaaaaccgccctctgcaaattctccaagccatatttgatcaacagatatcaaatctaaaggagtttggcctgccatagaggttatgatctgtgttctggttgcgtcatatggcaatacacgataatcgatttggatatctaaatctggatggttttgtcttaatttctccaaagccttttcaaatagaatatcccatctttctttgggttcggcaacaatcgctgtaagtgtaacttgttgctgtccatacaccttttcataattattttgtagaaaaaaagttacaaaaactaataaaactagtatagaaaatgatggtacatataatttcattagcattataggtacatcaacttttttaagtattactcaagcagtaaaacttcatctaattgaacttgaaggggtatatacaatttaatgtaaaagtcgggtaatattaaagcagaaagaaacacatcttgcttattctgggtattagtcaattctatttccttctacgtcaaaaaaatgcatctttgagtattcaattcctatttctattttatcgcccacataaaaagtgtttaaaatattgtttatagaaacaagtaaactatccagtccaattttcacttctattgttgtatcatcaccaagcatttcaataaagactacaattccctgcagcctgattcctgttgttatgtcggtttctttatgaatatttacatctcttggtcttattccaacgatgaattttggagttaattgtttcttaagcagtaatttatcaactggctgaataataattggttgtgagaataaaaatagggatttatctctaaccgatccattgattaaattcatctgcggattaccaataaactgtccaacaaatgtgttgttaggctgatgatagacttcaataggagttccaatctgctgtatattaccatttttcatgatggcaatcctatcccccatactcatagcttcaacttggtcatgagttatatacaaagtagttattccaattttcttttgcaatttctttatctccgttctcatatgtgttcgaagctttgcgtccaaattactaagaggttcatccataagaaataatttgggctctcttaccaaagctctacctaaggccaccctttgcatttgtccgccactcaactcctttggttttctgtcaagaagatcctttattcctaatagttcagccatttggatgactgtttcttgtatatggaatttagatttctttctcatttttaacgggaacgcgatattatcacggatagacatatgtgggtagagtgcatagttttgaaaaaccattgctacgtctctatctttaggggataactcgtttatctttttatttcccaagtagatttgcccatttgtgggatgtattaatcctgctatgcaccttattacggtagtctttccacatcctgatggtcccaacaataccattaattcgcctgactttatatcgatactaaatctatccaaagcagtggtccctccgtatttttttgtgaggttttctatcttgagatcgaccatgtcttatctaacttagtgtatatcataatttaccttacataaagaattaccagatcttatgccaaatgagtaagaagctaagtagaatcaacgaaaattgccaaatatgtagcgttataaaatttgttgtataatatgatacatagtaatctatcatgatgttaatatttttaaaccaagaaaatgacgatagaaaagtataagcataagactaatgcccaatccaatagaaagggaaaatatgcgacttccactgaaaatcgaagattaatgtgggaatatattatctggcccttagttttagaacttaataggaattattttacaccagaggaatatcataaaatgagaaataaggtttcaatagaaaagaatatcccaatttcaaaaatgtctggggggctggtatcactattgcttaaaggaattctcactcaagataacaaatattattcaattcattacaaattaattccttatatgagaaaaaaatctcaactggattacgaaacagttctaagggaaataagatcaaaaaaataaatgaattatccaaaaagtagcgatactgatcattcaacttcaattttagcaagttcatttgttgatcagttgggtgaatgaaacatgtcaaatttgtttcacataccaccgaaccagctacctattttagtaacgatataaaaattataacaaatgattaatataattgaaataaggatgatttatcattgagtagatatgaatcttaaccaaatctcagcattttttaatcatttcaccaattggggtcatgctttgtctatattaggcattaaaaaccgtttgataccagtgtttatatagtatggtacttataagatactatgtcaaagaaaacagaaactaatcaaaataattccagttataccaatgaacataacaataacaataatatcgatttcaatgaatcagttaacagatcatttgatgaaaccaaagataatattaaaaaatcaatagatgaatcaagaaaccaaattccaagaattaatagtattgtaaatagttatcaagaacaatcactacaaactgcaaaagagatatcagaagaatatatagattctcaaaaacaagtcgtcaattcactccaatcagcatggaggccatacaatgaagcctttaatggattagttaccaacttctattctcctgatgcagcagttaaagcatattcaacatttgttagtactgttgcagacaataccgtatcagctattagactttcaaacaacgttattttctcaacccttgatgcatggaaaccagtactacaacaaacaaaagattttgcaagacacatatcaaacacaggagtaaacgccgcaagaacgtttgagcaaaattcaagacaaatagcagcagatgttaaagatgtaacagccgattcaaacgtaaacgcatctactacatcaactactaccacaaagtctacaaatcattaacaacgaaataagaaaaatcaaatactaaaacaattttagcccattgatttttccttttagagttatacaaactcaaataatttttaaatttatcaatactaaaattacattcttttttagatacttttcttttccatccatataaagaaacgatttaaaaaaataaaccatttctaggcttgactcatgtggatattatcatgatttccaccgaacccgcatagtatacggaacttaatcccaccgaatttgctcattattctagtaacatgctccgaaatattttgaaatacgttatcgtaaaacttcaaaatttattatcggatgtctgtgctgctgggtatcttcataacaaagatattctgaacacacagtgcatctgcagataactctgttgtagcatgattgcgaaatgcattgtaaagtttctttagtcttttttctttctaattgggctgttgtagttcttgctggatatcttcctacactagatgaaatgatttttagcatgccactcattctgctatggtaattgtaacataaaaatattagtataaaaaatacaatttagttataaatggttcaaagttatataatgaattttgaataattggaatgacactgataaaaacagaggatagtagaagttattcttaattattaggtcgatgcgaaaaaggtcaatgaattttatctctgttttattatcgatccaaagatatctgttctcctaaattagcatctacacacatttgtttagattggtatgcttattaatcccgcatcactaatattataaaaactttggttcttaattccttgtcctttttatttctctcattttattatatatcgtagaaaaagagtgttgaagtgctgaggactttgctctgaatagagaatagtaagtattgataaattgttatgtaattaactctataacctcttttactcggagaaaacaaatccacatagaaacccatgctaatctcgaaatgatattttttaccagacccgcatagtatacggatcttaatcccacagaataaccattgagtataaagagtagaggggtctagatactatcggacccaaacatcgaatttatggtaacaatatgctgaattaattcaatataagtcatggtgcaagagatggaatggagtcaaatttgtttcaaatacacctaacccgcatagtatacgggtctaaacacatagtagaggtaatgattaaagtagttgggataatatcatcatcatgagcgaccgcgacccccacaaacaacccgagaaacttgaattacaagctagactaattgtcatgatactagacaaatgaccataaccaaaacccaacaaatagagctaaccagaaaaatttttaaaatactcgggggtgaaaagaacgtatataatttacacttttactggaataagggcgacgggttagagttttacactggtagtatatcaaaggttcaaaagaaacaaatcaagaaattgtttgatagaagtagattctacatattggtagagaattcaaaacctaacccattagaatcatatcatcctaacaatggtttacacttttggatatacgaaaagcccacgtataaaaacccaccaacattatgagccttaacatacaagcgccccatcttttaacacctcattatattatagactcaccatctccatttccaccgaacacgctacttgttttggtaacggatgaaaatgcaaaaaggataaactatttccgattgtttaaattatcaataaactactgccattttatatatcaacaataatttgtctttcgacagtatctactacagtattagtggaactgtcagaaaacaaaattttcaattaaatggaatttatttgtgtgttcttatgaattctcttaatgtggatgcttcttctttgtatgccttgattgtgtgagatttaccatctggacatactatggatacttttactatattgacctctgcatcagaagcatggactggtggttccactttttctattttgcaatttgcatcgagcagtttctttaattcagaaatactgttaagttctggcatatgtaaattttgtagacattgctatttatcaatcattttgatggcatatttcaaacaggtggttggatttagcgcatatgtactttgatatttattcttccaagaattatgatattcctacatcttcccaattacaaactcgtatgaaattgcacactcgtcccaccgaacacgctactatttatggtagcgatgtgggggccaggtacgcaccgagtgccttgaagatgtcggtggcgatgctcgtgccctccgcggcgttcgggccgtgcgtgttgtcgatcacgatcgagagctgctgcgacggcaggtacgcggcaatcccctcgtatccgttgaagaccgggttctgcaacacccacccattgccgatggcgaccccaagtccgtagccgatctgcccaggcgcacccggcaggcccttcgacagatcctcgacctgctcgctcgctgactccttcgagagcatcttgccggtgccgaccgccttgatgagcgttgtcatgtcgcgcagcgtcgacgtcatgatgagtccgtcgccgaggccccacgacgggctccatcccgtcgactcctcgtagacaccacgctccgacgtgtacgcgtggagtgcgggtgaagggatggccgggagcttcgtgatattcgtttcggtgagtccgagcggaccgaggaacttctgctgcaagagatcggtgatcgacttcccggtgatcttctcgacaacgttgccgaggatgataaagttggtgtgcgcgtagtggaagcatgcgcccgggtcgcagacgatcggctgcgcgaacgcgtatgcagcagctcgtcgtccgtccagtggcggaacggctccgcgagctgcgccgcctggaagggcgggttctcctggatgtagtcggggtagccggaggtgacgctcgagatcatccgcagcgtcaccttgtcggcgttggggtactgcgggaaccacttcgacagggtgtcgtcgaggctgagcttgccctgctcctgcagctgcagcaccagagtcgtgagcatggggatcgtcatcgcgccgggacggaacttcatgtccggcgtcgccggcactccctcctgggaatccccgagacccgtcttgacgacgatgccgttgtcgacgtcgacgcgcaggagcacccccttggcgtcctccttctgcatgacactctgcgtgatcgagatgatctgcttcgacacctcggctttgctcgtgcacgtgccgccgatgtcgatctggttagacgagcacttcgagttggtcgtcgttgtattggtacccatagtagaattcgcaagcgtattgtttactgcagtcatgctctcaacttgtcccattgctgtagttggaacgagtatgaatgctgccagcactaagcctaagcaaaagggtttcatttatagatactccagtttcgtcacgaacatacccacggctttcattgaactaacactaaattgattcactccaagttccttaggaatcccaccaattacaacagatcgatccgtgggttcaatgaccgttccattattatcttttgtagaagaaggattccacacaaaattacctccaccaccatctcctatggaggtatgaccttttacaatagctgtcacatttaatttaaatgaatcttgaattatttttccacttatagcacgtaattcacttatgctatctactgttattacggacccgatcatatttttcaaatatgtagattgatataaaaatttttgatgttaatagacaaaatcaagaattatcggaaaatgactatcaataacgggtctaaactgctaaaactagttaattcatggagcaatttctgcattgagtttatattaaaatatccattcaagaacttatccatgcttggaagattcgaaagtcactgatgaatattaagatattaactggtgcataagatagaaagatttgtgaatcatttatggatatagaaatgcacctataatccaaacttcagaaatgtcgtgttttatgaagatataaaatttttatagaaattaggacattctttcttacggttatcgatctatcacgcatattttgtttgtatccatactaactttgcgttaggattgggccatttaaatagtcaaatttgttattagtcccattgagcccgcattaaaaatttattacttcttattacaaatagattacaaattgactatgatatcaaaataaaaaaatactttatcaaacccatgtggatatcctcaagagtcccaccgaacccttataccatacggaacttagtcccaccgaactcgataccaattttagtaactaaaaagaaaatgaggctcggtatatatcacgataaaaatattatgacccaaatcctcttccatgtgcctcatgctttcaacttacatcaagatattactattttgattttctttgtgaaaattgtaataggacgtgaaatcttttaccctgtctataacctctgtcatattggcaggtatactcttagcaaaggtacaatagattctgatatccaatttttcctatttattaaatgaacctgttagatgttctcttccaacgacttaactactgaaatatggatgttagatttgattggttgaaaaataagttatcatctctattaaagattatggtttaagtatttaaatgatattaatcagtatcaattatgagtaacaacagtattgattggaacgatgtcatcaagaaagaggcaagaggtatcaatgacgcggatcttggagaagtacaggaaattcgactcgataatgttattactaaagcgggtgtagtcgacaaagaagtttattcgattccaaaaaacctagctgaaagatatgacggacataatgtatggtttagggtaactaaggaagacgctgagaatctctataagataaaagattaggagttctatacatcatcatttacttttttttgagaaaaatggtaattagcaagtagctactccagcaaagttagaccctcatgaggaatcaaacctattaccttatgatttataacaattttacatcattgctaatgttatcatgaaatgaaaaaacaataagccatagaatcataaaaaatttttgtcgcgtgaactaaaaacgaataaatcgttttagactcatgtggacttcctcatgatttccaccgaacacgcaacttaatttagtagcgacatagtatataatcagaatatgttaagtatcaaatttctaaattcttaaaaagaaaagggttagtttgagtcctaacatccattagacttgatttgatgctttgttttttgttttttaacaaaaaaggaatactgccctcaggatactacactgctattatcctgctttgtttattgtccctgaaatattggagtgtcagagtacatgtttccattctcgcctgattatctacctacattctttcctgtattctcttgtacctgaatgcgtatgttgttacttgaacctagtattcatttggttcgataacattcaaaagcatttctgattaaattctaattgaactcttgtagatctggaggaaatagatatagcaagtgatactgtttagcgacaaactattgtcatatttatcaaaatccatacacacatgtggctggcacttcacagtgaaatatttaatgttttaatgtcctgatagtaacacactataattctgggattttcaaaaaattccggtcataattcgaatgtactttggtattttgtatctattgccaaaaaatcgcataatgacacaaaccttaatgttttcgtaagttatattttaactaggaaatattccaagggacagcattagtgcaatacagcgaccttaaatactgtgttttttcgttttttataatagaacataaaatgacattctttttgtccaattttgattcacagaaaattgtttgttttttctcgtccatatttgcgataaagttacaaataagataaaagatgaatttacaattctaccaaattcttggttacatatatttatgcagtgatagatttagaaccatcatcaatagtttcttacatatagtaatcgctccctataactgtccttatcgtttgtaaagtaacctttaccatttccatcacatatcgttgaaggtgttgatcctttgcttaatagcgcattgcgtacttctgatggcgaagcaccgggatgcgaggactcatataatgcagctgcacctgcgacatgaggagaggccatgcttgttccgctcattgtcgcataagagttccctttataggtagaatatattttggttccaggtgctgccatatctacaaccgcaccataattgctaaaacttgctagagaatcgtctcttccatatcctgtcgagggaccttttcctccacacttgccatcactatctccaatggctgaaacagctattacgttaggattattagcaggggaaaatgtagaagcatcctttccataatttcccgaagccaccacaaacgtaattccagcttttactgcattgtttatagcggtatcaaaagcagtagatttacattcacatccaagacttaaattagcaacttctatttggcttgcatatcctctaatatagtcaataccttttattacagtcgataaggctccagaaccatttctgtctaataccttgatagcccatagttttgctcctggagcgatgccaacaacgccaatggaattgtctttagctgctgcaattcctgcaacatgggtcccatgaccgttgtcgtcatttgctgaagaggtacctgaaacaaatgttttttgatggtgaacgtaaagatcagaatgacgtgtatctattccgctatccagaatggctatgtctgcattaactgatccagctccgtttccagacctggtatagcttaagtctccatcaaccctgtttattccctttgaaagtgtttgagcaaatgttttaactactttatctttttctatataatcaacaaatgggctttgttcaagcacctcgataattctttcatttggaacattgattgtaaatccatttaatacatcttcataaatgtggagtatctctgttccttctatgtttacctggcttgcaacatcagtaagtaattcacgcaaattgactgtaccatcatttagaactacgatgtattggcctggtattacttctcccatttcggattcagaggaagtagatggtgatgaagatgaagaagaagataaataatcagataaaacatcagagtaaggcaatttatccagaatggatgtaagagagctaggagttgttattgatgagggtgttcctttatctttaactttttcattttctgaatttggagattcattcactttcatctcttcctctatgttttctgttttagaatctgaatcatctacatcattattgtctcttgtattaaagcctggaatcatgtcgtataattcttttaaattgtcattctctttgttgttattattgccattaaaatcaagaaatggaagatcaggcataccaacgctttgtgcaaatgatgttggcgtagaaatagatgataagaatcccattgtaattatacaaaaagttacaatgaactttgcaataatattatgtttttttctcacaaacacaaaataatcatttagaataaaagaaatatccagatgtcctagttaagaattcttactattttgatagtagaaaatcatcatatactactttacttcttgggtcgggtccgattcatcgataatatgatgacttagggttaacgggatccataagttatgcttctgatagataattaaatgattaaatccagtcaaatttgtttcacataccgccgaacccgtttgtatatccgtctacccacttattgctcaaaataatctgccattgaataatgagatttcattcacttttgaattacaaccctccgtacccacacgcataattagcagagactcaaacattcttatcattagaacagattgaaaaggacggaagccgcctatcgctctagcaaaatggcatcagatcattagatataaacagaaagaagattttcgttacttatacaattatctagtccttggcttacgcatcatcggataaatggtaggtgatgtatttacttggacaattccaagcgattcaaacccatgtcgtttgtaaagtgtaatgtttttttcgtttgatgattcgagataggctacaatattctctttgtcaaatatgtcagttgtgtaccccataagtgcagtaccaagtcctttaccatggtaaaatgggtcgactccaagaagcggtaggtaccaatggggctcggtcggatgaaacccgcccattttctcaaacacctccgggccgtctgtctgggcctcctttgatgaagtggcttgtaatatcgccatcatagtgtcaaaatcaggctcaactccattgggaagccaaagggcagcgccagagtagtctccaacgaagtacgctgtcttgttggaaaacgcttttcctccatatgccctagcaaaatcttcaacacttgagagatatttttgcggtgagggccaaatccatcttgaaacagggtctccagcaaatgccaatttcaaaacatcgataatagcattttcatcttcctgacccgctattttaacttcctgcagtgtcatacagaaatattttgactcatttgtattaaatattctttctttgacaatactgtatttcagaatagtaagttcaactttttgattgtatattttggtttagagctaagagaagatcctgacaagaagaacaattttaaccaacacacatcgaacaaaacgttaaagaacatagaactctatatataataatatggaattctataaaatcaagtcaaatcttaaactgttgatatacaagataaaatcaagcttctccccaaagtcaaaacagacccagtcacgtgagtaagatatacacatcaatgaacgagaatccaatcttttctaattaatgatagatttagatgtaaaatataatcaataattagttgatgagcaacggagtaggacatttaccacttttagcaatcttgacggctcccctagtcttgatgatttcagattctcttgaagtttttgctacacatatttcaaaacctgtaccatatctggaaaagaatgaattttactcaaatgaaacgatagatttgagtggatgggttgagtataaccgcgaacccgcctccgacgtattggtacaagtatttctcgagaaggaacgagataaattaacttcagataactttacaagtgactcgaatggaaatttttctgccattttatcacttcctgacaatgtggaaccaggaaattatacggttagtgtcacgagtctttgtcaagagatacacggtaatgtttgcacataccaatgggaggaacttccaattactataagtacaagaaataattaggatcgagtccatccgagagtccatccgagagacctatattagcactactctctccgagcccatataaataatatttactatcttacaaaagataatgtttgaaattagccaagatatcactctttcattttgttcggtagattatccctaaaatcaaactcataaaatatattcgaccgtttcaagattcaaaatgtttctaatgcagatgccttcaagatttaaaggagacttggacagatttggagtacaaaaaatctatcaagatgcagttcatccaagagtagtttatcaaggagttcaaggatggaccgaaaggtattctgaacatggttttagcaggattcttggggtcaccatctggagaaaaacatttcaatttgatataagcggctttttagaccaagaggtaaccatatatttgaacataccaaagttgaattcagagtattatgaacatcgtcctgtaataggtccatgtgctagcggttcaggcttatccattaaactacgaggaggaggtcacagtgatagtggaaagagttctgcgagatgttatgtctttcattttgaatatgaaggaaataacaattgtaataacttccagaaggaggcaccgcatcccatttacgcaaaatatactatacctacaaaatttaatgcacaaaattgggtaggatcaaacaattgggtaggttttaaaacagtaacaataaatgagaacgatggcgtaagatgtgaagcctatatagattatggaaatattttagatgatcggcccactaaccaatggcaaagatggtattcaattttggatacgggtcagttcggcgacccaaggaaaccagaaacaatttctccatttagaactgccaacggtaaagtaacacaatttcgattagataacgctgataggggtaccaagtcacgatttgcttccgtaagagaaattcgaaaaatataaaattctacatccatatcctagactagataagtagacagtcaaaaagtctgaactcaaggaatcttttacaaagaccgatatcaacactccctcctccggtccatgttaaattaagaatatttcaaaaaatatccgccgtcgtcactttttccttcaattatgtacttcagaatgaatctattttcaagtgtaaaatatgagggttttttgaaatccttttgaacatatttaaaagcaatgaatttcgctatatagaaaaaaaatggatatttaaaacggccaaaggtcgaactaaaataagtaaagaaatgagagaattatgatgggatatccactagcaggagccttttgaccaacctactttgtatccactagcgtattcccctgttcctggagaatatgggtagcaatgatcatgatcccaccagccctgttgacatccattaacccatgtcttggacttcccgtaatccgtacaatgttttgcagcatctgcggattggtaagtggctaatgatggtgctagggccattgtagttactgcaattgctattgcaaataatttggtagtaatttccattaatcatgttgattttgacatgtataaaaatatttgtttataatatgaaattgtttgaaggactttcaacttttttataaattcctaaatgtttttgataaagatgataacttttggcatatatattatatactagtattttgttttttagatgatgaaaatcaataatcttgtaatgacatttgtattagtgtctttgacagcagttatcgcgggacttgcagttgcatcaggcataaatccgacggtcgtattcgcaaaccacgagtttgcaactaacatgacaggtcaagagcaggttccacctattgacacacaagcaataggtgaagcaatgttggttcaggatttgcctctaaatcagacaatccactattttgtgaatgtcacaggaatcgagggagtaacacagggacatatacatagtggagcccaaggagagaacggcccaattgttgtaaccctattcaactttgaatcacctcaaaatgaagttcttctaaatggtacaattgcagcaactaatttggaaggcccaatggaaggaagtgaaatatccggtctcataacagcaatgcaaaacgggactacatatgtcaatgttcacaccgaacagaatcccgatggtgaaataagaggacaattagtggatataccataaattgtttcggaccatctgcgatcaggatctctcattcctttttttaaatcttggctaattatagataatttcctttgataattgattgttaaaaaacctattgcattagttaagcatgatgtgcatgatgtgaaattatccttgtttaagaccgatatcagcactcctccctccgggcccgcattattcataaacaagttccatgtcatttttgccatatatcccactcggtctaactcttaaaactctccttgcactcactctaatgcacctggatgaatcgagttctttactactatagtatcaaaaatgaaaaaatttgatcgatttgggtgttaacagttgagcttctctctaatagctcttgtttgttcaccaccaaatttgtttagtatatcacaataaatgctatcattctcctggactagaggggaaactcgaaatgtagctgttacgtgatttccctgagttatattacatgtagcttggtatggtcctgatagcacttgggttagacaagtattagcgcctctttctggattactaaaatgaaacaccactcttccatcctccccaatattggctataacacgacctctctcagcaccaccaaaaaacccatctcctgtcgttatccacgtgatggtcggtccggcatgtaccgggctaccataaaactttccctcaaacatttgatatatgacattatgaaagttgcccgcagtagacgtggccctagatggagtccacgcctcggcttcttcaattagaaccggaattagaaatgccatcatcgatcctaaaagtacaaaaagcaccgctaattttgtaggagtcttctgaataatttttactatggacaattcattcatacatctcttctttgaaatagcaatttaataatggctattaattatacctattgatagtactgtgttaacatccttgaccagtaattgaaaacttgttatagcgagtcatgtgagacgttcgaaagttttccacttagtttacaaaccataacgactcaaatgaagcaagcaagctgctacatcagactcatgtggatatcctcataatttccaccgaacccgctacctgttttagtaaccataaaggaaggtatcggatgtaggataattcctaattttcatctttttaaaacaaatctttttatgttttcatcttcacaattgatcctaggaatagcgacccctgcctattttgagagtaaagttcagataaacgatcttttggtatctgtttatgttattttatttccttttttgcgcatgaatcacagtatttttctataatggtagctccttctacactgaatattgcttcctgagtagccgtgttcccgcaaattacacagggttttgtatttccgccaacatcaacgaatgcccttaccgacgaaaatttcttttccattctatgtcttcactttattattgttatgcaattgcacttatagtatgtgtttgctagatgtgagccaaatttatataaaagactattagccgaattaatgttttatactcattggtgaattaaatttattttccctgcagtagttgtttgtataaaaacagaagacaaagttacctagagcattcaaagaattcagaatccattggatgtaactaattctgtagaacctgcaaatgagattagagacatccttacagacaataaccgagacaatagccaaatagcatgtgagttaataaattggaatgacgaatctatttcataccttagagaaatattgaattcctagattccttgagtcttgcataatgggcgccgtggtagaatatggtgcaagactcttctgaaattattgtggaattttactaatactattctgatgggtttaaaaatagaatgtatcgatagacatatttcactatatttgctctgtacttttagactagaaaaacagtaattgatcttgctgccaattcagtctaacagtgttaagaaaaactactcccacacacttataattcattaattatagccgatcatttctattctgtgagcgtgaaccagaattatgaacaaaaatatcttaacaggtttaactcttttttcttcaatgagaaactttaagcacttacaaacccgtctttctaaaatcaatattagatatttcaggttacgctgatgattttgcaggaggaagactaattggtcatcaatggattgaaaagaataacgaacaattacgagtagatcttaattttattgctattagatatatcaaatactactgggagttcttatttaagttcaagctaaaacagtctcacagtcctttagatgccaacataaacgcgatcataatgaatgtcaacaacgaaccaaaaactccttcactcgaacaattagtaactaatgaattccaacaacttcgaaaagaagtaatcaacaagagtataaaacccgaagttcttattcatttagatcctattggtgatttgtataagcgtaatgagagaagcgattcgatcactgttgataaatcattaattgagttttttaggaaccatagagtcatattgttatctgcgcttaattttatgattactcgttacttggaaaaaataaattttgttcccagaactgcagaaaaggttgcagggtcgataccgagaactcttctaaatcctaaagaaaaattatccttttaaagttacatgattcttgtttttattgtcatgcaagatccgaaaaggaatatcatatggatcacgttatcccatttaattatgtttatcaaactgaaatctttaacattgtacctgtgtgtaatacttgtaattcatctaagaacgatagattgcctacactaaagatatttgaaagggtggttgaaaaaaataagaaattaagtttaagaagagcctatacagacgaatggtatcgcaaattatatgatacatgtgttacttcgtaccacggaagcagaccattctttgatcctcacaaattagtagtagggagactcgggggtaaattttcttaatacccgtgtagtacaacaggttctgaattatttcaattgttctttaatgctcttttaagtgaatataatggaattagatgtcgatattttttagaattaactaaccaaaatccatgtattgttgtttttcaccataaatattcagaaagacatatgaactcgttagcagaattatctattcatttatctatttttaaatatcatatattatctgattgaaatatattgaattaacagttcccaaatacctcatggattcgaagcccactgaacatgctgacttgctttattaacaataatacctaggataggaccctttgcatgttaaaagttcttttataatttcaatggactataacaacagaaataagattgggaagggttgcagcagtcctatctgattttgatggaactttgtgtcctacctctgatataaaacaagatcataataattctgaattaattccatcatcgtttgaaaatatacgctgtgaaatttctttaactacaccaataagtatcataaccagtaaagacttgattccatttatacaaaaactaaaaaatttgcaagattgttatcttgtattttaggcttagaaatctttgttctaaacggtataaaacaaattgatcatgataaaaatattccaaatgaaaataataaatcatgcttaggagatgtcatcataaaagatagggttgcacccttggactctgagatgctattaactaactcgggtattaagtgatattgcagcctatcttgaaacagaatataagaaaataaatattgaaaaaggtttctaaattccaaagaaaatacaataggtgggattacattagattggagaaatggatctgattgaatgactagcagggaaaaatacgaggatcttatcaaagaatcagtgtctattgtgttaaagaatgcttctgtccaaaaggaggagggcgatgattattcatgagaaggattttcttctagatatgttaaagtttctgtattgttggattcgtctgaatcaatccaattaaaattcgagatatgatactttaaattaaaacgatcaagtcacaagcttgactattaccttatctttactatatcaacgcgaatctgtagagaatggattcgtcagatagacttcgatgccttatccataatcggccttaaatcaggaaattaaatatatagccttaatgaccatcacaaatgtgattaaaatgcctaattcttctattactacgccatttacacaattgatagcggattttaaaggaaagaaacttccatctgaagaaattgaatcggattataataacactttaaactatccaaataattattttgttgcaccagaaaactggaatgagtctttttatacaacaactagaaaaaatatgcttttacttagcagggggatagaaaacatcgtaagaataaaacccccttttaacaaattcaccttaatatctttatttcaaaggaacagtaatttcaacgatgtcaaagagcaatacctcaccctttctccactgacaaaaaaactgtatttgataggacacacaggcttggcaagcggtattagtttatccaatatggccgacatagtagatttcagtggctgtggattggaaaataattggataataatatctttaagtgaagacgaaggttgtgcattaattgctgaagaatttacacctggtaagtatagaggattcttcacaaataaccgaaatctagttaacagatgtctagatacattaaacaattctttacccgtttcagaaagaatagaagtttaatgcgtggttactgaagccgcaattctatctttaaataactgaagtataaaattagtaaaacagatcatttcaatattgtagcaaagatgttgctatatcgcattatcgtgacttacacaatgctgcttatacctcaagaaactaaatactgttataacatggcaaaaaatttaaaaaggatttaaaatatgctaaaatgcatatttcgaagtgcttaagcgatactaactcattataagaattttattgagttataaagtcttgaagatttgtttttgttatcttcaaattattttctttctccaatattttcatagcaattagggcaagcgactttttcacaccaaatgttttttccggatcagtaataggttctaatctaatggttatttgattttcttttgatataattgtaatgtaaaaagatattggtctttgattttcaattacaactgtgctcatcaagattatgtttttgtccttattgagaaaacaatcggtatatttgataattgttttattatctattttgtgaattactttctcaaattctaggtaaatattttcaaatttcaaaggtccagaaattactatgtgagacacaataagtcttcatttttttctatttatctttgatcgaagacaatcatattggtatggctatataactataatcccgagagtgtaattttttggccatatagtttttttcagtaaattggctactattttattactacatttgttttggttttaacatgatctagaatatcatctttcatgggggatctataattttgcccacaatattaacaggagaatatgccaatatttttccatctttgcttatgggagttggcccacagaataaacatagtgctttaccttcaggccaatatgcaacatccagttcattaacgtccctctttgcgttctcttccgcttcgacatctatttctgtgagatctgtatagagttcatctccccatctgttaattttgactttgactggcagacgatcaagtattgcttgaaaggtctttgatgaaagtgatttttaaatactgaaaatgatttaacttgtgagatcgtttgtaattataaatattagtgcatgtatttgcgttgtaattatcatactatcgttaaaactattaatcataacggtctctattgacgtcgatatttgattaatcgagaataaatccattcgctgttttttagaaattgaagtttatttttatgagataaatgttattcatattggttatcattccataaatacaatttaagatcatatttctttaccgctagcaataaaacaaactaagaaaaaaatggttagtactatatctattcctaaacccgatacgttcatgtcgataatggtcggtttagttgggttccacaataaaaagacaaaagaaaaagtgttataattcaattataaaaattgaaaaatcaggaatcggaggaaagtatttgtttgcaaacttgacgaaaaaaagattgatttagttaagcaagtagattgcaaagtttagtatagaagcaaaaattatccagactaaatatggaactaaaagtatcgcagcaagtcttgaaattgctcttgcataaattattgtaactattaccattatatcaagtaatatgatatctactaatcctagtaatggtgactttaatccgaaaaatagtaatgaccacaaggcatttagggctagttgaattccaaatacgatgaagaagacctttctaattttaggcttagattcacttacccagacggtgtataaggatactcccatgagaaaatatagaataatccaagctggaccaaatacccagcctggtggagcaaatgtaggttttgttaatgtagaataccaatcagggtactgcttcaattgtaaaaattgaaccaaaaatgcctgcggattgacaaataagtattgaaataataaacttaagaactttcatatataatgtggtttttacaactaaaaaaatatttggattaaaaatacagaaataggatttcttacttttagtcaatctgatacaaataagaagaggatgtcttctaagaaacaatgccgtatacctaattttgaagaattatggatagatcatcccaatcctcttattgatctatttatatctcctgtaggttattatgttgaccaactaaatataaacgaatttcttcctcattattcaactatggaaaaatcattaattccttcagaagaacaattcaaggactttaccccgttagaagatatcatgatgataggatatcctaatgggttatgggatagtgaaaacaatttgcccatcgttagaagaggaattactgcaacatcaatatctacagactataatggaaagaaaggatttctaatagattcagcagtatatcctggttcttctggttcccctattttcatgtttaatgaaggaagttatagcactccccgccggtttagcaattggcacaagaatatttctcataggaatattatatgcgggtcatatacatactgcggatggggaaataattactgaagaaattccaactaaaaataaaaatcatacccgttctttcatacctaataatctggggattgtaattagatcaaacttgttgttggaatttgaacccgttattagatcaatgataaatcaaaattctaaagccaactaattagctttggcattcttataattcacatatggctcgtaaacgatttcgctgaatcaaacgctcggactatgcttgattttctcattaagaaaaagaatgtaagagcatatccaattatagtcgaagggaacaataaagtcgtatctctatccgaacatgctatttttatctctgaaaatttaagttatgtaataacaaaatcatttacgttccttgatctcctttgtttggccaaatttttcctttatatagttaaaggattccacctcattcattcctcctaactgagtattgatgatcaagagctcttacacttgttctcctttaattgaaaatcggaccgttactattcatagagtgcaagttgtttgatattgtgttatagaaataacagaagaagaaaattaaatcaatactttgttgcagaggatagatgtaaacatttgacaagttttacatcaaacagctgatctggtccatgacaagatattcaaaataaagtctaaagagagattgattatattaaatgtggaccctatattctccaacatcgcgttaatccatttctagtctatttaccttctagttcatcaatcggatccgacattgagtccaattccgccatctgtgcgtaataatcatcgccagaggccatataatctccaaaactagaaaggaaattgtccttttctactttagatatcacttttgtaactaatttattctgctcgtcctttatttctattaatttcaacatctgatctttagcattaaatgaattcaaatttgatatgtaagaaacatactgagtaattttttcgtctattatattcgattcaatctctaacccttgcatcaattcctttaaagtattaacctcagaggtaaaaatttcctttaccgtagataactcagctgcagtatgttgcatcttgatatacttctgataaaattcaacgaacagcttaagttcgttcaaaagggtttcaagggatttcttttttggtaaaatagtatcttgatgttctattatgtctctcaattttccaattatcactatattatttcggaactgcaaagtttccggttcaaaggcatttaagagatggattctatgatcgattggttgtttttttgattatgtccaatgtcttgtgataatttgcaagttcgcctagcaaaaatttcacgcaatcagataaacctcttgctgcatttctaagagaagaaaaggtatttttttgtatgttattctctatctctgtaataagatcattgagatctggtttcccttccgtataatatctactgattttggttatatcaatttgattgaatagcaggtattaaagagtttaataaatctagattcttggaattaatgtccattttactgtaaaaacgcattgaaatctttgagatctgtctctgagagatcggcatcagaaagatcggaaccctggaattttgtgaataacaggtcggcatcggtaaggtcggcatcggtgagagaagcattagaaaagtctgaatatccaaggtttgattttaaaaggtcggcatcagaaagatcggaaccctggaattttgtgaataacaggtcggcatcggtaaggtcggcatcggtgagagaagcattagaaaagtctgagttgaagatatccgcgaaggacagattcgcacctttaagatcagtgtttaaaaaattggtaaatgaaatggtagcgtccgagaaatcagcgtcgtcaagactcgctgaagaaaagtctgagttggagagagttgcatccgagaaatcgccgtcaaatatgcccgtgttagaaaagttagtccctattaatgtggaactagaaaacttagcattgtgaaatgacgaattagataaattagagttggaaagggtggaatcaatcaaattaagatagtagaattcagaattggagaagtttacattagatagttgcgaactttgtagtgtagtgtagtttatttttgcattgctaagtttgagatttgacaaattgccagaaaactgcacgtgatctagtttagagccatctaacttggtattaaaaagatttgagttcataattaccaatgaattcaactcgacaccggacaaatctttatttgataagtcgatcttgtcaaaaacaatttcttgtttgtatttatctcttttctcgttgaattgtttaacgtcaccattttcaagaaagttggctaatttatctggcgtgatataatatggatttaactcgttgaatattggtggaagaaaatgacctagagcaaatgaaacaatgactaggaagatgtcaaaagcgatataatgtttttttatccatattttaattttaaatcgttttaatctcccagaatttcgatttgaagccattaactctaacttacgtataatttggacacatttatttgagtgtatcaagaaaaatcaatttagtttagattcaagtggaggagaaagatttgaacatcaccgaattaaaacaaaaatcacttcaaatttgacccagttgctagatgcttaaaactagcagcgaatatcatgatgaatgggagaataatttgtttagatccaacacaaaataaggatcatgaaacatcattggacaattacgattccatcatataaagaaatacgttcataagcgaactcaagaaatgccaactcattcaaatatcttcttattgaatagtatcacaagttcaatttcactttgcatattttctgtaattctgatgcgataccatttaattttttaagagttttactggaatttggattcaatatcagaatcctattttgaggatccaattgtaaatagtcgaaatcggtgttcccatatattagtaaacatatcaaatgtcgattgattataaggaggagaatgagagaagatatgtctcaaaaccttaaacttgttgtaatctggattttgatcattttcaataatcttgtatgcttctttaatgctttcaaaaggatttccaatgtaatattgagataccgaactagacagatggattaaattttcctttgattcctacagaatcaaactatttatattactattagtaagatctagttcttttatattaccaccaattaaccaactcaaatgtaatgcagttccacttcttcctttaccagttgatagttcgatgatattgtagtccttttccagaagtcgtaaccttcttccccataagattataaggattttttcaagattgaaagaaatcatttgagtttttttcgacttcttcctcagaattcccatacactactaataaaatatcctggatatagttttcgttgtctagtgttattacaatttcattactgttgttgagtttattaatcttaactttctcgttaatggcaaaattatactcccccttaaatgcataatccatggatattcaagtcattacgatagcatttaatcgtaatcaattgttctaattactattatttgggatccataggaaattaagatatgaactcagatgaggtcaagtttactaaactcatttaaatattcttataagaagaataataagtctaatttatcaacggtatgtatccccttacaaatactacaatttcattgagcaaattttgtgagaagaaaaaaggatctaacaatatctcatcctcttgtttgatgatgacccagttggtaatatacttatacaggtgctttttatctccgcaactcttaatataataattgatctgtctatcaattcgaataaaactattccaattaggaaccaaagaatgaatacttccatttagtccttcctgatgaacaaccttttctctgaatgcgtagacaaggtttatgaaattgcgagagttatgaatgaaattttttagtgcaggattcttaattccaaatgaggttagaaatacctttcctgaatcattagaaagcgaaactaagcgattttgaaaatttaatgaatagtaaatatttgataataatgcgagattgtcaaaaattccggttaccaaagaaatgatatattcgatgtgataaaacatattagcagaagcgaaattaacggaaaaaattaagaatgtcaaaatcctaatatcgctaaaaagttccgacgaaagaatgagaaataattttatcagatttaggaaggaaatgagactaaaaggtattgaaagtgaaatgagagtagtcgctgattccaaaacctatggcgagtatcatgataggtgggttctttcgaagaatgttaattataatttgatgtcaggagatacggcaaaaagaggacagtatgtagaaattaagaaaaccgaaaatgttccacctttcgaaaaatggtggaagaactcgttagacatcatagatgattttcatgatataaacagaaggaaaagtggcttaatttagaacattgagaacacgttttaaagaatcgttattttcctagggtctcagaaaagtctattaacttatatttttggatcagcgtcgtattaacttatgagttatccaaattttctaattggagcgggcgcttctaccgcttttggttttccttcaatgaaagaactaactcgcgaatttgcgcaatatcttctccgagaagataaaactaaactgaatgaactttataatggaattgtgaatataatgaaccttgcatttgagaacaatgcagatgtagaatccataatgtctgttatagttggtctcaaagaggagaccaggttcaaagagaatattggggatttcggactatatgctttgtatagtaaattccaagcatatgatattttttcaaatctcgatttcaataaaagcgatttagaccaattagaaaaagaatacaagcaattcattcgatctgaaatggaattgtcaacgcccagactagataacgcctatctaatatatgataatctttttgggaatttgtttcactactacagttttcaagatcaacctaaaaaggcagaaccttacagcagtgtggatgctgaatatcgtaataatgtttataggcatttcaacatctttacaactaattatgataccataattgaaaaatattttcatgacaagttgcgagatccctggttttataccggcgcgaggaaggagaatggcaaagacgattatctggatatggatgaatttgtcagaaaatgcttctccactgatgaacagtctacaatgagaattatgaaactacatggctcaatcaattggatcaaggataaagatggacatctaatacaaaaaggccttagtgaatctcatcgaagcatagaaaatagtaatgaaagtgactatatcaaagaggagataatgatatatccattgagtcaaaagcaattatatctatctccgttcatacaatttttcaattatttagagaaagaattaagaaataataagatttggatagtaattggatattcattcagagatattttcattagaaacatgtttgagaaatcaatagatactgttaaaaagattatagtagtaagcccccatagtgatgaggttaaaggtttattcaatagtcaagcacaagaaaaaatcatagagataaaaaagagatttggcactgatgaagagtgtgacaatgtaaatgaagatattgagcaagaactaaagaaggctgtatatccaggataactggataaattagcattcattgaaccgattgaaatttcctatttatactttaattaatgataaataggttctgtataattaagccgttaaacttccatatttatttatagtaaaataacaaattatctaatctgcaagaatagtcttatcatacacgtagcaaccgacaatcattttgacagtcattagattacatttttaaatatgaaaaaaagtcattccagttgaatttctctagcgatctgtaatcctaaaggtttaattaattctttagaaatagtaaatgagtccttttttagtagcaaaattgcagcggaaaccaccggtctcgatcctttgatattcattgattataggtattaaagaatattcaattcaaatttttcacaaatactcatttcaaaattgtgtaataacatacaacgactcgtgtgaaaattcatacgatttccaccgaactaagtactaatagatggtaactataatgtatgatggtaagaaataatttatatgaaaattataattttaatttattcattggtctatctatggaccttcccagttaaagggtatgtgcttactggacctaccttctcttttccacttaaaactcatcgtatctacttcatctttcaacgctgttccccaagtagcaacagcacctgggccaacttcactaccaggtggattaattgtttgaactctttttcctggtggagtcattggacctcctaatgctactgcttttgcaagaacttttcctggtatttctgcactccactggcttaaatccttagaaatttcaaatcttatgggggcaaaatcaattcccttaatttcgcctatcaacttggcaaattcggccataaatccacctgctttaccactaaaaatcatctgaagggcctctctttgtttttgatcagcacgctcatcaaaaaataaacccatatttacttttgtatttcctgcccaaatatttccttcaaaggctcctatagctaatgcgtttagtccatttaatgatatatcaccgtaatttcctttgttaatatgatatgccaatatcccctcacaatctccaaaggtaggttcttgagcaaattcacaaggacatggtatcttacatttgcaaacatcaaaccaatctccagaagctttccaagggggaatgctttccgtcatggagttaggtgaaaatactaaaatataaaattaccttgttttataggaaattttataatataaatatacaagagtgaaaataatgcaaataactccaatcttttttacttaatttataacacattctatcatttgcaaattcatatccatagtcgttcatattcataccattgtcatctctatcttgatttgaacctcctatcatcatgttattcatactattctgcgaatcattcatttcgtcttctgttgcaattgatgttattcctgttattgagaacaagcctattaatatgaatgctattcctgctactcttgcaatccagattgctttagaccagactttctctgcaaaaaccattggaaggaaaaccgttaaaattacatggacagccataatcacagttacatgtttcaacataatctgctttaaaagtccaagatggaatctggtttaaagtagaagtcatatactttcactataatcgaaatatattaatttttacggtactattttataacgtggttgattttagataaacaattgtatgaacttttaaatgacatttgtctttacattgatcattaatttttgatactgacccatctggaaattcacacgatttccaccgaacccttataccataagaaacttaatcccacagaataaccattgaatgtacggaagagaagggtctggatactatcgaacccaaataactagtgtatagtaacgataatgcgtaatacggagaaataatttacatgaaaatcataatttaatttatatattggttaactatggacctttcaggttaaaggatgcgtgtctactagacctgccgcctcttttccactgaaaactggtatttgatcatattgagtatattataacctagagtatcattgagaacaatttgcattcaaccaaaagtgtaccctctaaaaaggttaaattaaaggaacgccaagaaaattttaaaaaattgcaaagaatatgaagaaagattttgtaataaataaaaatgcactaattcgaatatattataagagtataatttctatatcccttggtaaaaagtatccgatacctatatttgcaattgtaggattattttttggaataatttttcattatggattgaataatgcagaattgggacacttggtttggtttattgtattgataataggaggattgccaataatatttgaaacaataaaaggggtcatgcatagacattttgtctctgatattgtggcaacgcttgcgataattaccgctatagtaacaaatgaagcatttcctggtgtaattattgttatcatgcaatctggcggaaaggctttggaagattatgccttcaggaaagccaccaactcccttgatgaattaatggcaagatctcctaagatggcacacaagaaaatcaatgatcaaaatgtggaagatatcgaggtcaaggatattagagtcggagatcaattaataattcgaccaggagatcttattccagttgatggtattattatttccagtgctgcacaaatcgatgaatcttctgttactggtgagcccttgtctaaagttagacgaagaggagaagaagtttttagtggaaccgtcaatataggtaacgcctttgaaataaaagcaaaacgcattagcgaagaaagtcaatattcaaaaatagtaaaactcgtaaaaaaagcacgagaagataaagcgccgatacaaagaatcgcggacaagtatgctttattgtttacaccaattacactagctatatgtggtttggggtggattttaactcaaaatgctcaaactgttctagcagtacttgttgtggcaactccatgtcctcttatatttgcaacacccgtagccattataagtggaataaacaaggcatcaaaacaaggtataatagtaaagagtggagcagccattgaacagattgaccgggctcatgtagtgatttttgacaaaacaggtactataacatatggagttcctattgtagaagatgttttattgctcaataattttggaataaatgatatggacaaaaagttgggatttactacagatgacattttatatagatcagcgtctttagaacaaatatcttctcatccatctgcacaagccataactaacgcaggaagaaaaaaattccataatttaccgttacctgtaaacttcagtgaagaagcgggtctgggagttaaaggttttattaatggagaacatgtaatggtcgggtctccatcttttattcaatctcaatccgatttgactcaggcaaataatctttcaaatttgaataacgatctcttaagatctatttctgatttgcagaacaatggaaagatggttgtccttgtaaatattgatggaacaaattcaggaataataattcttagtgataaaatcagagatggcgttgtcggtatgatccatgatttaaagaactctggtataaaaaaaaccatcatgcttactggagatagcctgattaacgccgagtctatagcgaaacaagttgttttggatgaattcaagtatgatctacttccagaggataaagttaacgaagtaaaaaaaataaatgaaaaatataaaggtgttattatggttggagatggtatcaatgacgctcctgcgttgacaactgcgactgtgggtattgcaatgggagccaagggtacggctgtttccgcagaagcagcgaatgtggttttattagtcgatgatgtaaccaaagtatcaaacataatacagattagtaaacgaacaataaacatagtaaaacaatctattcttgctggaatgggaataagttttattttgatgattattgctagttttgggttgattcctccatcaataggagccttgcttcaggaagcattagatattggtgtaatattaaatgctctcagagctagatgactgtatcgaatctatcaacaagcctgtttattattggtcaaaattctaattgtattctttgataaaggttgaatgaataaaacaagaaattcgatttacttggatttactagttagacaaagaaacagcagaaaatgcactgactagggtttttgactcattagataataaacaaccacttttaattttacagcggataaagttccgaacaaccaagaaattagtcacgggaaagattgaaagattgaaaaatttcaatttaatgctttggacaaccagatattccattgattcaaacattggggaatgggcaaatgaaaacgttcagtttatgatggactttgggctattctcatcaggtaatctgtagaacatatatccatatacacctgttactattactacaaaaattgaaattgcagaatgagctgcaaggatttgtaatgatgtaatggccccataaattgtctgcgcactgaaaaccagtatgcctataacacctgctccagacgttattgctattactgtaaaaaatcatgtaatatcattgcactttgtttctattaatcatgtctcctagtaataaaattgcaattgcggaaacacctgcttaaaatatggtaattatccaaaaaaaatttgctgaattggctttaaatgattttaactcctttttctatactcctttttttacttcttctactacttcctgttcctttatctttggagtttgttatggtgcctatgtttcattctaactttgtcctgcagatctctcctcgctttcagattcttcctctacttcttctgtctcctcttcatcctcatccccatcctcattttcttcatcagagtctgttccagccaagatctctaattgttcgtccgctaactctatttgttctgctgctttggtattattcccattatccaatgctgtaattgcatctgtaaggtgttgctttatttcattcacatctgctgtttgattgagcgactgagattgttgctgtagttcttgcccttgtgttatcgctgtcgtcatgttctgagcaaatacagataaattgctcatggtcatgatggccaaagacactgatgccaaaataatgggcataatgaagcccaatgcgatttttttgttcattgtaaccgtctttacaagccattagataataagaaatttggtacaaggtgtgaaatgtgactatcaatttaggattattatttaaagttcattttgttaattgtaccagaaatgttttatatctagcaatggtggagtaaaacaaaattgtattcagagggtttgattcattgcagttgtttttattatttctactactactcttctgatggtggagataggtgctaaatcattttcatggtggctggatagattgtgggagatgatattattggcgaaaccgggaagaagattcttaattttatccaaaacaatcccggctgccatctacggaaaatcaaggaaatgatgaatatatcaatgggaacagcacaatatcaactagatagactcgagaaagccgggagaataacttcaactagaacaggactttataagcactattttccagcaggagtatttcaagataatgaaaaagaaatacttcaaatcctcagtcaagatactcctagagaaatcctcatgataataatagaaaaacaggctcctactcaaactgatattgtaaatagtattaacatttcagccgcctcggttagctggcacattaaacggttagtagagttcaaacttgtggaagaaattagagaaggtaaatacaagagatatcaattgcataatagaaaggtttcagcgaagtatatctcgacattaatgcgaaattactatcctgctatttgggataaatggagcaacaggttggtgaatgtctttctttcattatcaaggagcgacaatctttaattgttaacagcagcttttatcctattttctatatcgctttttcttccacaaattcctcttgatgtcgaagaatttgatgaaattgaaaaagagcattttgatgacattgaatttggtattgacgcagtaatcggtgtctttgccctactcttgttttcattatcgattctagcgtataaaagaacaaggcttaagatgatggtatacgcagcaggtgcattcgtcctatttgcaatccagttgttattacagtcattggaagagacatacgactttctggaaagtcctgtagctgatataatgtcatctgccttaacccttgctattttggtattgttctttttggcaatagtaagaggaagatagtcgaatttttggaaaaagtattaatttaaaaggacaccgaacatctccacaatattagtttgttatctattaacctcttagaaaaagagtgatgagagttcgagacatttagaagtggatcacattaatctataaaaaaatccgaacgcaacaaattaccgttttgctggattcattatgaattaagccaacttagtgagttgctgtggttctgacctgaaaaaaaatgacaattgggatctcatatcctcgagttactactcttgtcagtaaaatgagataatggctctaactatttttcaaacccctctggatatcctcatgatttctattgaacctgcgtcaatattggtccttttttgccgacgaaattatgttaatagaagatggattaatccatctatcaatatagtactctaacactgaatttaaacaaaacctctatgtaaatagtagtatcgtgagtcacttgaccaacttacttgttgtaatatcttaagctctacaaaatttgaatttcttatcacaataatttaatgtaatcgtaattgaaatatttggaattgcttacgtaaaaggcggtatttatacacttattacatatgttggcaagtagtatccaaagttagccgatatatgcgttttctctgagaaaaaccttattcaaagaataattccgtgccacatcaacgataatgctatagtttctttgagttgttgctttttctaatattatccacttcaaatgacatagatttgatgcctaattcctataaatcacagcatgatcatctactgaaaaaaatagaatttacatttgacacattaacttcaaagtatcagaaacaaattataaattaacaaaattatgagtctagtcacgataattactttaatgataaattttgaaatttatgattaaggcgaggagtgtgattcttcaaataacgtctacgctaaaacagtcaattagagtcaaatttgttttacataccaccgaacccctataccatacggaacttaatccccacgcacccaaactcacaatatttagataaagttaaataattttaaaaaaataataatagccgttgtcatcgttatctgcaccttttattattgtgatcgatgacgaaatagatcttgcttctctttacaaggaatttctgaaaaaggaaggctataatgtagtctcttttactgacccggaattggcttttgaatattgtgctgaaactgccgataaaatttcattgatattaacagatttgagaatgccaggtatgtctggattacagtttgcaaagaacatacgagaaattaatagcaaagtaaaaatttttttgatgacggcttttgatacagcggatttaagagatgacgaggattttaaaaaggctaaaaccgataggctacttcaaaaacccattcgcttcgctgatttaagacaaatgatcaatgaatcgttaaaagtgctcaatatggattaataaagataaaaaataatggtactgattaaccttgtctatatcattatagccattgcatgactgtctaatattttttgttgcatgtcttttgatattttactaaagtctttttgatgatacatgcaaatgcctttaagattagtgtcaaattttaagggcagataggattcgtaatccaaaagatactgtattttatgcttaaagaggaatgaccctgcatcgcctaatatggaaattccttttttcccaagttccccggcatatttgacactttcttcgatatttctccatatggattctacatcatcatgatcaagatatcctctcagagagtcaacgatgatcaatgatttttcctcctggttgattatatcgagattgactgtcatatttttatacagtatctccctaacagaattctccgtttcatagaagggcaaaatttgaaccaattcattatctttaatttgtttttgaatataattagaataaaattctcgcagggtagtaagatcacgataaataagcaaacaatgcagtccatattcactttgtgaaatagtctcggctgcgtctctcgcattcattaactggccataatcattgggtgaaattaaatatcctcaccatgagttgattgtgcttcattgtttaataacagtgttgttgattgattcataataaaatctgagatatttctctacaatttggaattaattcaatatgtcaaatagtccatattattgcacttgcatcggccgctatatcttggatcttttttaaaatctaaaatattgttattgcaaaattaatacgattttttaatctctcctaatttctcaaaatcaatcgaataattttactaaattttcattgatccttgtcgtcttgatgtgctctaccatctatattagaaccccaccaccacggaacttaatctccacgcctggagtgttactaaatattatttcaaatccatcaaatattaagcactatcatgcatggtcagatcaaataatttattgtactgtaaagtgttatagaaccctattaggcttgggtttcattagttaattctacaactttcagaaatgacttattgtagtgtatatcattaaatcatgttacacttttggatgtgtgaatcatttctgatgcaagcgattctgtggatttgttttttattatgcctttgtatatggatatatgttgttttgctatattgtcccaaattaagttttttctaaactctttaacacttgactcaaaatgtttgtagtgtttgtcaatttgttcaaatgccttttcaaaagcactagggtctcgctttgttacaattccccgattctttgatgagaattctttaaaaaaacctaggtcagaagccacaaatggttttccatgtccaagaccgtcaaacattacaccagaacccgaacataccttatagggtaaaaatactgcatcacaagaaaaaaataacaaggagagttcttcttctgaaagatatcttttgtttaaattaatcactttattatcatgaaattcaaaatcaatattttcactattataaaaattctttgaatagtttaccaccaacttccaatcctttggcaatttcatttttcttatgatatcccatcctttagtattggtaatgaatccttgaactaatgctagtctccctttttctggaagatgcattttctttcttgcttctacttgtgctatgtcagtttggagataaggttcggatccatgatatactacattcgttcctgatatcaattctctcatgtaatttgaaagaactattccataggagctcttagacataaggtctttgttgattctatgtatagaagaataattaataaaatgacgccagcatttgtatagtgaataaagtcttagcaagtccttatcgttacctttttcttttatatttattaaattcgtccattgtttaaaatacatagatgtatgaaaagtagttactattggaattttgcattcattatagaatttatcaagtcccgtcgaagttttagatggtattaaaggatgcataaaaaaaccatacagtccaaactcatgttgtaaatgtattatatccggattaatgtcttttactaattttagtaatagctttgaattgtccttgttatgtggcgaaataccagtgtagtctccagaaccttcagaaccagatacaacattgacatccaaaccgtttgtgcgtaaagattcaaccaagttgtgagtataacggccaacaccaccttgcatgggaggatattcagtacaaaccattaagattttaatatctgaaaccactctattttatacaataaagaaagtatatcatacttaaaatagttctacaaagcaaaagtccgaataacgatttctaaaggtcgaaacaactatttaattaaatcaatcaactaacttttatattagaaatacttttttttgagttcagtcatagaattcatactatatgagagcaaacctagtcatatcctaatattataaaaactatgttgactattatgtcataatgaacatcaaaaatgttagcattccagtagtactagccattagcttggtactattactaaataccggaagctccagtatctatggtcaaaatctgaccaatcaaacaagtggacaaaatactacacaacaagcccaacaacaattagatcaagctaatcaacaaatacaacaagcccaacaacaaaaggaacaagctcaacaacaacttgcccaagcaaatcagacacaatcacaaggtaatcaatccaagcaacaagacccaaagatgaatgaaaaactactcaattataccaatgcagctatcttagctctaaatgacgacaatacagacgtagcacaaagtaacctagtacaaattcaaaatgcattgataaatgcgagtggtaaacaagtggtagttgttccagccccagcagtatcaatagatgattcagacggagaatctggataaatttttttatttaaacactttcttatattctaataaatcaataactaatgtcacaattgagtgtgctgcattaataatctatatgataaccatgggttttctgacaaggtgtaaatggtaaaattttttatttaattattgtctaggaacgacaaatcaacagtcagcgaaatccattaaattatttctttaaattgtcgctagtactaaaggaaaagaaaacaatttttaaaaccacggtaagaaattccgctttagaaaataatttattataattttacgtatatgtatattccttctgcaaaaggctgtaggctttggcgtaagccaataaaggtcttgagatgcgccaacagatctcagtaccaagatccaatgcctgcatatgttaaattgtgttcgctttgttatcttctgatttcagtctcaagcatgcaagattaacattaacagaatttagattttagatcttcatctcttttgattattttacggtattagaaccccgttaccacagggaacttaatccccacgaagcctaccgagatccagaatttcattttgctgaataaattatcttgggaattagtctagagtctcttttgaatcttgtgttgtttctatattcatttttcaaaccttctcaatgaccactttgactttagaaataaaagtaatattccctaatcatagtcaaataaatcatcaactgttctattattagtaaatttctttttgtaatagtagtagttgatgttactgtctctatctctatctacatcttggttatcagaattttgagatgtctctgctttaaactctgttatatcattataattatcatttttaaaataatttatcgccgatgctttttcaagccatacactttgcatattgaacattccttatcataaaaactcgacttttgtgttagaatcttttcagaaatagaatgtggacatttcacatcattatcaccatcaggtcaattctccggttatattatctccttttttctatcatgcttaacacattctaactatttggtcaattattttgttttaaagtactgattgtctattgtattatttttggatagtagtttatagttttcctcaattccttttgttgcatatatcaaaatatagttataactttatttcggaaagattgtgacagaaatggttttggagaatgtagctgttcttatcattattgccaaagactattttagaaataatttggtaattaaaaataaaaaaaggttagttgtttgcttgtgctaaagcgttatttcctgtattagattggaattggaagtttaagttattaccagataatacggagcttccaccagaaataacttgactgttctgtttcgatttttgagattggctaattacttgctttgccttgttactcttttttgctaaagcatcttctgaaattgccaatggagctaagaccaaagcaagtgcgagaacaactgcaattgatactagtattgttttacttgtgttcatacttgtaaaatttattagcaaaattaaatatatattagatatttcaaatttttttataataatataaaagaaaaatcaaacagatatcttttctgctaatctaataggtaagaacccaagtttatgtctcaccataaaagaggtcaaggttgggttaaatccaaaatacagtattaaattagaaaggagtttagcaagtgtttatacggataatttcgtgaatttcatcattctgacattttagacttacagtataatattttatggaggtttagtaatagagacagtcatggcggcaactgcaacaaaaatgagtgatcataacggttgtcattgtaggagatgtggctattttcttacgaccattagtagggggcgcctcaacttaatataatagcttcacgcatagtaactattcagcaacaaataagtatgaaattgcaagattttgtatgttttctttatgataataaaatgatagacttgatgaatttattaacagatactgaaactgggtgtcttaatagattgaaattacagaaatatgtatatttggcacaagtatgcctgcaaaataactttggttgtgaatatgatatctatagaaacggaccgtactcaactgggcttgcaaattactactatgaagaattagaccttaatagattattagcggatgtcaaaaataaaaactggaagaacaacccagactttagtgagaggtttttggctttattcaaaaagcaggaccccgactggttagaagtagctacaaccctggtagatagcacattttattgcgaggatgagcaggaatgtttggataaagtatatgctatcaaatcaatgtacagtagtgattacatttttgatatatggcgcgatctcaaggaaaaagggctagttccatattaaacccgcacttgtactattttggaaattgcatctattagttagttagttagtgctttgagtcatgaaatcagctgattttatacgataaataatatcaagtctagataatagtatctccttgtgattaatatggtgtacttagaattaagatgctctggtttcgatacaatttttccatatatctaagaaggctagccataaccattttattaaaataagtgtcaatacaaaatactgtatgtcgatctatcctaaagaatgggagaaacgatcaatagagggtgaattatgtggaatccttgcttgtgataaatcaccaactgtagaatgtcctcaatgtagaacacattattgcgaagatcacaagaatatacataaacatccgctctaatgaatagattctttgttacgctttattcctattacactttttgaatattgatgagaacactagtatttcttttagtaaaaggttactatcaagtcatcagttggttacgctttagaaaatttccgtaaagaagaagcatcatttgaaacaaaaacaaacagttgtgcttgtcctcttttcattatatgcatttacagttttaatttgagtaagagtcatcagtcatagaaatagatcaggtagagaagaaagaactattgtatcttaattatgtaagtcactctaaatatgatcctactcgcttgacggtgtcaaaactacctttttattttatacgtgagataagcgttttagtatatttgagagtaaaaagcaaattactgacacgagactatccaaagtattcaaattatgaaaaaggacatcttttggaaccttcctgtaaacgagtaatctcatctcaaggaaccatatacaagagtatcaaattgcaattatccaatcttgatttggagatcggcataatcttgagtggttcgatttcgctgcgtgtaaatcataagtagtaaatctaatcctctaggttcaatcatgtatactttttttattctatgataggaaataaatgaattatttatcaaatattgtaaatactctctcaaaattaattcagacgaaggtatgactgcttgtagtcttgtatcgatttctgagaataaagatccatttaaacaagatagtaaaatggattctgtaatacaagctttcagataagttggatccttcttttttttaatatccttttgattcaacattctttccttctatttccttatgaattagaatagcaaattaaacccaaaattattagtggattcaaatcctttgggataccccggtgatatgttaaataatatgtggtattatggatcttaaaaccaattgactggtaacaaagtgtatttaaagccattcctcacttcgactattcagcttattcatagataatcaaacttgcgagtaattctcacagagttagttatttaagaatatcatcataactcttaagtagtgtagaataaaaagcatagttctgatattcaaaaaaagcaatacgataaataagagtaaatttgaacatcataatcctctacctatcctgtatttctttgaatgtattcaaatcagtcaagttgcaattctaaaatgtgatgttcattagttacacactctttatcagtaaaagatagataactgtaaatctattctaaataatctataacataagtttcaaatttagatactgcagcattcttacagaaatacagtatatcaaaatgattactaacttgcaaatctaattatcttaaactaaatatagatttatcagttaaattgtataaattcatcttatagaattgattagaacatggtttgtacttcgaatactttcaagaagattacaattatgcgagacgctcaaactaaaagatttggttcattttctatgctattaacaattgttgttgctgttattgggactggcttgctcttttccttttctgcggatttagaaaaaaacataatgaaaacaaattataatgcatatgcacaagcagatcaacaacaaaacaatgacaataaagctgccgagcgtataacaatcaacttagattctgtaaaatttgcaccattaacaaataccaataccaatgctaatcaactaaaggttaatatattctataaaactaatgatcctaaacttgtgaacactattatggcgggagtgatgaaagtatatttgtctgatggaactctaataaaaacttcaactattcaagatgattatattttaggacaggcaggtcctatgcaatttgcaacatcatttgaagataaaactataaacaatgttaaagcagaaatcactatgaccgatacatttcatacagaaacgttttcaaatactcttacagtaccagcatctctagaaaaatgattatatattcttgaaattgtgattgcagtactaataaattgaattactgatttttcacacagtaggtaataatctctacagcggaaagaagactccatacataactttaaaaaattaatttgtaacaattcatactgaatgatacaaggtatatcttctcacagaaatcttctggatccaaataacaatccaatcctttatcctagaaaaattaaatattgaaataaacaatgtgtttattcaactattacttctcctaccatggaagggtggtaaaagcaataatatcgattttcgccggcattatcgaatgtaatactatagtattggtttggtattattgcttcggaatcaaataatagtataaatctccatttagtcagatcttattatagtacaaatttcataagaagtaattcaaaacgtgcaatgaaattgctttgaatttaatttcttgtattatcacaggacattaaatagctaaattatattaccattcgttatctatcttttaaaatgagtcaagtatctgtgatttctgctgtaactttgataattagtaatatagaaaggtcatacagattttactctaacatttctggattcaagcttctgtatggtggaggttctaaggattcttttactacatatcagattggtaaatataaaaaaatcacatatttgaacttgggacttaagaatttatcaaatgccaatattggccatgagaacaataacaataatttcggaagagtcattttttttatacagatgatgttgacagactctattcttattttaagaccaataaattaatttcaaatttaattctgtttgaaaataaacctgtaaatgcatcctggaatgagcgatactttcacatacgtgatccagacggctttcaactttcatttgctcagccaagttagaattcaataatttcatagttaagaaatgtattttattttctgctctggaacatatttgattatgtttttattatgatcatagttccaaatctttgcaaagtcttaagtataagaatcacgatatttaaaaccctcgtattcaaaaaccacaggatgagatgtagctaaattgaaaacatctagctcattctatcctgtgttattaaaaagaaaggacattgagaattgactaaattttttaatttagaaaggaagaagaaataagtaaaccaagaaatctacaaaaatatgaaaggaatagagtttgttttattggccgccggagcagttttaggagcttatattcgatataaaattacctcttttcctttaattctaggaatagttgggtcaaatgtcttgtttgtaaatataataggcagttttattttgggtattttttctgttttattggttaactggaacttagatccaagatactcttttttaatcgctattggattctgtgggtccttaactacaatgtcttcatttgctttagaaaatatagtaatgatagaaaataaacaaattctaagtatgatgattaatacaatagccaatgtgggcttatcctttttggcgttatatggtggcagaatcttaataattcaattgttacaatgatattcttagaaaaatgacgctaaaacaaatgatttgtttaaacatccgtataaagaaaaatgacaatgtaaatggaaaaagattagaaaaaactattattgaatttttgatgaaggcaaacgttttaggagctatagtatggcttggagtggatggatttggaagaagaggcaagtcaacatttcatttggagggtttaatgataaatcaacctatgatgatagaaacaatagatgaggaagaaaagatacaaccattgttattaccgttaaaacaaatgataggtgataatggctttattacaattcatagggttcaagtggtatagttaatatgctcattgaatcctttgaaaattaactctataaatataattatagaatatactgattattcgaaacttatctatatctaagatttgttaatacctctgaaagctatcagaatcagaatatcaaagccttaattaatatggcaaaattctttggaaaagactttgatttacttcatttatctaaaaaagaagatgttttatcatttcttgattctaaaataaaaagtaattgaaagttccttatctgcaaatacttaggttcgttccaccccgaaggcgatctttaccgtggaatgatattcagttatttttcccgtatttggatctactctggcggtcatatcggttaactcaatcccagtaataccgcgaattgtttttgtcgcttcagttaatgctacctgagtggcatcttcccaactcttgtcagatgagcccacgagttctactatatttgctaaatgtgtcatacctcaaattaaacaatatattttaaatagatattgtaataacatggttttcaataactgtattgacttttattgtcaaaatataagttaatattttaaataatgaatcactaagaaattcaaatcaaaagttttgcatattgaaagaatggccaaaaaccttaagcttgtttctgctggtcctgttgcttttctccttccctttgtgatttttgctctttatgcaacagaaaagtcaatacagcccttatcgctatcgtcacacctactatcaaaagagtcatcggttcaggtgatgctatagtctttataatatctgcggcaataaagaactctaatgcggtaagcaatcgtgtggtaaattgaagctttgtctcatgctgattatgtcctgcttgtcttcggttccttgtttcagcttttatcagaaagctcaaagttacaatggctgcataaattattattattacacctattatctctaatccaatggaaattgcctcaaaaatgggccttaaggaagttaacatttcagaaagcatgaatgagatatgttatcataaacagataaatacatccaactgattatctggttgctgttacccttatcactatcatcatcatgttcaatagattgtccaataatagttctaggagatataataatacaaaaaagcttacaaatatttcaaaacaattacaaactagtgtgaaatttcgtatttgtcccaccgaacccgctacctattttagaaacgaccattattttgggtggtaaatagaacttttagcattcggttcacttgttagcttaaatgactacttctggtgttattcctttatcaaatgcctgattctccgcccacatctttctcatcctcttccgacggcatcgagagaaccgaggtgataaagaatccggaagatatggttcgtgtaacaaccgaagatttctcaaaaataaaaaatagaattgatatttgttgtgattttgagggtattagggttacttttgaagtaaagcctatttggaatgcttattgtgtattaaagggcaagggtattcgtctgagatggatcactgaagttactaaagaaaacatttactattgcaaggaattggcaaaaattactaaacttagacatctagatggtataaagagtacctttggaattcatgatggcttaatatcgggcatcggctagggtaaatagtttaggacaattacctcgagaactcatcaaaactaatgttaaagaaatagtggagcaacaacaatatgtttatgatatattatgggctcgagccattcctttcagacagaggataagggaaatcgaagaaggagcgaaaagagattttattgatactatccaagatttcgatgaaatccagaacattttgaatatcgcattaaattcagttactgatgaaataatgattatctttccatctgtgaatgtatttaataaatatgtacatgaaggattattaggcaaaatatctgaattggtatcgtcaagacaaattactgtacgaattctcatacctgagaccgaaggagcaatagaaattaatcgaatagtaactaatcatggtatgcataacggcattgatgttgtatattactcaaagaacattgataatagactaacaaccttcattttagataatgagttctctttaacaattgaagtaagagatgagcgcaagaatagtctatttgagtctacagggttggcaactttttccaatagcgaatcaactgttctttcctatatttctatatttgaaaatctttggatagaaaacaacaaaccataatcatttaatatcaatcattatatctccttgtctttacgagttattgacattcttgtgataatcctataatacaataatataagataatgaaacccatgtgggtatcctcatggtttccaccgaacccgcatcacatcattagtaaatctctaataagcgttgtaaagccttatttatatgtgtaataatttgcaatatataggaactaaattacacaatttgcaatctatgaaaaaacccttttcaccatttggttcctgtagttttactattattgtactactattatatttcctaattccttccacttgttttctcactgtctttgctatatcgcctgcttttgaaccccaagcaattaatgatcagagaaatgattggattcaaacatctggtaatgacagtatcaatctaaaatccaattatggtgatctattggaaatagattatcttagcgatggaaaaactttgaaggccacactttggttaggatcagattcggaaaatgcctctatctataaccaatcatcaaaaaggattagttatggtatgcttattaaaatcgctagttataacataaacactggatttagtggagcagattacaattattatgttgaatcggttaacggaaaatggagtgaatatctttatcaattatcctcaactggcagtcaaatacttttatattctaaaacaaattataccgaatactttggcggtcccaccataggaccaggatatgttaaacttaacttgaatctgagttctattgatagtccgagcgaatatggcatattattctacactacagattctttcaaaacaaatgaagttagtgattttacagattgggtgggcattcctccatctgctatgaccatggtaacatctccaaaggatatagtgataacgcaaggagaacaattactagttcctgctaatatcttttcaaccttttctaataatgttactgacatcacttttaacaaagccagcaatgatgtcggctcagagtttaactctagcggcttgtatgtatctattgaaagaattcaacctccattatttaagataaatgtgtctccgcaagcacctctaggtttctacactattccattctccgcttcattatttgtagaaacaacgcttgaatctatggagtctatatctactcacaatgagggtggatttatcaaacccaatcttcaaacttccaaaaaatatcccacatttggctatgtaactaatccatctatgaatttgacagttattgtgacacctcctgttagttttgatgagcagttcaaggatttttggagcgtatatggccaacccataagtattattgctggaggatttgcaggcggctttgcctcactagtctttgcaaaaattaaaaaaactgataaatagtacgaagatactagaagatagattgacttgtatgatgagggttaaacagcgtgttagtatcagttaatgtgttccggctcttcttcttgaaccttttaaagtaattaaaattaagtgagtgtttgaaagttgttaatgtaattttatacttgataactttgataaataaaaatttcaaatatttgcttgagataggactaaataaagccgatgaaaaaccaaatgctatttctaattctcagacataaacttgttagaaaggataatagatatggatcaaactacctgctttaattgcaacttgaattcgaattaaatcatttatttttgtctattttttgatagcctggttaggtttagtttgaagaattctgagttgagttacaaaatcggaccaaatttgtttcccataccaccgaaccagctactaagaaatagtaacgatataggataaagttattttagtgtatatattaaatatttttaaaaattaaaatgaaaataagttagtttgtgtcttaatatttaacactactatatgttttgcgattttcaatcactctgatcttcaagagactccactgctatcctgctctgttgatcgtctctatagtattggagattatgaatccatacttctatcaccatatcatgattgtccacttacattataacctgaattctcttaaagccagttgatatacttaaataaattatctcaactccttcactgtttcaagtgaatacttacaatcaaacgttgtcttacatcttatcggtcaacatgattatctaaatttgaattttcgtatacacatcaggtattgaagtttaataaaatttaactattttacattattaatgcaataattatgttacttgccctaaaatgactgggttttaaatacaatttcgctatcttcaaatacaaaaaatgtgttattatacaaatgagctgtacggaggaattagtaaaaagatacctggaatttgatgaactcatgaaaacatgtcttcccaaggttgatacccatctaattttggatattcttcaccgtttagctgaagacaagaatccaatgtatactttagaaatcttcctcaatagaaaaccagatgttgaggagttgagaaataagatatccaatgatttgtcggtgatgccagcattttttgatgggggaacgcatgtagtaattgcccatagaattgattttaaaatgcttgaatacttttcttcagatggaaatgtctataggattcgaggaacatacaccggccatgggctaggtgcttccattggtccagtatttgaaagggatgatccagaggaaacctgggctgattatgatagaacacattctcaaacacctatgacataatttgaaagtggggatccggaggaattactatcttactctaagggaatcttttacttagataaattttagcaaatgttctcttctcacctagtacaaatctaagtatctcataatgataataatctttaatggtacgctcaaggtgttatgctatatatctgaagaattacaattagtttacagattatcgtaaatattattttacataatgactaaatgaagagttcaaattattgtaaactgcataaagattaatcgacatcagcatctgtgaataggaaatctgtagaaatcgacacaaggttcctgtactcatccataccgaatattttcaactatcaatgattattggtacgaaaggaaaaatgaagttgtatctctcaaactcgtgacattgtgcttcaatgttactcgatataggaatattgttctactgagattgaaatccttaagaccttaatccaggaatgggttaattatgcaggttgtagattatgatcgatttattattaatttttaagaaaaacatatgtttttgtagtaagaataaatatgatttacatattttgtatcaatttatataaaagatcatggctattatgaaatgactgattcaaatcatcaatacccgtcttctaatttgttcattatttactgtactctagcagggttttttgccgcttggggaatatctggcttattggttattatggatttgatttctcaaactcctccaagttcattttttggggcaattggaatatcgttaggatattatgcccccgttagtgcagcattaattgggttcggattgtatattttgacagggaccatagctggcaatatattcggacaagtatccttattttggaaacgaatatcaccgaataattccaaacacggatcaaaaactggaatgatggtaagcactctattgtgggccgtcttgtttgtcccagttacagtattggttattcaacccatgttatattcatttaacacagggaccactccgaatcaatacgtatactcgattgcctctaactttggccatctctttggaataatattatttggatcactgatatttcatttaatctatggggctttattgggatttatggcaggaaagatgatggaaataaaagcattttcattacccaaaacagtctgatgataaaaaacaatactaacaaatactaatggattttgtaatcatgtagcatacaataatgctatctctccataacaatgacctaaaacttgaggtgtatattaccgatacgccggcgatctaccatacttccaagtcttcagttatcttttttcattattattgcgttattttagcctcgtctaatgtacttcattttcttgtgttatagttcctttcatcgaatcaattgtttacataccctattacaattgatttatccaagtttgttatttttatatttttagtgatcattttcgattggaatcattatctgaatggtttctatctttgactgcgacatactggttttggaagttctttttaaaactatcataatttgaataaaaccaaataaagttgtcatttaatttatccaaattatgtaaatggtcacttgattccaaaagtgtaatattcacacttcattactaattagcttgagcattttactacagaaaaatattcggttataacctttctatatctattaaacaaacatgctaattgtcaatgtatctataattttacaaattttcttcaactagttaacattagttctagtctttaacattatttgaaaatatacttgcacaaatcatgttgaccaaatatgcaatggaagatctacaaggttttgatgactaatctctgtaaaagtaaatagtaagatgataatgaatgcttaattaaataggatcagttataataataagatgatataaatagaatttttgagatttttctaatctcggtaataaattgtgtagtttataaatagattttataaatatttaaatagaataatttttaatgtacttagatcaactttgtcagaattcataactgactgggaaagcatagtccataagaacgttagatctaacgattacatggatgctggaaatgtagatgcagttgataacgaaaatataacaattacaagccaaggtgatcgtaaagaataccgaataccaaagaatcaggtcgagggatataatggtgcagaagtttttttgaaattcagcatcaatgaattggaaagatacaaaatctgattattactttatatttttttaaataaactaggtagattcataatttatgataaatcatcactaagtattataccattaaaataacccttttgacatgggatttgaatgcgttatgtagtcgtctgctgttcttatttatagcacacagtaagactatatctgatatacaagtcaaatttgtttcacatacaatcgatcagtgaccaatttgagtaacggtgataattacagttagataaagtaatcctcaactgtccgtattattaaaagataaggaatgaaaaatcagactgtttttactaattttctaaagttctccttgtcctttccgattcgttcattaaatgtctcttctgtatatccgtgagcctctataccgtgtctttttgcattctctaaaagttcttcctcagtttcaccatacattgtatgtgtacatacggggtctcctgcatctttacagtttaaacttaatgtcatgtttgctagttattttgcattcagttaaagatatctattaacttccagtgtagagagggagaaaacaatctatctcaaatagtacatattcaaattccttaagtgcttatacatcatttttgaatgtaattcatatatcacattgtgagtttccgaacccgcaaaccatacggaacttaatcccaccaaactagcgacattattatagtaacgatataggaaggcataagatgtagggtaattcttaattttcatctttttaaaacaaatctttttctgttttcttcttcacaatcgagatcctaggaataacaaccaacgagtcaaaaatcacatggcgacaatcttgatttccgggtttaagaactatgcactttcgtaattccattttttctgccattcccttgtttttctattgtttttaacccttggtctagatacttcaaatataattgcaataatttcatttcctcaatgtaactttcttccacattatttaatttttcgaggtctagttgaaatatatctattagtattttagtatgatttattataacatctttagatatatatcgtgattgcagaacaatagatagccagcttatataatcagtgaaaatgttcatttcgtttagatataccgctattgctaattgctttagtgttctaacagtatcctcataagtatgtcgttttccagtttctccccattttctcaccgccattgaatctctgctaaaataggtattggtggcagcgtcagcaatttttgctattgcatcatcattaaaagaaccatcgggggtgattaatcgcatcctttatcctttttctttgagagcagactaattaatcttttataagaactactttattaggaaatcacagattctagtaataatgacatttatcgcaatttcaaaagttcttgttaaaccagatgttgcagataaattcgaagaagcgttcaggaacagatccagaatggtagattcatttgatggttttattggattaaactttttgagaagccagaaacacaataatttgtttataggaatattccattttaaagataaagaatcttttatgagatatatgactagcaaagagcacgatatttctcataacaacagtaaatcactatcgcctgcaattatttccaattctgttgagttttatgatctaataacaaactaaacgcccctattttaccaaagtaaaccatttttagttgatgcatcagcaaaaaatagtctaacagcatgatttgtaaatgatgacgttgcttacagttaattgaatttaggaataaaatatcagatattgaatattacagtaaatgtttttctcaccgagcaaataacattcatcccaatagcaatttgcttcaatcaaattgcagtttttttgcgtaatcattttaacaatgaataaaatagaataaaattatttgtcagtagtaggtaaaataaaataaaacgtagcaccattaccatcatgattatttactgcccatattcctccaccatgtgcttctacaattcccttacatatcgataaacctaggccagatccgccatggcttctctttaatttgtgatctatctgataaaactttgtaaatagtttatccattttattttctggaattccaattccattatcttttacaccaaatagcacaaaatatttttcagtggcattgtcattatagccttggaccgtttcttttagttctaaaggaatcaatttatcattattaattttttccacatctttaaccgatactaatatcgttcccccattggaaggtacgaaatctacagaatttttgactagattcactagaacttgctctattctctttttgtcacaggatattggatgttgaacttgtatatctttaactaattttactcctttaattgttgtaagtgaaattatattatgggtcatatcatctatcaatgagtttacgtccactatttcttttgatatggttattttgcctaaatcaagtttatacgcatcaagactgtcagatatcaatgattcaagattgatagcattccgtctgatggtttggacggcctttttatagtattcatttaattccccccttttttcttttaacatcatttctgaataaaataagattgtagtaacgggattcctcatctcatggcttaccatagagacaaattcttcttttaatttctctatttcttttagatggcgatattttgattgctcaatgataagcatttttttcaaatcgacaatggtttttgccgacagtttctgcgaagatgataaaaatcgtaaggcatcggatatatcagaagcaacataatctactaaaggcgcatctttgtgttgattctgtacaaaatccttaattttttgatatttgaataaacggccccctataataacaatggagtctttcaagagcgcctgatctcttattatttgcaaagttttgatcaatactagtaaattttccaatatggtaatagagatacatatgagatcatattttttactagattttgataacactgtagttagatcagccatcgggagactctgacccaaaaattctaccttccaacccatttttgacaacaagtttgcaaacatttttaatccaacataatgatattcaccttctacaaccaaaagtaatgcagttccaatattctcattgctattgaatttaatttggtatgattcttgtatagcggtggttatcagatctaacgaaatttgcgttgcataatgctcatcagatatggatattttattttcctcccataactttccaattaaatattgactatagtgaataatattgaaaatgtcaattacattgacattattttttatttctttaaatattatcttgtctgcttggtctttatctctcactattaacgcattcacatattcatgtgaaatttttttcaaatctgaggataacaatttattaattttcaatccaagttgtttatttggtctttataaaattttattcatgtcttccatacttgctgaattgtagatgcttgtcgaaggtgtaatttgataaaagacgggtgtgataattctgtgactgatttatccaaatccatgtaatattaatatgcccatcaaagggtacacagaaaaaattagggttttgcttcgtaaacaatattgaatggtgtttgcgctgaacgcttaaatttagtaaagccggctttatgaaccaaatctttgatccttttttcccctgcttgggctcccaaagcaattcctttatctgccaaagagttcggtacacaaatcaaagatgatgctgaataatatattctacctactaggttcaagttttcttctacgttatcatttgccattggttcaacaatcatacatgttccatcattttttaatgattttttggcaaattccaatgcgcctagaggatcacccatatcatgaaggcaatcaaaaaaggctacaagatcataatcattgcctatagattcgttagcagaaactaatgagaaattgatattgttgtcaatattatctttactagcatcctctttagctttttcaattgatggtgcatgattatcgaatccataaaattgtgaatttggatatgctttagccattattgaggtcgaaataccatatccacaaccaatatctgcaactttcgcacctttttttagtctttcttcgacgccctcaagagaaggtatccatgattggactagattactcatataactaggtttgaaaaattttgcagttccttcaaaaaggtcatggtgatgttctccccatcttaatccctcaccggtcttaaaaatttttacgaatttatcttcgtctttaaaaatagatcttaaaacttggtaacctcctaatatgtaagtaggactattttcatctgctaaaaccattgcgttttccggcgttattgaaaatttcttttctaacggatcataggttatataaccagatgcagcctgacttgcaagccactctcttatgtatcgttcagatgtattagtcttattagatagttcctcaggtgttaatggaccgttttgctgtaaggctttatacaatccaagtctttcaccaagtataaccatcatggcactcaaactacttcccatatcagctactgctttcattacaaattcttcaagttttttaggatctattgaatttgattgtgaatcggttgaactcataatgtttgaagcaataacaattatttaaattaattgcaaaagcataatcacaaatagaaatttactcaggattaccatctccttcgttatcactctaaccgaagaatataattttataaaatatagttattgacaattatcggatcgacacatatatggactcgcctcgaaaaacctatattgatacgatccattctatttcagatacaaaatattagtaactaaagcaactctaaagttagactcgtaatatatccgttactaaacccgctggtacctataatcacaaggactttaagaatttaggcaaagtcacttaaatcctatggcaggattatttatgattatcccagagggtgtaatctgaatgtcaccgttttgctcagcttgggtaatttcctctgttgatttcaaggtttttgctttagtggtatcagtccaatttatgaaatttagatgaatcatggggctataatcactatcgcctggtaatgctgttccaacaggaagctgatatccaaatgggccttctccctctatcccattaagaaagtcataaccttgctgaacgtattgatttgggatggtagataatagcggtgcaaagtttattttatgtccttgactcttggtaatcgattctgctgttttattatctgatgtatctgttactatgtatgaaaccgtaattccatcaacatatctctttaatgtggtaagtgtaattgtgttgttagatattgcaaaactattagaagaggtagtcacaattaaaagaaaagcagtcaatagaaaagttgaaccagccaatatcacagataatataggatattttgccattactttggtcctgccacagttgaatataaaaggattcttgtaaaccatttaagaaacagaacatttgatctgtatttaaagtcgagttacccgtataaaggaaaatggaaactttttgtacatatagtatatttgatctgcctatcatcttaacctcaatatttatcaattaacagctcccatgtacatggattcgaagcccacagaattcataatgtattatgcattcctatttatagattttaactaatttttaattttatttcatcttttttatgtgatactgccgccataatatttgaataatttttgataaagataaacatccctataattgacgcaaaaaaaacattaaaaagatttttaatatcaaaagaatctaaagaaaccgttcatatgcttgcatttcttatcaagttctactagaacaatacaaagcaatttcttatctacattgtgtattcagagataagcaaagtttaaacaatcccctgtgttttcattacatcattctgataaaataatggtcagtgaagcattacaacgctccgttttatcttatatacatcaccaaatcattattttagacgaagatatagatgcagcaacagccgttaagcaaatgcatgatgctaaagctgagacaattattgtaaagaataaaaataatgaatatatcggaattataacagatagcgacattttggataaaattgtgatgcgaggtgaggactcggataaagtatccataaagacaataatgtcttctcctatcataactatatctgcaaaagcaaatgtaaaacaagctctggagcttatgagactcaattcaataaaaagagttccagtaactgataatgtacatattttaggtattgtgactcaagagggcttggctaatgccattaggacctctgttttggaacaaacatttaggccatatcgaacaatagtccgagaacattacaagcctataatgagtaatctgggtttcatactgcagtttgcaggttttttgctcatcgtccctgccattttagctgctctgatgggagaggctgcttcagcagtaggaatttttctttctgttacctccatgtctgtaacaggttttgtattgaattcttacggtgaaagaatgcctatgaatctcaggcaggcctcacttcttatggtttcaagttttgtacttctgagtctttttggaagcattccatacatctatgtaaatccgtttccactagagcaaggaccggtgactctttttataaacagtttttttgaaagtgcgtctggatttacaacgaccggtctttcattcatattatttcctgaagagttacccaaaagctttgacctctatcgttcatacacccaatacattggtggtctaagtttcgtatacttgatagttgcttttttctatcctgaaagaaagttaatgcatctcagaggaatgataggtgggggaaacctcaaggtaagacaactgattctaacaattggtgttatctttagtttttatgcaattgttcttatctttttcttatatttaagcggacagacagatatactattttctctcaccttgatttttaggtacctgttaccggtggtggatttgttcccacttctactgctttagattcacaaaacaaccttcaattgactacacttatgataggtatgattatttcggcgcttccattcgtgtttcattatgcaatatatagtaagaaaatgcatacaacaagcgttcgcccagaattatttttgtatgctggaataattgttatttgtgtaattattttttattttgtattagataacatgttggaagtacaatcagagttaatggcgtctgtatttcatgttataagcgctgcgactaattctggttttcaattcattaatatcgcccaaataccgatagaagcaaaaatggtattaataatagcaatgttaattggaggaactgcattctccaccgcagggggtatcaaggtaggtcgattactccatattgttcaaaaagtcactggtaaaaaattcacatcagacaatagtggtggatctatatctgcagtagcatcaccatataacaaaaggtacctcacaatggagtcaaagccaacaaaaattaaagaagaagaaaaaatatttgatgaagcagtatatgtcatagttttatttatcggcatgtcagttattactggaataattatttctcatatagataaggaaaatttcttggattcccttattgattctgtttctgcattgactacaacaggattatcttcgggtataacttccgtagaaatggatcccatttcaaagatagttcttattattaatatgattgcaggtagatttgaaataattacaataatatatctatttgtaaaaatatctaagaaaagacaacaaactacaaacacccgcactaaataaaaccgtaatacaaattataatgtaatttattgatgaaatattgcatactgatggatttgacaaaacagacgaaccgtttaatgaattataagtacaggacagtctgccaattccgaaacctttcgagtaacacttcctaatgcttttatttttgaaataccctttagtctgttactgctgcccataacaatcatgtcaactttcttagcatgagcgtattccaatattttttctgcaatatccccagttaagcatttgctgtcagattgaatgctttgttcacttaacttcttaattttttcttgtgctcgtttgtaccatgtattttccattgacggctttaaattcattaattttgctttttcaataagttctctattgtttttgaatatcatggtgtctggatcttcgatatgctccataacatgtaataatgtgatacaagcaccacatggtccagctatttcacatgctatttcaagcgccttatccgaaacttctgtgccatcatcggttactatgatattttctatcattatttcgatctctagaccttagatagatgatctaataaatgaatgaatttattttatgatgcgtaactgatttcgcctcgaagtcaattggagatatcaattggtttttccttgaatttaattgctatattattaaccattgtttgataaataatatttagatgatcttgcttttataaacgaatatttcattattctcctcataactactgcagtataatcaaaaactaagatataaaatttttatttaatttaaattttattttaaattttataataaattaattctacattctaaaagtaagaacaaattgtatacaaacgtatataaaatgattatcagaattgtatagcgttggcaaagaaaataaaactcgaagtcatcgtcccaataaataaaaagaacaaaagcaatccacagcccttgataagcggatagtaggattaaagcggaacttgcactattattctgagttactacatctcataccgagacttttcgactatcttgctccctagcccatatatgtttaataaggacattagattagaaatacggaattaatcaaccagcttatgaaatcgggtctcatttcttcattaatcttgtgtcaatatcgatctattaatgatgtttttgattaacctaatgcctagtttgtatttggaatagttaaagttaaataaatctacaaaaatcatgaataacgcaatgtcctctactattcgttcaattatcgtagttgacgataaggtggagcttgccaacttgtttaggacatttttacagaataaaggttataatgcaatctcttttgttgatccagtactggcattagaatactctttttgaaaaggatactatatggttattacctcattaactataataaatgaaatgctttattcacgccaatgaaacagtatttagtatttactttaagaaaaaataatcatatcaaataagtcttgtaattatattaagagagttaacttggctggagggaagtattagaacattgtcgaatagatttaatacaaacggtaacctggatgctcatactaaagataatgataagaataaatctctaaaagcatttgattggataaaagcagcaaaaataattaaagaaaataacattcaaaatgcaagcatagggttagatattactatagaagatactatatccattttagaaaatggaaaaccaataaaaactaaaaactactggtgttataatttcgtccagcagcgattctaatcctgtcctgataaacaatgatagcggtgaaataatgaattgtttgtttaacatcaatgagagatatataggatacaacaatctggaaactccaaggacaacggaagaaacaagattatcggaatggcctaaagtagcactcaatattattaaaggcgcattctattataagaacatccgggagaacaaactttcacagatttatttactaagtccacttttctacttctggaagatattagagtgtggttgtctttgacaattttcaataatcttatgatcaataaaaactcgactatcataatggatctaatgaattaagcctgactggctgtttgattattttttaatgttatctaatagatattattgatcaatgtattagaacctcattactactagtaacttaatcccaaccacggatgagaactgttaccccatcaagcaaattttttcaaaaaggtatatctgcattcctatggaattgcctctcttatagaaaaaggaatatcatcagtatttccttcagatgttatattgatcggattaagtccttgactttctagtaactgtgaaccatttttggaaattacaaagtttacaaaagagattgcaccgtccatatttttcacggtctttggaatggtgattgagaagtcgattgggtcaccgtaaattgttttttgatcggattgaagcgtataatttgcaagtttatatgtatcagaataaatgggatcacccagattgatctctttaggtaaagttatgtatgggagatctctagatatagcctcgtgcttgtatgctacgactgcatccaattgacccgtttccaatactgtctttagaatttcttcaggaaagatctgtcttggatttctatcttctccaaatactctatcctttatagataaatcgttgtaataggtatttgctaattctgctgtaatgattccatagtatccttttggatccaactcaggatctgttctaccaaatttgaaaccatcccaagaaacaacatcataccaagggatttcacccattcttgctctctctagatcaccaaagtgtggactattcggcgaataagcaatcacaatttcagctgatccaaactttaaaagccaatttactatgggaggagtagtgttcattagccttgtcattggtacgctaccagcgctaacaaatacatcaggtgttcttaatccatccttaattaaatttgaaccttgaacagaccctttgccttccccaacgtatggatatctaaattcactttgaaataccggtccaattatatcttcaaatatttttacaagggatccagcatacatcacaaagactttatcttgattatcgccagttacagtttcttttacacttggaaattcacctagcaaatgtaacgaatataatccaatgataacaaagagtatcgagaataaaccattctgcttcttcttgctcgtcattaaatagttaatcacaatattcaatattagaactctgttatcaagtggaacttaatctctacggattggaactgttactaacaattaattaaggtcaatatttgatgagttgatgagttcagtattgattttataataattgaatacttgctctttattgtgatctaaacgacattattccaaaactccagataagaataaaaaattaagaaatgttctaaactaaaaaataaaacagattattgtccgaatggggcttgtaattccgctccaccatacgtacctgctgcattaggatcgacatcatcaactggttcttcagttattataaactcggtataggtataggcatttaccatattatctgaaactttcaagctatttccatctaatgccccaagacttaatttatagttggatccatctgcgtcaaccaaccatgcttcgaaaactttgtcttgttttggtacagcagtcatgtttattgatgtatcaagtgtcttattgttagcttcaatggacagtgtccctatcttttctgtgccaaatccaggtcctggatctttcgctttatttatatccattgtaactggttctgcattgagtgattgataactaatcatcatttaaaaaatagaggcaaagacaattccgtatagtgatatctttgacttcgacatcaaaatattatatttaaaacttatttaagaatttatgtttctggtcacatatatagattctatttattcatataatacataagatgtagaaaaggctaaaagctcaatttctctgttttgtatttaattggatatttatcaataataaccccaagtattgtagttattataatatgttatactatttttcgtatgagttcaaatatcgattggaacgatgtcataaaaaaagatgctgaggtgtttatttgaggatagttgtatttgtattgaatcgtttctctaattctgtagtgaaacttctataggggttggatgtgatattatatcaaatactggtaatcgtttttgcgcaaggtcaaccaattcttttattttctcctcagatgcgtctgattttactttgagtcataaattaaagtcaaatatgttttacataccaccgaagtagatacctatatatagtaacgatcgttcaaaccctttaagtaattccgtgtatgttctgcttggatttttgataaacaaagaaatgagagactacccagtcctgtggttttttattgaaagtctaagatattatctaactatcctgctttgttgattatccttggaagatgggtgagtcagaatacctacaatgtatctgatatttttacctctttcatgatgatgatgacctttgatgatgaaatttctgcatcttgttccagattgtggttcggtttggctgaattcagcacgataatctcttagacattctctgaatgtagccctgaaaggtatttattaattttatatactaagagcctattgctataactattgtttagatctctcttcaagtcgacgtttgtcatcgccttcggtttagttctaattttatcttttagcatattgatttatttatcaacgtcttttaacttgaccttatcaaaatttcctgaagcccttgcccaatctgatattcaaactgtcaaatacagaaatttaacaatagatctcggtaatggagtaactacaaacgctcagataacttacccagcaactggtaaaggaccctttccaggtgtatttcttgtacctggctctggtgcaacagacatgaattctaccctcaataaagatgtaaagccattttgggagattgcaaattacctttcagaaagaggttttgaagtacttcgatatgacaagagaggcgttgggcctaaccttactattgaggactctaacatttggggaaacatgacagtaacagatcttatcaatgatgcagaaaaagccttgaacgttttgagtgagcagccatatgtcgatcccaaaagtatcagtataattggtcatagtgaaggtacaattattgtgccacgagttgcaattgataatcccacagaagtgaagaatatagtattgatgggtgcagtagcccaaaatttaattaaagatatattgtattatcaagttgtagatttacgttctaattacgtaacacaagttttagatacaaaccgtacagggtttgtctcaattgatcaaatggcatcagatccgctattagatgatatagtgaaaaactcgtctctcttagatatagataatactttgaatgctacaacaatcgaggatagtatagaaaacgaatcaggaaatcaaagtaataatagcgggttgctcaatatcaactctcaactcaaacctttactaataaaagaatatgaaaacaaaacagcgttcgatttgtcaaaatgctataaaataattggatgcccactatggattaaatcagaagctaatttagaaccaaatttaagcacaattggaaatatttctagatctatacctattctaatacttcaaggagaaaatgatagcgcaactcctcttgaacaaggtttgttattgcaacaaagactcaatgaagttaatcatcccgatcatactttgatcacttaccccaaccttggacactttttctattcttcatcaaaatggcagaatggattaggccctattaattcccaggtattggcagatctatattcatggctgaattcccattctaaataacaaatatgatcgaattgattattgtgaatcttacgtaactccatacttttttgacaaatattttttgatctttaattaacaacatgaggacaataatgcttgaaaatattttcgtaccgtattacaaacagatcatcaagtagattgatcaatccttggtgattgaactatcttatcttgaattcgggttgcaaaataagtcagatttgttttacataccaccgaacccgcatagtatacaagtctatactagttgctccttattatattcgtcatcagaatatgaattttgccgatattcgtaaatactgagaagagaaacttaataatcatggtagaatgttaattgtttgaatagaaataagagatatgccactccgagacaagaagtccgagatcctgtatggttctgcgaacgcagtagataaaggcgtagaatttatgctaaacacaaaatcgcggatggacatcacctttgatagtaaagcgccttccattgttgtaagaatccctcagtatcgcataggctatattgatatcctaaggagagggggcgcaatcaggtgcattaccgaagtaacaccagataatattggggaatgcaaagaattactcggattagtgactgagttgcgtcacttggacggaatgaaaggtggaattgctattaacgaatctgaatacatggccacgacagttttaaaggaaggtaaacctttgactgaagtaatttacagcaacgcagaggagatggtggctcaagggcaatatatatttgataccatgtggaaaaatgctgtttctgcaactaagaagataagagagattgaagagggtagatctgttgattacaagactcaggtcttgagcaaatctgaagggacgttaaatgaatcagagttgggaaatctcctgtataatgcaaaagagatcgacatggttacatcaacagagggacttgagatgggctatgatttatttcgaaacatgataaagcatgtacgggaaggaaatgagacaagtgatcacaaggacattagagtgttagttgaagtatcgaaagataacttagactttgtgaaaaagtatctcgacttagagataaaagtacggcatctaaagagggaacctccaatatactttgcagttactgattctaatatgatggctaccatcgagcgtatgggaaccgggaatataaccgaaagcattctttatagtaacgatcctatatatataaaacgctttaagttgatgtttgaacggttatggattgatagtaggtcggcagaagaggtagcatctttgattcaaaacgacgaggaggtacccattatagaaacaattgaaagttctgacaaaacaattcgtattattagagagttaatatcatcggctgacacagaaatattgggaatacttccttcctttgaagcgtttaggagacaagttgacgctggaatgtttgaacatataagaaaagtgtcacaagaaaaaaagcttatcatcaagatacttatcaccgacaaaatagagtcatcagacggtaaaaccgacgtacagattggaaaggagaaatatcgtttgttgattagaaaaaaggaatcgaaagatcctcagggtaatgtcaaagtctatgaatttacatcatatggtatcgaaaacatgactgtgaggtcgatatacaataaaagtattaggccacagatgggtatggttgtagtcgataaaagtaaatcaattatggttgaaccaaaagaaagtcaatctgaaaatgctcttgaccatataggcatgtcctcctactcaaacagttctcaaatatcaaagtcatatgctaccatgtttgacaccctttggaactatgcagaaatgtttaatctttttgaaaaatcatacgaacggcttaaggcccaagatagaatgcaaagagaatttgtagacattgttgcccatgaattgcgaaccccgctccagtctattcttggcctcaccgagatagtcaaaggccgtacaaaagaaatagagaatagagagcttctgaagacagttactgaaaacggggcgaggttacatagatttatagaaaatgttctaaccacgaccaaactggagggcttcctgtcaaatgttccaaaagatatcttcgacttgaatatccttattatggatatagttgacaactatcggacaaggtttcagaatataaacatgtcccctgtgcctaacacaaaagatattcattttaattgtcaggggtttggagaagagcacagagtccatgcaaacaaattacaggtttcaatggtgttgtctaacttaataggtaacgctatcaatttcatacctcctaaacagaagggattgatatcaataaccgttaaacagaatggtaatgacgttattgtccgtataaaggataatggtgagggaattcatcctgagatatttcatagactgttcacaaaatttgctacaaaatcgttttatggttcaggacttggactatatacttgtaggaaaattatacatttacatcgaggaggaatatgggctcaaaacaatccttcaaatgagaagggtgctacattcacattcagcctgcctttgattgattcttccaagcatctgaaaaacagtacaactaataaaagtggcctttaatcttacagccaatacaaaacactatatttcctccacaaccaaagtcgatataacataggaactaacccatagtttcaattactcctatcttaaaatggaatgagaaacttgttcagcaaaatttttcaatcttttatcaacactgaactatcagtcaataagaagatgactgattaaagtcctttattttttaccatcaattttgtacgtacgttgtccttgaagttctggaattattaccgagttgccctttcagtttctccatacgatactagtttaacaagtattattttgaaaactattggaataagatatggtcttataatccttaacaattagtaagtttatttaaacggtgattatgagtcagatttgtttcgcataccaccgaacccgtataccataaggagcatacataatcccattgacttcgctatctattatagtaactccttatgatactattaatttagaatacctattaaatttagcatttggcagaccaacataatatggatcaaaattgatttaatctattatattccaaatttccacaaaggatagttcaatcctataaataatatctaaacccgtgtggatatcctcgtgatttttgccaaacccaatactaattatggtaatgattaatatctttatatccgacaaaaacgatataatacagattaataatattcaaaataaatagtggttattttaaggaagtgttcccagaattgagttgcttttgtttaccttttctggtaaccataagagcaactccaattaatatgataatcatggcaataattataattaacgttaccttttcatctagtatcaaccatcccaatataattgcaatgactggacttacatatgcaaaggtgttagctaatgatgcagatgtttttcttagtaaccagtaaaagtcagtaaaccctacaattgtaataataaaaatcaaataaacttgtgcaagaattgactgtactgaaacctgcatcaaatccaaattatgatattcaccaaagcctatgcttacaattgttaacatcaatcctcctgttatcattatcattccagaagatgctagaatacttacaggaagtttagcttttgtagaatatattgaaccgattgcccatgcaatggaactgattataagagctaaagtaccaataggactaagatcacctgtgcctatagatggtgcaactaataacataagaccgccaaaacctgcacccagtcctaccatggttgatttggtaagtttgttttgagttcctttctttaaccatttatacataaaaaatccaattattacaacccaaagagggatagttgaattcaataatcccgtcatacccgaagagaggtactgcgttccccatgttagtaatccttgaccacccaaaaacagagtcaaacccaaaatcaaactatccttccattgagataatgtaatcttttctcttgattttaatttatattctatgactggggttgattggattttcagattttcttgtttaatactatgactatcataggctttattattgtcctttctgaaaacaatatgcttaattttttttctccaaattggtttattgagatgaaagtaatatattgtaaaaagaattgacccggcaataaaaaatctcagccctgcactcatcagaggaggaatggtatcgattgcaactttaatggccaagaaacttgatccgttaataacccataatgctatcaagatcaaccatatagtggattgctgatttacggtcataacacattctgatagaaaatgatgggcgtattaatggtatcggtctttaataatctataagatctcgacctaagatggtattttgttgtttatccgatatgatgacttaaagcgtgctaaccaactacctaatgtatttaaaaaaactagtcataattcaaataaaaaaatgtattctaaaatgattgcttagttgaacctcatcgtcaaactccattccacagtgacgacaatgatgtgaccccaagtactccccatgacttctcttaattacaacaagtttctccttttcagagggatcgataactacaatgtggtcgccaatagctctgtttattaatatttctttaataatatcttgtatttttggtagatagatctctttctcttctagtgtcaaataatatatatcaacgggatttgttatctcaacttcattattattaatatcccaaaactttggtatgatatttgtggtaggcgtattaccatataaattctgaatctcttctttgatatcgtttattagaagcaatttcatatcatgaggaatagaattaatctgcacctttacaaacatattattagttatcaaggatactgctttttaaccaattgtttattccttcagcaaaagatttaaatcaaaaaaaagatgctcttaatatcaaatttttccgcttcatcatttaatatcccattaaaggggggtattcaatcctacacaccaattcaatccaaagctaatcaatacttaaaatacaaaatttctttatcataaacaaataaagtttgatgggtgattatgtcgatatctttcatctttttattaatcagtaattagttaccatatagatatttcttgtcacaaatcttaggatctagaaattatcccacttcaaataatcaacaacaataaatagtatcatttaggcatcaacgataccgatatgttctcgagattagaccaatcaagacaaaaagtattataaaacaataatgatgataacggcagcaacaataacgtcgatagcaaaaaaataccctcataagcggaataaccttgttatttcatttctgggctatgaacataatctacattagaagtcaattataagtcgaggatctcgaaatcctcaagaatattaggtcattcaagaaactgttaaataagtatgcaagtttaattaatagatttacttttatgaaaccatttggatatcctcatgatttccaccgaacccgcatagtatacaggtctatatacaaaatagatcgtttaaaaatatgctattgttaatcagatgcaatcattaatttctttttacgtcgacgcttctctattattacattgaaattttcgttttgcttttcttggtagccttcttcttctctcgttactggcatgttttccttatttttgtgacttttttttattgaaacgcgactgataatattatcagatctcatcggatgctgttgtttagaaacttccttcaaagtatcttttgaataagctggcgaaggagaattgatcacatagtgtttatgtcgcctttctacatctttgttgtctcctttaagaaccctttctatttcttttgctaaagattttttgacaaattctttgagtttatctgtatcagggccttgcggataggtggctaacaaatattcaaaaattttcatgtactcgactactttgttacgatattcttcctcagtaggtttgtgattttttgttatcttaaaccatgtagttgcgcattgagcaggataggcttttgcaagttcctctataatacgctccatttcaaagaaatctagcataaagacaaactcctacatgaaagaataattggaataccttcctttcttctcaactacataattcatgatatcgtactatttatcctcttatcatgcacttgtagtaaatctattaccaaacttactggtccggtctattgatgactgtatgtcttatcataatgagcatgacagagtgaatccattaatctgattactatgtattaaatttagttatatggttttgactaaataggtgattgaatcgagtcaaatttgtttcatatgccaccgaaccagataactgttttagtaactaatatgatataaaacaagaaataaagtaacttaaaattattcaattaattaataaaaatagcgtcactatacatcttgatattacaagaatcatcacattgaatgtatcggatattttgaatgagatagcgactattgtaacagacttgtcactaaaacgacaatcatagaagttagtaaatctaactactttttatgacactaattttaattttccaataattaatgatatattatggacagaaattataaatcaaagggattgaatgataatagaattatgaacttgcaaggtgataatgatggtgggaatgatcgctctaaagtattagatgatttattgaattatgctcttgaaattcaaagatcgaacaatcttgaaaaatatggtggatggcaagaaacaattgaaagagttattgaaaaaacatatggaaatgactcaatagagctaaaacatataaaaagtgcaatgaaacttaattttctaacaactagtggacagtctgaagaacagcgacgtatctattttaataacctgtatgaaaggagatttaacagaatagaacaaataattgacggcttcaaatcagaatcagaatcttaatatggaatagatataaatccaatctcgaaaggtctaagaatatggaaagtatgatcaccccttcggtatatgtctgaaatatagttaaaatcacattgtttacattttatgctacgagtcatcatataataaaagactgtatgaaatattagtttttttcataatgcccctaacagtcatcttacatggtttgcttatggtaattagataaatattcggaatcccattttatcatgaaatctctgatctttacctgatggatcatgacggtctgctacgacccgcttaaacttacttatagtaattcgactcaatcgttgaaaccctataggttattgtgtacatccttttatcaattccatgtgaaaatcctcatgatttccaccgaacacgctaccaatttatagtaacgacattctaatgcattacccactaatattactgaaatggtgctctatgactatattaccaaatatgaatgaagtttagtctattcacatgttaacaattgagcttatctctgataacttttgtatgttccccaccaaatttgtttagaatgtcacaataattgttttcattactctggactagaggagaaacatgatatgtagctgttgcgatactaccacgagatatagaacatgaagcttttatttgtccaaatgttttaacgtcgcaagtattagagcctagatgtggattagaaaatttaaactctactgatccctgaacatctccaaatctaacattggctgtaacactgcccacctcactaccaccaaggaatagatttcctgccgtcacccatttgataatcggtcccacttgtggagcaggagaaacaacaaattttccaagggtcatatgccctcgaacgtcataaaagaagcaacatccactcatagtggcagtggctgtaatccttgcatctgctttttcagttagaataggaaccagaaatatcatcgtccctacaattacagaaagcaccgctaattttgtacggttcttttgcatcatttttgcaaagcacaattcattcatacaattctactttgaaatgtcaatataacaatgactattaattatacctctagatatttctcctatacacttagtgatgatcgaacagactaaattttgatttaggaggattttgttgtttaattaatcatcaatgtttttttatcatatcgtgcaacacagatagatataatcaatattataaacctaagtttcaaattagagtcaaattagtttttcatagctgtgtaaataaataatatagttaattacatcttgacgaaatgttacagaattaaggagaacgacttgtttctaacattcctctttccatcaaattctctcgttctgcaattccaagttctccatatccttctgcaagtttttcattcacatgaactactgcagtattgatattctcatagtcgctgcctactctttctggaagactgtttgcttgttcctgagttgttatgacgctaccaggaggtacaaatttgtcgtctgcaacttctatccctcctgttatagtgcttgcaactccaactgctacatcatttcccagtttagcatcaaataccaaactttccattccaacaaatgtattatttcctacatatgccggtccatgtatcaatacaccatgtgctaagcttacattttcaccaacaaaaacagaatatccgttatcaaatctgctgtcattccctaacaatctttctccagtattagaaaaacgtctttcatctatattcttgccattaaatgtagtttctaagccatgcactacaacaccgtcctgcatgttagaaagtgctccaatatagaggggtgtgccttcatcacctctgcatacagctgtaggtgccaccaaaaccttctcccctatgtaacaatttccgatcactattgcaaacggatgtatgaacgtagattcttccataaatggaaatgatacatttgaattaaaatccgttacaacattttgatgaatatttggccaatcttgattatttaatgtgccttcttcacctatttgttgttgatttaatacactaccttgtgcataactttgaggtagtatggtgatcaaaataaacatacttgtaataaaaggtaaaaaagtccatagttgattctttttggctatcataactattactttagttagtattttatacataatactcattgtaaattgttattacctgtttggtcaaaattattactataataaaattagattcttatactcagacccatgcgaaaatcctcatgatttcgaccgagccctgataccaatacggaactttatccgccgaatgtgctctctgtattagtaactatcaagaaacaaaatatatataataatatgaatttattaaacaattctattagaataatgtttatcgttactttcactatttatatattgcagtgtatgggattagtcgaacagggcccttatatagtccatcatataaaatcgtttattgaataaaataattttcagcatagttgtagtcggaacaacacttctattatttagtattgttactgctcattatatgctaggttcatatgataaagcacaggcatttagggccgaagatggacaaagatcaatgacaattgaaaaagctcctgtatctatctccggagataatgtttatgttgtatggtggacaaacaataccgcaaatggtgatggggaagtcatgtttcgagcatcaaatgactccggcgctacatttggagataaaatcaacttaagcaacaacaccaacaacaattctgtggatgctatgatagattcagacggtgatagtgtagtagttacatggtgggaaagaaatcaaacgtctaacgaacctgtggcaaaaataagtaatgatagcggtgttacatttggacctatactaaaacttgcattaaataatacaattggcatcgcacaacaataggaagtgagttagtataagcaattatctttttactgttttggtagcgcttgtattagcaggagtaatcacatcgataattattgtaaactcattgatgattatctcagtagatgcaaagacttggttaccgtctaattttgatgcgcccatatccctatctggagacaatgtatacatagtgtggtggactaataacacatcaaacaatattagcgaagtaatgtttcgcgcatcaactgatgggggacaatcttttgaggataagataaatctcagtaatactattaatgctaattccgatacaacagagatagattcagacggtgatagtgtagtagttacatggtgggaaagaaatcaaacgtctaacgaacctatggcaaaaataagtaatgatgcaggacatactttcggacctctaatacacctctcgcagaataaaacaattaaaaataacgaagggtagcttttattatttttttgaaactcccaaagagccaataatgcatttaactccattaatcaaaaattgattattgattcaaatatcaaagttctaattagactcatgcggatatgattctcattaaaaacgcactcttatctatgactatctcaaaggtgttactaatataccattaccatcaatattatgattttcgaacgtaactgatttgctctgcaaattgttttagtgtaatgagatttgtattataatcaaaccaaaaaaagatttgtaacatgcaatatggatatatgattctaattttgggttgaaaactagcgttaaatttatttcacataccacggaatcagatatctaatttagtaatttagtaacgatagaagtagtattcataatttaagtattagaagttatgacatatcaataaattttgaatgtttcagcgaacgtcgctcctgcaataatttgagatgacccagaggaatctttcttagcaccaggcttcgaattggccactcggaggcaattcctgaagtgccccagagttgctgtccggatcattaaaatgaactaacttacccaaaattgtcggttcacatcagtaacatccactccgcgctttttaaaatcatcatgagctgcctgagtgtccatgactatcttttgtaaatccttaatgctaccgggtttcatcttgtcggcaatactaatcccgaaacaaattgagcaggcagaacctggagttgtcatttgaacaaaacgtagcctctcgttccaggtgtggtcatggtctaaattaaaagctactttacctttataaaaatcaagagaatcgatatcggcattactttctatggacccgccttttgaaatattttaattttgatctactatttataaaaataattgaagtagcatatgtttgaaatctcaatacatcttattagaaaaaaatagaacaaatacttatccaatatcttactagtcatttggtttcatatctgaccgaggcatctgtagcatatgtaactgaaaatggttcaccagatgttttatgaaaaattagtgcatttcccacaaaatcaaatgaacctatcttattttggttgggttaatctccgtcattcatttattgaagtgcaaatacgatttcctgagatgattgtccatggtatctaacaagagcttttttactttgatgtattttgtaatagcatttctttttgcttatcgttttccattataccattattggttattgcataattgctggatgatacaacagaattgccattatttggttgaattaacagaacggcccaattgttgaaaagagctttgactggatagtacgagactagcatttctgtgcaattaactatttctttaacggtgcctgacttcccattaatggcattttggaatccctgcaaattggcaaatgattcgtttcggttagctgatagtatgtctgagtcagcaaccaccttaccaagattgtcaacatatgctatgcgttcattgttggtcagattcaataattgaaggctctcgttaaattcactcatatccaaaccacccgcccatattcctgctaatgatccatttattcccgaatagatgggcaccgccatcacggcctgattctggccagaggatgcagatactattacattacccaagaaagtatcattattagctatcactcccttgtagtaatctctgaacgcaaaattagatttagagagattctcctgaagagaatatggttcctcaatatatatatcaccatttggcatcaaaaagaacaccacctgaaactcttcatatttttccaaaatgtcttttgctacttgtcttttagggatatccgcgttttgggggagtcctttttgctgtcctatcgtttcgtcaagcttattcacagaggttacatttttaacttctggcaacatacccgtgagttcaagtattgccgcagctttttcaagtcggttctccatatcttgtgctaaaagttttacataattatgagcttgatatgcattgttttcaaaaatagctgtgttattgttattgctgtttccatttatttcagaaggaatctgtccattagaaagtgtttgtgttgctaaagatattgctaaaatgagtaaagtcaaactcgcgattccatagattagatttttagttacaaagtttttgtttcgcatggctaatctcctatacacaaagacgatgtaatagaaaggtctttcttttacataaaagctgatttaatatatatcccatgtaacccataaacgtattgtcattatccgggcagtggcctttctaactataattcaatttcaaaatgttagaaccccagtctgatagatgtagatttgagttccaaacttcgcatatttaatgtgcttaaaatatgtgaattattggagaatgtgattgagagaaaactggataactaatagcgaaaaatttttatctgtttccaccgaatccgttttatattattatagtgttaatttatatgttattttggtaaccggctgatattgttgagaaaaaaattttaccttgccgggttaatttccatacttccggacagagacgtgtaaacactaattgagcaaactaaactttttctatcactgggatcttagttctgtcgatcttataatgtaccaaaaaatatcatacaagggtacatacaatcttgatctgtattttaacaatcgtaatcacaactaacttttaatttttgtaacttaaataataacaattagttgcacaagtgttaaataacaaatggtataagcgggcaatatatatgagtcagactaaaaaaaactattttattgataaacagagcaatgaaggaattgaatataaagggaattatttggaaatatcaaaattcttggcgacagtcatctaaatggtccataaaataaggttctccattaatagttatgacctcctatacattttttccatctcgatttttgtttcgataatgtttgtatttggatcttcaaattatgatacttttgccagtgatcagcattcacctttggatggaatgaacttttcaaggtcacaagatgtttatagtaaagacggcgttttgaaaagtaccatctctgcatcatatcatataggaaaagttgacaaccaatcaattagttctatgctctataatggttctcttggaggaccaactttatacgtgcatcctggcgataagatcgaacttgatttgataaataacctaaatgaatctactaatcttcattttcatggacttcatgtatctcctgtaaataattcggataatgtatttcttgaaattgctcctggtaagacacagcattattcagtcgatattccaaaagatcatcctcctggtaagttctggtaccattcacacatacatcatatttctaatgaacaggttgcctcgggtctgtctggcttgattatcgtggaagggttagaacagttattgccagagccattacagaatatcacaacccagaactttgccttgagagatttcccagatagtagtacaactacgagttcctatcgaaccgtaaacggagacatcaatccaaatatcaatattacgttaggtgatactcaattatggcgttttgcaaacattggttctgaaccatattatgaaattggactacagggctacaaattctatgttatagcagaagatggaagcccggtttgggaggtatgggataatgatactctattgcttccttcaggaaagaggtttgatgtactggtcactgctacagacaacggatctattccattaatggcctctgcgtattatccactccctgagaccaaaattgcgactgtaaaggtacaaggtaaccaaaaagaacctgtaaaagctattccgactagcttaatttcaaaggatgacctaaatcttaagaacattactaattatcgcgtccttaattttacatcgaacgacgaagagtttatttataaaataaataacaagacattcgatgctatcagaatagatcagaaaataaaactgggagatatagagcaatggaagttgataaactatgacgacgatgatcatccctttcacattcatgtgaatgattttgagttaatatcagttaatggaaagccatatgacgctcacggattacaggatacggttataatcccaagtcacggtgaagtagtcattcggatagcattcgaagattttgtgggaaaatccgtatatcattgtcatatcatgttccatggggataatggcatgatgggtacttttgaggtcgtcaaataggtgatataatgtgaacataagtatattgaagagattttacttaaaaaatagctgtacaaatgatatcgcttgtgaaatcgtagaatttcatagacatgaacctctcataggaactgaacttgcataccatacggaacttaattccaccggagcagttaaaaggatttatgaacacccggtgtaaatcatttatcaacgataaattcgagtggaacatcgacaaatcttttagaacttctaatcgcgttgtctaaatcctaatagattctaatatatcaataggatagaataactaacaaattttataattgattctctatccacttacctacctttcatctacttacaggcctatcacttaccaatttatatacttacttttctatagtgactattacaaagtgatttagtgttgacaggaaatcagtgtgattcaaattgcgaagttcaatatggaagagaaggacatgcatcgttgtaccatggacataataagctttcagatagatgtgaatgcaatagttgtggatgtgaaacaacgtatcaagatagtaatgctagttgttcaagttgcaacgttgatccaattgaaggtgcaaaaaaattactggaaagtgcattctttgaagctttaaaagaagttcatgtagagaagataaagaaaataatagaaagagattggggaaataacatagacaaagcagctgaattagtggttaaaacaattgaaaaacaatggcaaacatccttatctacttcatctccaagtaaggaattttatgaagaactaaaaaagataatgacatcaggcaataaataattattaatgatgttcatataataaactaaacataatattttttttgattagagtgactaaatatgtcaaatttgttttatatacccagaacccgcaaaccatacggaacttaatcccaccgaatacgcataatatacaggtctatacctagttatttgctatattatttgttaaaaagtgaagatttcgtctatctgtaaaataataagaggagcctaaatcttgcctgttagacttgatacgaccataaagaatattcaattgttagaaaattataaaaatgcagagttattttaccaattcgatttatatttaagatccaataatggatgtagttcctatgtaactacaaagtagagtataaaaagtaaaaaaagttaaactaaaatagatttatccacatatcgtttctaattattgcatcgttgaattatccatcatacctgtagaattgttcgttcctccagtcatgttgttcgttcctccagtcatgttgttcgttcctccagtcatattgctaattccctcggttatttcttcatgaaacattgcaaaaacaggagatatcatagctcctcccactaatgtcgatgttgctgctattatacttaatattacgaataagtttattttatgcatgcatgattttaattattatgctttataagcttatacaatgctacattatagtaatgcctaactttattcattttaaatgatgttgactaaataactcgtcatattaattgtcataaactattgatttagatataagctgtgatcaaaatcaaagttatcaaattactgttgcagcaatcgtatcctctcctgtaattctgtaatccccaacgacttcgactacagaaccaacaggagaaggatccgcagtcaataaaaaacagttattccgaaattccctacaatgaatacctagttataaggagactcgctgaagtggtttagaatcaatcattcgccgactatatcaaagatgtactggagataagaactcaagcagacttagacgactatgtcactgtataaaaatcatttgagtctgctgagaaattgatggaatgggtttaaggaaaatactgtgggatacagtatgatcatttttaaaacagcaatctactataatttatttgaagaagaggggaatcaaagaggatggagttagagaagaaacactatgaaaatatagaattaggcatagcatttgattatccatcagattgggtcgagataactgatgagagcataaagaattttggtgcagatgtgttgatgcacagcgattcggtaatttttgggtttaaaagagtgaatgtaaaaataaactccgagggtcccattgaaatggctattgaaaaagtattaaaagatgcaatttacttaggagagacaatactcgaagaatcaaagttagataaatatcctattagaagtggccgctctggaactgtaatcgtaaagagattgtacgatgataaaaatatagttatacatgaaagaacgtttatcataaatgacaaaaaagatcgtggttttataaccttatttgaacaggatcaacaaaatactaaaagcatagattctgtgaatcttcagaatcaactggaagaactatttgaatcgtttaggtttttgtagcaatttgctagaaatagttatttgatagattcaaatgagtttgaaaaagatgcagtattcccaaactccaatccatctgatgttcttcaattttatgatataagatattgcattaattgatttatttgttttactagcaaaataattattgatttgggttgattacttgagtcaaatttgtttcacataccaccgaaccagcataacatacggaacttaatcacaccgaactaactacctgcttatagtagctacataattatgtaattgggatatcttgaacactaaattcctagtcttttataaagaaaataaagtcaatcagagtcctcatctctagcaaactttgacctactatatgttgtgtgtttcaacaacgactattttcaggacacctaatcagactattatttcattcttgttgcaaaatggtaaatttcttgatatctctgattggatctgaaagccattcataaaggtcttctagaacctttgattcgattggtcccccagctacagtaatccattgagatgaagggtaaaacaaatgacctaggttcggatatgtaatcaacgtatgatcaggatgtcttacttctgtgagtttctgttgtaaaagtaatgcgtgctgtattggggtttgtgaatcattctttccattcaatatcagaatagaggtgtcggagggaactttacttatgatatccaaattaggtatagcagagtattgtgatttaagccaaattggacatggttttagaccgcacttctcatcttgtgtcataactgatgctaacctgagttggtctattaatctcggtttaagttcatcattaatacttatgaatgtgtcattattcatattatactggggattgagctgtttgactgttccattgatagtagtaatgttttgagtgagagcctgagtgagatttattggaatagagtggaaaatacgatcctctaatgcttcttgcactgatattaatccattatgattatggtctagaactttctgagcatagagtattgggagggtaacggcttgatagtatgcttcttcgtgatagcccagggctactgagcccatcaatactatattatctactatatccggattgttgattgcaagtcttgtgacatacatagtaccctcgctatggccaactagagacatactattagaatcaacctctggttgatgtagaagaacctctagcgctttctctgcatcgttttctagatcgttaacagttatattcccccatacgttgctatccaaaatagtaaaatttgcacctactcccctcttgtcatactgcaagactgcaaaacctctttctgaaagatattgtgctacgtcaaagaatggtctagcagatggatagataagcgagcctgtttcgttatctatacgaacgtagttacctgcagtttcattcatatcaataggtccagagccagatacaagaagaatacctggaaagggaccgtcacctgtggccggaagatttagtctagcatttgtctctaaaccattgcccaaatcaataaccatgtttctatattttgttgtctgtaactctgattgagcatatgctgtgagagttaaaccgcaaaacaaaaaatataaaacaaaaatggaaagaattattgaaatctttaaatacaaagcatttgatcatatgtgttctatgaattaaagattactagttcgtgatgggtagatattgatcgtcctttttttcataaatttaatcattgataaatagccaactactatactgatgaaaaacccatgtggatatcctcatgatttccacctgtgagtattcttgttatgctgattgaataacaaaaaagagtcaaatttgtttcacataccaaagaattcgtttaatagaaaaattttaaaatttatgaaataacacaaaatgtcagcacaaaatatgacggtgattataaagaaaattcagatcaaatcgaaatcagaaaatgacattcttggtattacagataaagtatcacagtttgttaaggagagcaaaatagaaaatggggctgttatagtttttgttgtcggctccaccgcagcaatcacaacgatagagtacgaaccaggattacgaaaggactttccagaaatgttgtcaagactggcgcctagagagattgaatacgctcatgataatacatggcatgatggaaatggacactcccatgttagggcctctttgattggaccaagcttggtcattccaatcttagaaggtcatctaacgcttggcacctggcaacagatagtgttagtagagatggatacaagaccgagggaacgcaaaatcatattacaagtgatgggtgaataaacatatgccacaattagatgtaataataactctccgctgtatgactgatcgtattttattgtaggatagtatccgcattcatcctctcgattctacatttttagtttgatactgcgtctcttctaatgtcgcacatctagtacaatcctatccaaataccttacgaatcataatccctaagattagttatcaaacccatgtgaaaattcacacgatttccaccgagccagataccatttatagtaacaaataatatatttagtaaacctaaaaaacttcagaacctaaattaatatattttgctatctgctgctgggactactagtaagtgagttgtcgatgcaatgactaaaacaagttgtaaagactatcgagaaattatggattatcatagcatattgcataagcctggacagttaaagctgaatccgaatttgaactagtagtaattgtgactgtaaatgtgctaagagaatctggaactgcagagaaagaagttacatttccattagtaatttcataaataggtcctcctcctaggattaaatcattggcgtgacatgatgcagtagaggaataagggttaccgccagctttatcaattggtccgtgaattatgtaggtttttccatctaatgatgatgaatcagttgatgatgaatcagttgatgatgaatcagttgatgatgaatcagttgatgatgaatcagttgatgatgaatcagttgatgatgaatccgcaactattacattattagtattatctgtcgaactgaccgagtccttattatttgttggacaacctgcaccaccaataccattaggacctgtagaacaacctgcaccagctttgcctcgggtgatggtattatctgtcgaactgaccgagtccttattatttgttggacaacctgcaccaccaataccattaggacctgtagaacaacctgcactaccttggcctaattggcctccagcactaccttggcctaattggcctccagcactaccttggcctaattggcctccagcactaccttggcctaattggcctccagcactaccttggcctaattggcctccagcactaccttggcctaattggcctccagcactaccttggcctaattggcctccagcactaccttggcctaattggcctccagcactaccttgaccctcattcccaaaatgtagaccatttctttgggaaaaagcgaaatcaaaatgactaaaactaatcgggatggttaaaattataaccattaatccctgtattaataatatattttttaggtatgacatggagttaaaaattgaagatggtaatatagattttgttttatttacagttttatttctttgatatattctcaataattttagattcatgtggatatcctcatggctctcaccgaacctttaaacaatagggacctttatctcatatgactcgatacctgttttactaatattgagtgataataatgggtcaaatttgtttcacataccgctgaacccgctacctgttttagattcataacttgcaatgatataaaatgcaggacatcaggtcaagtgacgatatcctgagtaaatcgctaatatattgcagatttttgtgtccataatgggtcaacttaactttaatctttttattatagtcctcttaatagcaaatgctttgtctttaaaagtaatatcactaatgttgagttgatatattttaaaacatctgaacccttataccatacggaacttaatccccccgaattctctaccaattttagtaacgaattcaaccttctctatttttataccttgggcaacagcatggtagattagtgttgtagtaatacaaccgtttaatgctgcaagagcgtattctactggattggcacgtgatcttttcctgataatactggtggtttgtccttttcaaatacaaaaggctgacttcgagtatggatttgacatgccccatcaaagccgttaattgtagtttgattatgtcctccatcgatccatctacctttagcacggaaattgaattttgagacatcgagtgtctataatttgcgtccatggctccaaaaaggtttatgacacttttagaaaatgtctatttttttgttcagttactctgtataaatgtcttcaccatcattacctttttacttaaataggatatgcttgttcaccagaatgtgaacacaatttcaaagttcattccaacgatgtcactgttcttgttgacagcagtattgctaggtatatggccttctgccaatccgatatatgcacagaataacaaccaaacaacaacaacagcagctattgaccagctggcatcaaatctaactcaggcaaactcagaactaccaataaaaccgcagcttaaagtagaaattctagtaccaattttttacaacaatggtacgaatgtagaagctgaaaaacatagaataatgtttgaagaattagttaagcaatttggtgcagttagctctgaagacaataatataataaatggttactggattaatccacaagataataaatcctatgctgataaaaacaaagtgtactggataatagtgcccgacacagaagaaaatagacagtactttgtcaattttcaagacaaactagagtcactgttcgatcaagaatcaatcttaatttattttactccggtactgaatttattatcttagtgatgatgaggaaagtaaggaaccagaggatgatcaatcagagcataatgaatgtggaaagtgggccaatttgtaatccaaatctatttaaatcaccatatttcacagaacctatttgaataggataataaagtcgtcattacttctatctttgttgatcatctccactgtgggggttttgtcccattctggcacagatttattagcacagacttctgtcactacaacttgtgatcctaacgctcaaacacttaagaaagataacacaggtgatattgttgttacactacaaaatctattagtagaaaaagggtatatggatagagatcatgtagatggagattttggacccggtacagatgcagctgtcaaacaatttcaaacagataatagtttgactgcagatggaatcgttggtcctactacatggcaagtattatgttcgaccgcagtactaccttctgatgaaacaccaggaatgatgagctgtcctgatggtagtgaaggtacttcatgtccggcagaaacttctccgactcctcaaccaagtgttaacaaacagattaccccacctttggatgcaaccgattcaatttatagcgctaataaaactatgttcttgggttcaaaaaatatatcattaactccttatctagtgacagaggaacgttcctctgatcacggaatcctaaaaggtgtagggaatgttactaacaatcaaacttatataagcactcatttatctgatgaattaatccagagtacaggtaatgggacattagagactcaagatggagaaagtattgcttggattacttctgctataggaagaccggctgatgatggtagttgggttttccatgaaataatattattcaacaatacacaaagcaaatcattggctctactaaataatagcataggtttagtcaagtctactgttggcaatgaaccggattacatgtggcttttagagtagagatctttttcgatgtctagcttgaaagtatgcttatagagtataaacgaacccggttacctatataaccaaacctccccgggtccatttcgttgatactcatgttcataacgaaaacgattcaatagctaaatcttgacttaatcttattttttggattcaaatagagtgaatgattaagtcaaatttgtttcacatgccaccaaacccgcttagaaatactcactaatatagttgatataccgtatggattcgagccccaaacttagtctgctctattttcacatattttgaatatttcgttagataaaagataaaatttgaagaaaattctatttactcaaattccatttttgaattcagctatatagctccttatttagtatgctagcagcttgagatgtggcttcctctgcagctggagtatcagcaatgacatttagcatcataaagtcatggattgttccaagatatctagctgatgctacaggtactcctgcttccataagcttgtgagcataggcttcaccttcatcgcgcaatacatcattttcgtctataattactagtgtgagtggtaaaccttgtaattgctcgatggatgcttgcaatggagaaactagtggatcttgtatgttagtattctgattgtcaacataattattccagaaccttttcatagcatcacgagttagaaaataaccattttggaattgttcataggaggttgtattaaagttgtagtcagtaactggatagaacaatgcttgaaatgatatcatgggaccacctttttcttttgctagcattgctatggcggtagccatgttaccaccagcgctatcttctgcaacttctagtcgagacgaattaacattaatagattgaccattttcagcaacccatttagttgctgcatatgcttcttcaagagcctgaggatactttgcttcagatgataaagtatagtttacatatacaatagaaacattagcagcattagctaactcttttatcaatctttcgtgagtatcaaaacctccaagcacccatccaccgccatgaaaatacataacaacaggtaaaacttgattttcactaatacctgcaggacgaacaatttgaatcgttattgtttcattatttggacctacagggattgtttgatttggtacttcggtttcaggtatgtctacaggaaatgaagattgaagtccagataatgccatcctagcttcgttaggtgataaagagtttattgggggattattttttgactttgtcaagcaaaaacgattttgtactttgttctaatccagtataatttacagggttagtcgaattaactgtatatacttttggagtcaaattatttgataaaaagctgaaatcgttgaagaaggaggaagagtaagatattccattagatttccaaacactagaagggatatcgtaaataagaaggttgtatacaaaatagatattctatatgttttataattatttttatgaatcatagttgtttattgtatcatatcttaaaaaccctcagtttcaatggctttcagaaatttttctttctagcaattagatatcatacaaagatatgttctactttcatgataaaacatcaagaaatccttggctagatcaaattcttaaatacaatagattagatgactattatgaatctgtagattgttttttcatgtttgttaattatatagtatcagccttttagcttcgacgtttcctttttttaattcatttcttaatgcatgttttattatccattgtgtattagtattttgagaatttgaccatttttttaataccttaaatccaatactataattatcttttaaaatatcattgaggttatttgctactgatttttttacaaataatgattcatcctgtcttaaattctcaagtataggtaggattggttttggatctctaataaattggtcgagctttcttgcccaagggagccttggtcttatcccttcagaggaaagccttcttacatgaacgtttttactttgtgaccattctagcattaaagatatcattctatctggaaacctgataagaaaaggacgtaccgcatattcaccagtacttcgctgtgttatttggtaaattgcattagttgatgtctcaaaatcatcaataccgtacttttctacgaaaaatgctattggcataagccagtagccgtctctaaacatccccgtctcattttgattgggtggtccaagtatgttcatcataatatttacggattctttgtagtctttaggaagaaattcatagagtgagtctgtaattacctcgacacgagcctttagttccagatttttcgtatccttatctactctctcgataaacttttgtttttgaaattttggaaatatattgtaaattttgtctgcaagtagttttgcaagatccctaccataataagattttaatttagtatattctgtcatttatgttcacctttctagtcaaactccaattttctactactgacaacttagcgcctcctacattccaatatagttctgtaaatgaaagtgaagacaaggcgacttgggaaatggatgaagatagtacgataattgagactaataagcttcctgaggttattaatcttaaattatgattagacaatcgacaatcaaatcattttccagctcgccaataaaatactttttatcgattgtgatgaagtcaaaaacagccgtatagtatattgatgtatattatgaattcgattttgtttgttgcttatattataggaatattttcgctattgttaagaattttaactaatatttagattatttgagttctatttatagtaacgatattatgaaatagtgatataagggaaataatattgaagtggcttgtatccttcgtacatatgataaactttagcaattatttgccagttaccgttgattttgatcagtgtatgaaagtcaatgtagttagcgccaatcgcgtctttctccatatcaacgcggaccaccgcagttgtcggatttattgtcacaacgtctagatgtgtcttgatgtcgggcgctgtaccgttcttctcaacaaaatcatagagattatcaattggacctcctgacaacctgccattagtgtaactatacataatggcatccttgtggaatgcgtcggaaatagtagctacactacctattcgtagcccttaaacatatttcttcacggtctcaaccacgtcttcatagtcctttgtagccataattttgatatttgttgacatttgttttccatttcattgttatcaagactgtcctaaaagtaaacttatccgaacccttataccatgaggaacttactcccacaaaactcgatggcacaactctcatagtatacataacaaaaaagtattaataatttcttatattcaagaaaaccctgacaaaaaattcttcagacatgattctaatacctttaagaaaaaagaaaattgtgaaattgaataatttattacctttgaatgtctactcaagatcaaacaaagaatattatttcaaaagattagacctttttccattattctggcattacatgtgaagatttctatgacaaggctgcaatcatttaacatccgtaagaataatcctcaatgaactttaaagttcaagcgtaacctcattaaacatcaaaaacaaaaagcagtcaacaataaaatcaaatgggacattactaaaaacattagaaaaccaacgtcatatagtcaaagcgattgatatactcatttgatataaaaagatgaaagacaacctagaggaaaaacaagtccatgaatatgttatgatactcaaggagcagatcgatcaactgagtatctttgtcctttttgcaagaatatttgacactattatgtatagaatccatcctatgattgtagttgcaatggaaactcgaaatgaatcaagctgaatgaattgaaagaacaggtacgtggtagtaaacttcgttactagatatgctacttcagataaccctaatgtggttagaaactttaccgaatcttgtcttaatctttcattctttattattttatccttataaagaagaacaatgaaagtcgaattgaaaacaataaaatctgcaatcaaagatacagaagatattaagagatagttttcattaaagagagaagcagataaagttactattgctatgtcagctattgcagttattattgcagatattagtagattcgtgttataatgaattacgtttctatttttgtcataaaaatttttgatgaggcaagatagactcatcactgtatattagtatgcgaattacttaaatacgattattggaagattctcaaaaaatagagtgacaatctctaaatatataatgtttttccgatgtatgactaaattttaagtctgtaatgggtcgaaattaagagattagatgtgttttcaaattacctgcaagaggattcaaacggtttatctatctcctttttattctattgcgttggaatcccttgttttaaacacaaaggctacaaacctccttcctgcgcttaatacatgatttttagcatattttcatggaaaaatatccatctatatagtatatgtcaatcaaaaaattgtagtagctgctaatttgtcagacccgagttggaaaatattgagaaaagtagtaaaaaaagaaggatgcaatattttcattttatatcatatttcagattttgacatcgtgtggatatcttcattatttccacctaaccctcataccctacgaacttaatcccgcccatatagctatatattgtagtaacgatataggaaggcataagatgtagaataattcttaattttcatctttttaaaaacaaatctttttctgttttcatcttcacaattgagatcgtagaaatatgaccattgcctattttgagagtaaaatttagataaacgatcttttggtatctgtttatattatgatatattcttttttgcgcatgaatcacagtatttttctataatggtggctccttctacactgaatattgcttcctgagtagccgtgttaccgcaaattacacagggttttgtctttccgccaacatcaacaaatgcccttaccgacgaaaaattcttatgaagagagtgtagtgacatcatttgaggattagaatttttttcgcttgtcatatcatatatatacatttcgtatctattaagtatgtcatgatgcatatcgttgacagattgctctaatcgttactataaatcgaaatatagagatttcatttcgttttataatgataatacacgcagatattaaccaagataatgaaatggaaatcctattttctttggacatctatttataaatacctagtcaattaaataagatgtacctattagaatcaacgaagtaacacatagatgacgttataaaacttgttgcattatatattacatgagagcacatcatgacatttatattctaaagcgagaaaatgacgatagaaaaacataaggataaggccgttcctcaattaaatagaaagggaaaatatgcgacttccactgaaaatcgtagattaatgtgggaatatattatctggcccttagttttagaacttaataggaattattttacaccagaggaatatcataaaatgagaaataaagtttcaatagaaaagaatatcccaatttcaaaaatgtctggggggctggtatcactattgcttaaaggaattctcactcaagataataaatattattcaattcattacaaattaattccttatatgagaaaaaatgcccacttagattacgaaactgtcctaagggaagtaagatcaaaaaaataaatgaattatccaaaaagtagcgtcattgatccttcaacttcaattgtatattttatattatttttgctcatattcgcttgttatcgttttccctatttggtgtaatttcgacactgagaaagcaaaggttatctccatagctgcataatattttaccaagtccatctattgatcatttgggtaaatgacgcattaattcacttttaatttcaaaaaaatttttctaacctattttggacttaagtagatatactcatgatttccacaaaccagaaaccaatgtatagtaactattgcattatgttttggtgacaataaaattgagaatgtttatactctgaattatgctatgaatctatctctaactattaatatagttactggctattattgatgaggaatttctatttcatttttcctacaagtctcaaacattcttttaatatcatccctctttccttccggaacttcataatatactactatttgtaaagcgttattaggcaaattgtgtgattgagagccatgagtttttcctttaaattcctttattagatcagtcaacagctcatattgttttgtaaccgtatctaccgatccttgaagtatttccacagagttatccattggttgtttgttgtttgagttaagccatgattttttataattgtaattgttcttactgctataattattatgtggattatttttgtaatatgtgggctttgatgacgtattattattaattgctgttacatctactgaattattactattgattgatctgtttggacaaaaatgtttcttctttgtgagaacctctgaatattcgctatttagggtattccagtaaattttggtgttgcaaccatacacacagtattttgaattaatgttggagacgtctaaagtactcatctttattatatacttttgactgtatataactatacacattaatacactgcgtaagataagctaataattagtatcatataaaagttcaagccaatcttagattcattaaaagttccattttccgaatggacaactctattgacagtttagagatgatcatccatatttaatcaatattaaggatatttgagttaagccatttaaaactctattatttcaagcatgtggatgtcctcaaagaataaaaattatcttcgatcctctatggtcaattaagcagttcacaggagaggtaattttaactcagatttgtttcacatatccacaaacacggtaagcattttagtaactatataaatatataaaaattatgacaaataattaatataattgaaatagcggtgatttatgattgattagatataaatcttaattatatatcagcattttttaatcatatcaccaattgtagtcttgtcttgtcaatttcagtcattaaaaaccgtttgataccgatgtttatatagtataatatctaatagatactatgtcaaagaaagcagaaacaagagaaaatcattcaagttacaccaatgaacataacattaacaattacaataacaataatatcgatttccaagaatccattaaccaatcatttgatgaaaccaaagataatattaaaaaatcaatagatgaatcaagaaaccaaattccaagaattaatagtattgtaaatagttatcaagaacaatcactacaaactgcaaaagagatatcagaagaatatatagattctcaaaaagaagtcgtcaattcactccaatcagcatggaggccatacaatgaagcctttaatggattagttaccaacttctattctcctgatgcagcagttaaagcatattcaacatttgttagtactgttgcagacaataccgtatcagctattagactttcaaacaacgttattttctcaacccttgatgcatggaaaccagtactacaacaaacaaaagattttgcaagacacatatcaaacacaggagtaaacgccgcaagaacgtttgagcaaaattcaagacaaatagcagcagatgttaaagatgtaacagccgattcaaacgtaaacgcatctaccagtactaccacaaagtccacaagtcattaacaacgaaataagaaaaatcaaatactaaaataacatttagcccattgatttttccttttagagttaaacaaactcaaatttttaaattcatcaatactaaaattacatttactcatctgaccattgtctttatactcatataaggaagtatgattcaaaaaaaaataaacccatttcaaggcattactcatgtagatatcctcatgatttccacaaaccagcaaccaatgtatagtaacgatataggaaggcataagatgtagaataattcttaattttcatctttttaaaaacaaatctttttctgttttcatcttcacaattgagatcgtagaaatatgaccattgcctattttgagagtaaaatttagataaacgatcttttggtatctgtttatattatgatatattcttttttgcgcatgaatcacagtatttttctataatggtggctccttctacactgaatattgcttcctgagtagccgtgttaccgcaaattacacagggttttgtctttccgccaacatcaacaaatgcccttaccgacgaaaatttcttttccattctatgtcttcactttattattattattcaattgcacttatagtatgtgtttgctagatgtgagccaaatttatataaaagactattaaccaaatgaatgttttatactcattggtgaattaaatttattttccatgctgtagttgtttatataaaagctgaggacaagttaattagagcgtccaaagaatttaggaaatctattcctagactttgcaaaggttctgtaatttaccaaattatcatttgatctatttcatacacttttgaattgaatccctaatggcgcgcattaaaataagaacgcatattcatgatagttaataatggtcgaaacatccacccctataccaccaggaacttaatcccactgaattaacaaagcacgtatcaatacaattttatgaaagatttattttgtaaaaaagtcaataggacaatagatgcaaaattcggcgtgtgctcaatgtaagtgctctcccgaaatctgttcaagagtaataataaagtgcaaaaactgcgtagtaaaaaactgttgctgtatacctatacacaaaagccaattcaaaatcttaaattttagttgtatcccacaaatatttcaaaacataaaaaaggtgtttatagccgcattgggaattgaaattttatgcataatttcagcagaaataggagaaaatattgggctgtctgtttttggttttaacttactgggtattgtcattgcatacttcttagggtttgcaatagctggtttttccacttttatgactattttgggaagatgggactttgatgatgatggtaacataaagaaagcacaaagttgttgtacttttcttaaagggaattccaataaaggatttctatttaattttaaatttacattcttaagttttgggaaaggattagcacagtttatacagcatcgaaataatcctcaaatgaaatccattcttaaaactagtattataattttaattacagcagaaagtgcatgtatattgactgcagaaacagtgacattgatattctatcagtattccatgttcttggctatcccattggctttgctagttggaacatttacattaactctagtagaatctataagaaaaaatagtaccactgatcctgattgtgggtgtgaaaattttgacaatcaagatatttcatcctcctcatcctcctcatcctcattcacacgatccaaatttctatcgccatccgaatttaggagattgaagaaggaaccttagtggttcttccatcagtgctctttgtgtcagataaagaattatccatttcccggtttttttgggaagtagtattttcaaatcaatctttaaatagttatcttatgaccgtattaactcttgaggaaaattaagaatggttggtaacaaggataatgatggtcggactgaaaaaccgattaaactaggtttacgacccaatcttaatcagttcttaatccttgttttagttaacgcgttcgtaggttcgatgataggattggagcaaactgtagtcccacttatcgggactaacgaattcggtattcaatcgaatgtactggtggtatcctttattgcaagctttggattaataaaagcaattctaaatctttttgctggtaaaatatcagacaaatggggtagaaaaaatatattaattttgggatggttgtttggaataccggttcctatcatattgcttttagcaccagactggaactgggtaataattgccaatatatttcttggaattaaccaaggactggcatggtctatgactgtcaacatgaagattgatcttgtcggaaaagaaaaaagagggtttgcattaggatttaatgaattttctggatactttgctgtagctgttgttggttttgtaacaggttatttagcagccatatatgggctaaaaccatatccattttatcttggggttatatttgctactgcaggatttttgatatcatggctaattgttaaggatacaaaaaagtttactctcttggaaatagaaactcatgattctcttgtctcagaaaataaagacaaggatgcaactaaaggggatttgagttttagtcatgtatttattcaaacatcttggaggaaccgctccttgctggccattagtcaagcaggattagttaataatttgatatttggtgtttcatgggggttgttcaccatttatttttcatcttttgccttaaatacaaatgatattggccttttgaaagcactacatcctggaatatggggaattttacaacttgttacaggttcactaagcgataaagtaggaagaaaaattttcatctttcctggcatgtttatacaatcgataggaatctggataattttatattctcaagcatttcctggctggataactggaatgtctctattaggtgttggaaccgcgatggtataccctagcttacttgcagcaattagtgatattgcacatccaagctggcgggcaacatcgctgggagtatatagattttggagagatatagggtttgtatttggtgcgcttggaataggatttatctcggatttatttaatacgtttattgcaattcaagtagtcgcatggattggattggcttctggtattatagttatttttctgatgaaagaaaccaaaaataggtattaactgacttctagatggtaacttctcatccaaatgcaattttaaatattaatgaatcaactaatgatagtatgacagttgaaaataatgacagtaatgataataacaagaataataatttacgaattacatcagatgagctaaagaaaaaaatagacaagggagaagacatttttatacttgacgtacgaaatcaacacgaacatgatgcatggagtgtatcttatgacagatatcaaaatacaccgttaattccagttgatacaataacttcaagttcagctcttaaacagattccaaaagataaggaaatcattacattttgtactcatggacaaaggtcatcaaatgctgcgaaaatgctttccgaattagggtataaggttaagaccattgaaggggggttggatggttggagcactatatatgatactgcaattgtagataccgattcagacattttgaaaatttggcaaataagacgtgtgtcaaaggggtgtatgagttatgtagttgcatcattaaaagacaagaaagcaacaattatcgacgctacttgtaaaatcgacacggtcctcaaagacatactacaagaaaatagattaaaaataactagagttattgatactcacctacatgccgaccatttgtcaggttcaacaagaattgctagtaaatatggagccaagatttcgattagttcacttgaaaaatatgataccaaaaacctggactctgaaaagaacttcaaacccacgctaatttataatggagataaattagaaattggggatggaatttacttagaagctatacatacccctggtcatacagatggtagtatatcttttagactggaaattagaaagacgagtaaattggaaacagaaaatggtataagtaaatcaaaatactttatttttactggggatacaatatttgtaaatggagttggaaggcctgatctccataaaaagtcagaagagtacgcccagaaactttatcagacctatcagcaaaagttattcaatttacctgataatactgtaatacttccatctcactatagttcaacctttaaacatgcaaaaccagtttttgatacaattgaatctatcagacacaaactaaattctattaccctatccgaaaaagattttctaaattatattacttcaaatattccgccccagccaatgaattatgaacaaattgtatccataaataagaatttgacccattgcgatagggtagagcaacaggatttagaatcgggtcctaattcctgtggtatcagtgcatagaaggatagataccatctcatgactttgataatttggctaaccatataactactcaaccaaagaaaaaccttttatcaaacccatgtggaggtcctcatgattgccaccgaaactcttactctgtgtggtaaccttatttaaccactattaatattcatacatacttctcacaattttagtaataattatgttaagatcagtagaatttatagaacaactatcaatctgcatacagtaatttatccaaccgcagatttaattgaatatttaaattggaatatttaaacagccagagtttactttggtgagtacaattttgagatgtgacagtagattgttcatatactaaacagcttgtagtataatttctgaggtgaaagatatgaatctagaaggtgataaaatagcgatgtttttcctagtacgatccgacataaaaatgagtaagggacaaattgcaagtagagtagcagatgttactcaatatgtaatagaggaatgcatacagagaaaatacattacatatacaacatggaagaaatttcatgcttctcaaaaaattgtcttaaaagtaaactccatgagagaattttatgaattgcattcaaaattgatggatttatctcgcgtactaagttttcctatcaagattgtaaaagaagatcaaaaaataagggtagctgaaaatgtacccacagtcttagcatttgggccgataaaaagaaaccaggttgaacacatagttgctgatttaaagctattataaatggctgcgaaaaagctaacatttaatatttttcattacaaatatgatcatgggctctgttttcgaacctaagaatttgtcaaagaaacatcggaagaagatttctcatgattcggtaaaagatatacttccagatacgcctgaaaacttggaagaaaaataaactataaaattaattcttactggttgtcaaatccgacatatcatttattttttatatataaagaaaagaaaatatcttgtctatcttaaggtctatctaaaaaaaacaaagtttccttaattatcatatatttaagtcaaaatataaagtcaatttgtttcacatgaccacgaaccagcttatttatgtacactagtatggtaaagcctttggtctaaaaaatatgaagaattttctcataaatgataaacttctttataatatttcttttataaagatatttttaaaataaaccgttgatttgtcatcatgattttgcaatcctatatatccttctttatttcgaattccttgaaaaccatctatcactttttcatcatttatgataactgtatatttttgaccttttactgaaacataaagactattccaatatccagcaggctttgatgcgactttagatggacccataaaaccatagattgcaccagtcatgtgaattgattctttgttaggcaaggccagatcatcaatctgtatctcgtacccattactgactgcatgccaaggatcaccttgaggatttgaaaatcttacgaatatccctgagttatcttcaatgtgagtaactctccattcaagcatgagaataaagtctttgaacttctttttgtaatgccatagcaatcccattcctcctcgggtcttaagcaagggatgttgttttttgtcatctccatcttcaaatattattgtaaagctaaccattcccgatcattttccaaccatctaagttaccattaaatagtttgataaaatctatattcctttcctctttacagtctatttttttactctccaaagataatgcatggagcaaacccgacttaaaattgttcaaaatctgtcatgtgtccattttatttttctattggaaagttttggttggcatttgcgccttttatcatttaaaattcaaacataattatctatgttccattcatatggcccaaattaaaataacttgatatttttactattaattctcataattaatcattttagacttattcaagtcctttacactcaaatacagaagttaaaatcaaaaagccgtgtatttcgctaaatttgatattgtcaaattctaaactcgcatgattatcatactcatccctcagaacccttataccatacggaactacaatgctatggaatgagataccttttatagtaacgatgtgctataacattttcatatcaaaagactaaatcacaattctgaaaatattaaatttcaatcattagtaaaatatttgaacggtctgatataacgatacttttctatgaacacattcttctattttgtttgagaaataaaaaaattatgtgttgaacataaagctctttattatttgttgaactacaggtaatgtttctggaacttttgatttaggtgtagtgaaatgtaattgatattgattatctccatgaatcacaaatgtttccatatcaaatgttccaagaccatggataaaatatgttaattctttggcaggtaaaccatccaccgttgttgcttcgtttttaagaatttcaacattaaggttgccatagaatgatactggatcttgtagaaatgcaatttcctttgcaacaattttgtctaaactatcgggtgatactgtttgtgttgttttatctaatgatatgcttacccgaagcggagaaatattaaggtaagtaatatttagagggcttgtttcacctatcggcttgaaaactataaccgtatcagaaccataatacggaaaggttgaattttttggagcaatctcccaggttgagggataatctactttaaattctggattgtcaaatgtttgtaaggtcgtatcttgagcatatacatttgtcatttcaataatagaagtaattaatactgctgtgagtatacagatacttaatttttttaattgactaaacgtgttgattatgatatcatatctttataacattatataaaatatatataaattgattttaaaaatttctatttcttctttaaagattctcttaattcttgtatttgttgctgggcttgctactatgtgtttagaattctcaattagtagattactagttccaatatttggagactctatctatacttgggggagtttgatcggcgtggttttggtaggactgagtggtggatatcaattaggagggcaaatcgcagataaacttcccacatttgaaaaatttggatcaattttattttctgctggattgtatattctcttcataccttctatttctccaccgatcgttgatttcaccacggagataactggagtatatttaggaaacataaatcaaaactatgctaataatctcaattctctgctttcaacattttctttaataatatttcccaccctgttattggggatgatttctccttatgcaataaaattggcagccaaatcaatggataacttgggaaatatttctggtaacttgtattctgtagcgacaattggtagcattgttggaacttttttgaccgtttttgtccttattcctttcattgagattaatgatattttatatggcatgggagctttattgttactatcttctctattttatttgagaaaaatagcaaaagtattgattctgattttgattgttattgtacttgtctctgtattttttgacaattttcctttattttctctagattttagaagtttgcattttcatccaggtacccttgtttatcaaaccgaaacgttgtacagccatctagatgtagtagataactacgattcgcccaataacagggcattattcttaaacggatttccacatagcataatggacaaatcagatcccaactctctagtaagtgattatacaagattttttcctattgggttattacttaatgataacgccaccaacatattgttcataggtggcggaggattttcggggcccaagtactttttggacaattatccaaatctttcagtggatgtcgttgagattgatccaaaagtggtagacgtcgcaagggagtatttcttattgaatgattctaatcctaaattgaacatctatactcaagatgcaagggattatcttgaacattaccagggaaaatatgatgttataatcttggatgctttttcaaaaacctatgttccatttcatctcatgacactagagttttatgatttactttatactaaactgagcgatgatggacttgtagtggctaatcacataggatctcctgatgaagataaacctgaatccgacttatatagggctaatctaaagacattcctggatgtttttcctaaagtgtttgtatttatgaccgattattcgaaagacatccagaatcttattttaacttccgtaaagactctaccaatctcctcaacaaataaaacagatgacagtacgttgtcagaacttcagaaatcaaagccatatatactccaagaagttaattattcggattacctactaaaaacagataatttacgattaagtgacgttccaattttaactgatcaatacgctccagttgaaagtttacttgatccgatgtctggcaactattacgacagggatgtacaaaataatagccaggttggtacacttggtgaatccggcccagagcaatatactagtatacctttttcaaccttagctatgttgataattgctcttttctggattacactgcagaaacctatttggactagtaaaaagtaatgatataaaatgctttatcatctgactcaacctattaaactgagattgatcataatagagagatttgcgattaattgttgggccttcttacaaccgatcattagttcgacttagtgaagtctttaccaaacccatgtaggtatactcatgatttccacagaataatatacctttgctagtaacaactttaatatactcgtaaaaattatagttccaaaaatattattaaaatcaatattattgcaaatgttaagatctgtgacttaactagcatttagattcttgtcataaagatcttgaatttataatacttataaaatacaatgaattaattacctgaaacttaagatgactttcactttttatctttcttctgatccatagttagttaccacctagatatttcttgtcacaaaatcatggtatctatcaataatatcacttcaaaaaattcaaaaaatattgagaagaatcatttaggctacaacgatgcctctatgttatcaggatccaactactaaagattatcaaagagttagataatcagaataataataactgtggcaatgataatatcgataacaaaaaaataccgcataaaccgcataaacatgttaattcatttctgggctataaacataattcacaataggaatcaatcactacattgactttccaaaatcccatgcagagaaaaatttgggcgtaatttcaataacaacctgtataccttttttagcattttccagaagcatttgggcgagaggattatccaaagttcctaaatacttaactattattttctctataatcggtctattccaatcaatattttcggatatttttgctatacctcttccttttacccccttataaggaagattctcatcatcaatagagaagtaaatcttgtcggaatttttggataaattatgagcctttcttgtagttttttgagttgagatataaattttgcctgattctttatcatataaaaaccagagtggttgaatagacggatatccctcttcgtcgattgtagccagttgcaagttaagtttagtttctaaaaaactattgacttcttcctcagtgacctcatttggcatacccggtaaagactgaattaatttcaatgtataatcgaatattctatttgatataagttttcgtgagaatatgtttggaacctggttattatcgtgttactaattttctaaagttctccttgtcctttccgattcgttcattaaatgtcatttttgtatatccgtgagcctctataccgttgtctttttgcattctctaaagttcttgctcagtttcaccatacattgtatgagtgcaaacaggatcacctgcatctttacagttaaaacttaatgtcatatttactgagtattttacattaaattaaagatacctattagtttcctatagaaaaaagaaaagaaccatctatctcgcagagttcatgtttaattgccttttgaagtccatgcgtatttattttgagtataacctatgcgattaccctgtgattttgaccagaccatcgtagtaggatgcgcgacttaattttacctaatccacgtttagtttcataaaattaatagaaattaatagctgtgtttgactactcctgttaattagatgatggatttcagcatacttattctgcaaatttattaatttggatataattatatttcaaagagtagatcaatatctcttattcatatacctttttttattaaaaatgcaatatttttcttatgtgatcaaattcttcctttgaaatttcgcctttagatagtctctgatttaatgattctacaagtctattcctgatttggaattgtcatactttatgttgttcttttttaaggattcttctacttctcttaggaaataccattcttctcttatatctacatcaggctgctttcctatcttataaagaaccctcattatctcatttttctttttagcaaaagaacttggaacgtgcagagctatcatgaatcccttcgtagcaaacaactttttccattcacttggatatggtaaatgtgtaggtgtaaaatctaaaggtaatacctcatgtggtgatctattttttttgtctttatttttccacaaatatcctaggtaacctggacttcgctgatatggatcttgttgctttggctgaattacattatctacaatagtaggatcatgtgttcttcccaccacaataaatgtagtaccgccgtatctttttgtggactcgattcgtctttgtatttcttttggatttggttgtcccttattaaagaagcctgcaatatgtacctgaataattgtggtttggggtttataaccaaaaagttccaagtatttttgaaattcaatttttctttgagaaggttcaatttgttttgagattaaatcatttacatgttcgtatgtcaatttatattttgaattaacttgagattttttaggtatctgtgtattcgttatagcttttcctactctcattccccttttttcagtaacaaaatcgccttctttattcatttaccactcatctacctatattctccaataacagtcctggatggagatttaaaatctacaaaagacatttacatttttcatatgtataatatagttaaaaaggactaaccaatcatcagtagttgttacaatccaaacgatagtccattacaaaacgaaatctcaacaacaactgcattaattctagttaagcatacagcaatgaaactgctcttgatgttttctcttttgggatactcatcaatataaaaacaaataggatgataaaataagaaaatcgaagctatggaaaagaggagccaatcttaatgaatataaaggactcaaaggtgatagagcaaaacaagaagatgaaattgaaaaaataggcagagaaatcaagctggttgagaagaactttatcgacaagaagaagacccaataaacaagaaaaattttttgattagtttagtttcaaaagtaaatcacaaaataaccttctttaacatgcatactgccactaaatactccatacgtcactaacaaataaatagtgaaattcgaaactacaaaaatttctttccactgactttttctttcatataaaacttcatttagattatatcttcatcagacatgattcgtatctacatcctcgtgaattctacctaaactatccgataggaacacgatcccaacgaacacgctaccttgtttttgtatttaaagatgcaaaatgatcatagattaaataatatgttatacaactataattgcttttatcggatagaactataatttcgcaagaaaatatagtcttattcaataaaggcatttttagactcattaatataccatattctatttcaaacatcacaagttcagccatgagaattgggcttcattttttaagataggcgtataattgtaattaagccagttgtaattattattatacctaagaacaccacaaatttttaaaaaataaatttccttcacctgattaatattgatttctgactggtgtgaaatatattactcgtccgatccaattcactgcccattttgaataacaacttttcagtgcaataccaacgaatagattaaccgctaatgttactgaaatggtgctttatgactgtgatatcaaaaataaataaaaattttggtctattagcgtgttaacagttgcttatctctgataacttgtgtatatcccccaccaaatttgtatagtatgtcacaataattgttttcattaccctggactagaggagaaacataatatgtagctgttgcgatactaccacgagatatagaacatgaagcttttatttgtccaaatgttttaaccttgcaagtgttagagcctataggtggattagaaaatttgaattctactaatccctgaacatttcgaagactattttcctcatacaataaagaattgtataagagtatgtaaggaattggttaaatttggttattatatgtccccccaaaaaactatataccttgaaaggaacgagccaacggagtagctactaagttaaatactagttcagttaccactacaatacaatgaaattagaatcatacatgttaatgatggtccttctaagtgctctcatgatacctacgtcaatcggtacctacttggcatatggtagtagtgatgatgatgacgatgataccaacgatagtgaaaatcaggtttgttatcatagtggctttgaagctggacagagtggctcgtacaaccaaactcaacaaagtgattgtggtaccagtgaaacacattacgctcatgcatattaccagggctttattcaaggttgcatatcatcagggggcggaagttattttgcatgtgaaaataaaacgcctggccctccctagctttttttatttttatgtttttttgatatcgactaattaatccgtaaatccaacctttattcgcaattttcagtacgttatagtcatcaaaagaaaatatctatttgattggatcgtttctattttttattatcttctcatgtgcagttggtgaaccaagaggataggtgcaatagggatgtattgtcatgatttagaccttaaaagttggaatcaaaatgcaactttagcacgtaatccagctcatcaaatatttttagattacaggtatgacaaaaatagtaaagatgccacagaaatatgaaccataaaggatgataaaatatacattgttgagtttgtagctcaagacgagttctatagtttatacttaccagtcgtaaacgaaattattgattcctttcaaatcacgaattcttaaaattcacaatggctcttcagctttgtgaataattctaaatttatcttgaatttggtaaaacgccaaaataaaactaattaatttacttcgtatcagaatcttttatcctcagcggtaagaatctatccaaaataggatcaaatgtattggaaatcggattacattcgtatatggactatatctaacccacgtagtattaactgctgttttattactaacttactgggatcttcaaatgaccactctggattgatatttgattcaaatttgtttcacatacctacgaaccagataactattttagtaacaatattaagaattagatctctagaataaaataacgtataaaaattaatatgtgaacaacttccatttatgggaatttaagcatatggctggcgaattccacatttaataccgattggttcgtgctgttgatgtttttacagttggttttcaggttgctggttttactattgtgagaacgctactacaacattgcaaaatctaattttgctattgccatacaattcggatcgccctattctacacaaataactaatagcaatgtcgaagaatcaaacaataaccaaaacatttagtcattttctccaccacctgaaaggtagcaagctgattgtttttaaaaccagatgtctaatgtattcagcaatgtctttgatgttgtcagattgaagataaaatctcaaaagagcgtagtcttttagcatggtaataaatatgagaaacagccatgatttcatctacatgggttcgattcaaaaagaattctaaaccctttttgacggtggaagggcctccaacaaaagaatatttgagcctttcacccacggcatattcctcaagttggtcccagatatcattcatattatttacagggggttgtaataatccgtggtttcttctaatcattcctaatgccattagttgcacggaggtgaacagatgatttgcctcttcatcggtatcagctgcaaacacattgacagcagccatgacataaggctcctttagagtttttgaaggccggaaccgttctcgatagatattaacagccggttccaagaatgtaggagcaaaatgactagcaaaagcatatgggagtcccaattccgcggccagttgagcactaaacatgctagaacccaaaagccagattggaatattcaatccttctcctggggtagcccttacctcacgacccgcggtttgaggggaaaaatagttcattaattcctctacactgttaggaaaatcttcctcagattcatctagactgccacgccttaaggccatagcagtcattctatcagttcccggagcacggcctaaacctagctcaatcctgccaggatacaaactctctagtgttccgaattgttcggctacgatcagggggctgtggtttggaagcattatccctccagagccgactcgaatggtagaagtacctcctgctataaacccaattagcacagaagtagctgcactggctatccctttcatattgtgatgttctgctaaccaatatcgcttatacccccagagttctacgtgctgagccaaatctaaactgtttcgcattgactggcttggagtaccatcagcgtttaccattactaagtcaagaaccgataagggtaggtcagttttctttctaggatgcttcacaatgtaaccctactaatccgatgtttttatatttcaattgatatttcaaaatggccatgagtcgattgatgagagtgctttcaccagcagataattttcattctcaatagatttgttctcagggtttggattatatgcaatgcctgaggaagtgaatggtattgaccattatacagtctatgtaaagggagatggaccgcttttctaatataagatgagtctacaaagaataaaatatttggtaaatcagatcaactgtcaactctattactatttttctcgtcaagtacaatttaaaacattatgtgttttactctgttaggcgaaaattaattattgattcacatcttgaaatggacagcttagactcatgtggatatcttcatgatttccaccgaatcctcatactctacggaacttaattccgcacaaacagctatatattgtagtaacgatataggaagctataagattagggtaattcttaattttcatctttttaaaaacaaatctttttctgttttcatcttcgcaattgagatcgtagaaatatgacccttgcctattttgagagtaaaggttagataaacgatcttttggtatctgtttatgttatgttaaattcttttttgcgcatgaatcacagtatttttctataatggtagctccttctacactgaatactgcttcctgagtagccgtattaccacaacttacacagtattttgtctttccgccaacatcaacaaatgcccttaccgacgaaaaattcttatgaagagagtgtaaggacgtaattataggattagaatttttttcgcttgtcatatcatatatatacatttcgtatctattaagtatgtcatgatgcatatcgttgacagactgctctaatcgttactataaatcgaaatatagagatttcatttcgttttataatgataatacacgcagatattaatcgggctttggcatttgactctgatcacattgtaaaaatgaattttctggtgattgtatagacctaacacggggacagtatgggttatgaatgaactttatagtaattagaattagaagaagattcaagttaacagattaatatcgacccatgtggatttcctcccggtttccaccaaatcagcagcccatttatagtaacgatataagattcaatcgtgttggtgcttacattaggtagattattttatttttatgttacttagcaaaaagaatatgtgattgcttcgtctatggctgtctgtctcagccgttaaaatttttaggacactatattgctacactgctatcctgttctgttgaatttccttgtattacgggacagttataaagaattttctccgaaactagattgtgctctagctctatttcgagtttttaatgattactagtcagaaataattggaaaaagtcttagttatcgcttagttgccttctcaccactattattattcaccgctgtcatctccaccgctgtcatctccaccgctgtcatctccaccgctgtcatctccaccgctgtcatctccaccgctgtcatctccaccgctgtcatctccaccgctgtcatctccaccgctgtcatctccaccgctgtcatctccaccgctgtcatctccaccgctgtcatctccaccgctgtcatctccaccgctgtcatctccaccgctgtcatctccaccgctgtcatctccaccgctgtcatctccaccgctgtcatctgctatctctcctcctgtcaatctcgcaaaatagcctactgaatgctcatcctgccatttaatggtaaattcataggtctcagcattactctcaatgacttcgtcaactagttctaaagtaaacatcgatctatccccggagttgatagtggtaggattaaggcgagttgattcggaacctacaattccactatcattataaaaaactgcagatatttcgactgattttgcactgcctgttccattatttaaaatctcaccaacaatttcatcggccaatactttgctactgtaattttgacttagtaatatcaggtcatactctttcttgttttcctgactgaaagcatcagaatgaagattgatctctataaccaatattgttatcagcacaaatgataatccgaaaatttcgatatttgacaatgctttcattataggtcattaatgatgagcatatagataaaacttttattatagatttttctgttctataatactattcatcactattatcgtaaaaataaaaatttttttgttcatatcctagagtagatttgttcctatgatttaccataaagaagatcatagagaaagaagtaacctgatctacaaatcatttagttcttaaattctgttggattgtttttattcagttggatattcggttggagtgataggaaggagtcaaatttgtttcacttaccatcgaatcaactacctattaatagtaacattttaaactacaccgttaaaagcaattattctggttatttgcggatacatattacagagttctctgatatttacagtttaaagttataatactgaatataatattaaggatattgacttctactatatgaattatagaattgtgattatcgtttgcgaggaactaataacatacatgtgattaggtaactatccgttatgttacaaaagcataaaaggagactatctaaaaactactttttaatatcttatagcgaattactcacagattagtgactctttccattaaaccctcattgtattgaggtctctatgtattagttattcaattccaagtatgttcacggagaaagattaatgtaaatgtgttagaaaaattttagcagccttgacatttcagcaaagcgtgatacatcattaggtaatacttttcatatcaattcgggttggatgagcctgtttctttcaattagtgtgactcgaagtaagactcatctgaactatatgatttaaactcggtccactccatatcaaggactagattattattaacttccctagcttttgatatcggaacgtcaaatctttgatcataatccccaaatatcgttatctcggtatctgttttgcccatcataaagcccacgaagtcttcattcaatagacttacttttttgttaaaaagggaactaggaaacctatctatagcagattcggttgtttcaattttaaatatttcctcttcattacttaaatttgtagatactaaaatatcatttctatctaacaagtaccttcttaattcgttattgccagttatttgcattagttagttatcaattaccttaatgcatttcggaatcaagacatcagacattttagtatttattaaaatagacctttgtttatttttcatttttcttagctgcaatagccttatgaagagagtgtaaagacatcattataggattagaatttttttcgcttgtcatatcatatatatacatttcgtatctattaagtatgtcatgatgcatatcgttgacagactgctctaatcgttactataaatcgaaatatagagatttcatttcgttttataatgataatacacaaatactatgattattctgcatttcatcattcttgttgggagggtttcctatgtttctctaaaatatcttttatactttgacgtttatcttcattaggctttgctatgggatgcagggaccagtacattccgttattgtatattaacgattctttttcagtactatgaatcgcttctattacctctccaattagcattacatgatccccaaaaatgacctcattgaataacttacattcagcacttaatgaagcccctttcaccattaatacatttatactgtctgcttgatagaatggaaaccccaaatcctttaaagcattaattttgtcatagtctcttccactatatcctccagccacactagcaacgattgtctgatcagttgcacataggttaattccaaattcttttgacgctctgatattttcgacagtggcctttgtgggtcctaaagaaaccgctataagccctggtctgtaagaaagatgatgtgtccattcacatgccaaaatatcgtgaccatgaggaccatttgatgttatcaagcctattgatgtagcgaatttatttgaacggggatcaccccaaggtaaatccataacatggaattacaaagtagagttaataaatcgtaatcagcatcggctgtatcatacatctaatactaaacttctttaggttggtgtttgagaggaaacatttttacaatgaaaaaccggtcttgacgactggagcatatcacattgccactacgtggattgataatttgagtcaaatttgtttcatatactaccgagcaaacatagtatatggaacttaatcccagtgaataagatacccttttttagcaacaagtttatctataataatgttttagaattaaaaatcaaaggtttctaataatctgatttgtaataaattcttatgattattgaacatgccaaagagtttatcagtaatatcgatatagaattggagaaatgaaaacatgtgagatttgtggcggtataatgtcctctggaactactaacactgtatgttcatcttgtactggtattagagaatctacaacggctttaaaagactctcttgcagatcatatatgtggttgtattaatacagatagaaagaattgcccattgtgcaagaaaccttgtcatcatgatacatccttaaaccctaagatattgatttcaccaatgtaatatgaagatgcagtaatcgacacacaatttatcttattttgtaaaagaatatgggcgacttcaattatcaataaatgagattcaggttagctaaaaagaatcaaatccacccatatccattccactatcagcgcccatatcgctaaaactacctgtatcaccagtatcagacgctgctccggtatcttcagctccagatcctccagattcactagcttgggcttcactttgggcgctttcggctgggctcattgacattcccataaaagacatcatcgaactaaacattaccatattcattattccagaaaatagcatcatcggcatccacattctattatcgtccatatagctctgcatttgacctttattgccggtttcatagagttgttgaagatgtttagatttaatgactagttcttgcttctttgattctagtattttatctcctatttctgtgacataaagctcaatcttcttattgccaaaaaagccttttttttctaccatagtgataagcttttgagcattcaagtcattgactactaattctatctcatctttggataactttgtaacttttgatatgttgtctaccttttttatacctcttgatattgcagctaatatcataaaatgatttggactttgactaaaaccgttatttgaggacatacttcttatatgaatacaaaattatttaaatcttatttgattacctaagagttggcaaaaaaaactgaaatattaaatcgtatgttcaattaggatctaataaaactgtattagaacttatttttaagatggttaccagcactatattttcggaacttaggggggagtcagccgagttcaagaaaagaacttcaaaactcatacatttggtagaaaacggaaactcatcccaccaatccacgttatatatgggtccatataataattattcgctatataatatgtcacaaagcaatagatttcgtttgtcggccagatgccaataggaggctaattcttgcctggttaaacttgaaacaacgattagaatattcgatcttatactaaatgatcctataagagagacattaggtcttcccatggatcgaattaagacatattggaagttggataattttagttatagacgatgcttacatgtctttcactgatctgtagttgacaactggtgttgccatggagtataatgttactatgttttagttattgcgcaatatggctaacatgttgcaaccaaagtaactgactttatagttctcctattgctcataacatcatacactacatgaattcgttagaaatgaaatacataacctctactccgccctcgcgtagctcagcctagcgccacatttaatgcggcgggacagtccaataccctatttattatcgactccaaaccgatgggaatatttatttctttgattattttcttgcttctacacttgattgacatgtattcttttgcaaattccatgctcatagatttaacaccagaaaaatctaatataatctcgtcataaggaatacccaaaatcgttttctctaattctttggcagtatttggccttagtgtcaaagtgggagaaaatatgtctttgatatattcaacataaagaactgacattttaatcatattagaacaaattagatgttcagatatagctatttctgttgattgttataagttcatttctaactaaaaatgttaaattacaattatagaacataacaaacaagactggctcaaacaaaagatcaatattcactttgaattttaatatagcaagagaatggagtatatacaggaaatgacaataataactattagagcatggcatttaatctaaactatctcagcgtttattcatcttttgtttttgcattttttttcttattcttagcatcaaatatcgtttataccgaatcaaatccacatatagtgaaggatattgcttttgcacaaactctagataacctaacactatctactttaattaatcagggatcaccatattatggaaatcttagctctccattagtgcttgttgactttagcgactttcaatgccacctatgcaaaagatatgtagacaatacagaacaacaaattaattcctcctacatccaaacagataaagcagtctatgtatttaagcatcttccaaacagaggatttgattctaaaaatgcttcgctagcagcacaatgtacaaatgaccaaggaaaattctgggagtttcacaagatcttgtatgcaaaccaaggaccgatagattctggctgggtcaatactgaaaacttaaagaaatttgcttcacagttatcaggtatcaatattaccaagtttaattcatgctttgatactaaaaaatatggatcattcatagacaaagatattgccttggcaaattctctaggctttacagaaactccatcctttatagcaatgactagtgaaggttcaattattgaaaaaattcagggtccaaagccttttccaatatttaagtcagttatcgataacttgaaaaacaaggcaatcaagaattaaatgttaggacttttcgcatttaaaatagcatacggttcaaatccacctttatatattgggttaaccattctagtattcactttattttggattttttttaatgtctttgacgaactgctatatttttctccgatactttatttttatctaccaaatgacgctatagccgggttcattttatctactgccagtgcattgcttctgggagttgttgtttcgatgaacatttacctattgagaaattcaagtataaaattagataaatcgttaatttcaagttcatttttgacaatattatctagcgcttgcgccagctgttcttcaatcggatttgtactaatttctacttttggcagtgcaggtataattgctaccgcctttctcacgaattatcaaattccactaagattggtttcaataggcattttgattttagctctgtatactgtttgtcgcagaacaacaaacaattgtacattaaataataagtaacatgaatattcaagctaaagtgataccaaaaatgaataaaaggtggtttactcgtatgttagcagcatagcttctctctgatgacatttgtttgttacccaactgtatttgtttattatctcacaatactcgttattattctcctggagtcggagagaaactgtaatggcaagtgatgccgaattgcttgaacttatacgacctgtgactataaataagaaatgatgacttggattgcaactattaggccctgaacctggagatggattaacgcttttgtttaaaatgatgatggatttgaaatcaacaaatagtatcaacgatttcttttaaagagcgcaaaggtatttgagtaaataaaaatagaactgaaagtttagcgcatcttttctttgtagaatcaaaaattgcattctaaaatatataagaaatggttgcagctatttagatatatcaacagagtacaaagtatacttaaataaacagagtcaacctttaacatagtcattcttaaatagtatttgctgtattcttaattgaataattggagggccagtttattgtctgttccaaaacctaacggcgaagaattttcctctgcaaaaaacatcgatgctcatttttctgtcgataacgattctgaggataagtctactaccataataaaaaatagaagaaaggcgcttcaggaggcctttagaaaatctcttacttctataaatgactattattgtattacaggagaagaaatggctaaaagttacaaaccttttattcctttactaaaagaaaggatagcccagcgtcatggcagcacaaaaattctaacagatattgaacctggagtaatttatgcggcaaaggaattttccgatgcaggagtagaaattagacatatagatagttcgggcttgagacgctgcgttatttatgacaatgaagcagcatatttctcaattatagagccattgatcactcgagaggcgacaaattcagtcaaccaaaccgaaggagaggacttgtggattgcttcaaatgagtcatcagttatatattctgctaaaaagcgcttcctttcagactgggatcgggctttacccctagacaagagaataaaatatttggaaaaaggtatagagccaataacaacaaaagtgttagaaaaacctgatgaaattctaaatcaaatcagaaagttcaatacctcgtctaaccaaatttacgccttttccaccatagaaggcctaataatgattcgaaaaaactttccagaatttcatagtaaaatcctacagaaatacgaaaaaggagaacacttgggagtcaagtggataactaccattaatacaaaggcagatacggaagaggttagattttttttggaatcagagtttccaaattagacatgtaaaggattctttatttactaatttcggtttaagcgacaaaatactactttcatcagttgatagaattgattcagcaaacatgattaaaagtatgctcacaagcaatgatcctctctatcttgaacattacaaaaacatctttgaaaaaatgtggatgatgggtatagatgctgaagaaagaatacaagatgtaataagtggaaattatgttaatatccaggtaataccggatgcaattgaatccttaaaattaactagcaaattattttcatcgatacaaagagaggtattgataattctttcatctaacaatggactgcttcggtactgaagcatcgggaggttttagggttctcaacgaattggcatcaaagggaatagatgtaagaattcttagttcaatggattataaaaatcaagctacttatgacagaatacaatcatcatatggtaacataaagtttagaagacttgatacgattataaaagccgttaatagaatcaacattttagacagagaaaaaacattagtatgggaaataaaagatgattcaagtcttaactttatagatgcattaggaattgcaatatttattgaaagcaaatctaccgccatgtcttatgcattcatatttgacagtctttggaatcaaactaacctgtacgaacaattacaaatggcctatgaaaatctaaaactacacgaaagaatgcaaaaggatttcattgattcagttgcacatgaattaagaactcccattacacccattatcggtcttacagaacacataaaagacaatttgaaaaatgaagaacaggtacggttacttgacattgtaatagacaacggcaataaattacatgcgttaagtgaaaatattctagacataactcgaatggagggcaatatgattagcctgaagaaagaactctgacattaaccaactattagttaaagtagtaaagaattttgagttatccattagaaaagacaaggaaatatctatccaatatgacaacttcaagaaatattttatatatgctgacaagcacagaattgctcaagttatttcaaatctgttagataactctattaaattcattttggacaagaaaggaggattgatatcaataacagtggaacaaatgaaagaagagggaaagaagataattgttgtttgtgtaaaagataatggcgaaggtatacatccagaaatctttccaagactttttaacaaatttgcaacaaagtcttcttaaggtacaggactaggactatttatctgcaaaaacattataaaaatgcatggtggaaagatttgggctcaaaacaacaaggaggccaatggcgccagttttttattcagcataccatcagacagataactgattacatgtaattataaatttgttaaactattctttttgatttcataatttctaaaaaacaaagaaaataggaccaagaaccagtgtggatatcctaatgatttgcaccgagcccacataatatacggaacttaatctcaccgaggctattatcgaaggatcctgattttagaatactctatatccgtattaaaatcgtattaaattttattttttttggaatcattctcatcttatacattacgtgctattaaattctgtaagaaaccactattatttcttttgaagcaggtaacctttaagaattaagagtgttgccataaatcctaatattactccaaataggatgtgtgcaataaatccaaatccgtatataggaataagattttgttcaatcgttctctgatcttttgagctactctgggcgggactggattggttcatgatgtcaactagatttggatagaccatactcattgtagttggaatatacaacactatgaaaataataattgaataaacaattccttccataattcctcttttaagattaataattctgaatttctttatcgtacttactattactgtaaatattgcaccggcgatggctccagtgagtaaatgcattccaatacccaatgtcaaattaaggtaatagtcgtcattgacattacttattgccattcctctggctatggataagtcatctaaaggaattcccatcatgctagtagtaagaaaaaggaaaggatacatgacgatgcttgcaatgagtcctcctaacgctccaagcgatagggttttaactattctttgatatatcacagaaataccaactcattctaaaatatacataaaggtatatgatgtagatacaaactaaagtcaggataaactggtagtagaaaattcgttctcgtcccaccgaatccgcattaaatttacatatattatgttacaaaaattgtaatgctggtctcatattcaaatctaaattctatttttatcttaaatcataaatgaaggggagaataaagaatttttgtgaattatctcaaactcttactctcattaaccattggagcatcttttatctttattctgtttccatctagtataattgatgtatttggacaacaagacataccatttaatgtcgctgcagttggagatctcggttgtaatgataatggaaaacaaacaatttcatcaatagcaaatatccaacccaatttagttattttcttaggtgacttgtcttacgatacaagtttagcttgcttttttgatcaaacaaaggttttaggagagaatggaactagtcatacattactaacaattggtaatcatgatataggcagtggtgatggtaatgaggaaacaaaaaaacaacttatgcaacattatagcatacccgaagagggatattacagcagaacatttgatcacaacggcagtaaaattcttgttgtagcaatgaatttcactggattagaagaaaataaccaaaacagcaatagcgagaaaaacaatttagaaaatgaacaatttaactttgttaaaaatgaattagaaaattcggatgcggtatataagattgtgataagtcatgctccctttgtttcatcagattgcaattccattttaaaatttcttagactgatatcctgtcacagcaccttagaacaatggaacaatagcctatttgtcaaatatcacgatctttttaagaatactgaagtagatatggtgctttccggccataatcataattatcagagagaagaaaaagatggcataaattatgttatcagtggacttggaggtagaagccaatataaaataatggaggaaaatgatactcatttttatgatgtttatggctttttgcaactacaattttatcctaaagttattgaaggcaaatttattccaaatgatgatggatatacagaaagagaccgatttaacgtaaaagtgtcttagcaatcaagttagccatgaaatatttatgaaaagttctagtggtcaatgtacgagtgcaaatgcaaattacaaataccatccagatttactagttcatgtctcacaaaatattagtaagaaaaaaagtaacaaaacttgattaattaaatgacttaattatattgttttagtgcattcaataacgccaatcatgttagaattggggtaatgagtttggatatgtcgccatccggattggcttaaaattgatttatactcttcaatcgttctttctcttccagtggtagcgcacatcatatgtatatcaaataatttagaaaaatgtggtgtcgctgggtctggtactatgtgttcaacaatgaataccttggatttgacaggtgcagttttgtgaatatttgaaagtatttttatgcattcgtcatcattccaatcatgaagaatcattttcattatatatagatctgcagaggggacttgttcaaacatattccctatgatatatttacagcgatcctgtaatcccattttagtaggccatgatgaatcttgattgttgaccacatgctccaattctaaaatcattccattgagatgattatattttgatagcaaatgacttaaaagatgtccttgaccaccaccaatttcacaaacatgagagacattagtaaagtcatatccattcaacgcttctaataccatggcagtatgcattgctgaataactgctcattgcatcattgaaaactttagaataatctgaattttggcccgcatattcaaaaatgcttttgccatattctgaaataaatgcattttgttgtccatctttaatcattcttgacaaatgcttccatatttgataatgctctggcccttcctctagaagcaaaactccttgaagagtttgaggatgattcttttcttagcagttctcctaaagccgttatcgagaatctgcggccgtcctcctcttcttttaaaaaacctaaagatgctattgatctaagaagacgatatgccattgtctcattcagattcaaatcccgtgcaatttgacttaattctttgggacttgctgttaggtaatcaaatactcctatcttggcaccagtatacagtatttgacctttccatctaccaaatatgatatccatagttttatcaaattcagacatatgcttattctatcagactttttattatatgttaatcaaaaatgataaatttcacctaaatgtgtgttgatagcccaagtcattttttcatttctttaacatgtatgcagataaaatggtttctgattctgatgcataactggtcattctatttttttatcttgatgttctaaaatgaatgaaataaataattaaactccatgtggatatacacatggtttatgtcaaactagatatctattttagtaataagtaaaggagtaattactgccatactatctgattctgatgaaatcctttgcacaccatctggcattaaatataattacaataattccagtataattgcgcagacgcatgaagatatactttgaaagatattcttaattatgtcaatcgacattgtaacattcaaagactttgattttatattccaaaaatgttaattataaattaatcaagcaggtaaaatcagtttgagtttagaaggcgacaatgtttgaattttttttgattatatattgataactttgctacctttaattccgaatattataacgcagttgatagcctaaaacttataaatttgttatagagatattatcaccgagtttgaataagggaatagattcaattctgatctttggttctgctctgttagttttttctatcttttctttaccgtattttcacgctaatgctcaacaccatggagctccacctcctctagccacaattggagacagaaatataataatgaattttaccacagaacctaaagatttgattgctggtaaggctgcccaaatcgatatgcatttgaccaataaaaattctggagaaaagatccagcatgttacgtacagggtaacagtgagcaaagaagatcaaaccaaaatgtctgaattttttcattcacatcttggagaattaacaattttgactaaaaatgcaccatcctcacaaattggggtaggtggaacatttgatttactgactaatgcttttgttccagatccttctggtaaaataactgttaatggtccattattttcagaggcaggtgcgtatgaaatagatattgaaataacaacaatggacaatgacataacagatttgcaagttccactgcagtatcaatttttagtaaatagtagtgcaacaaattagtactagcattaaaataatatgcgttcaactaaagtgatataacaagtctagttagattagttttagataacaacgatagctttaatgatgtggtattgaatgatgaaaacagaaccagataccgattgcggtaactgtagactctgttgaatcgaaaacctgacaattgatataatattgatcttatccacattaggttctcttacttcaccttccattttagtctcaagatgcagtcatctctagcaaggattaattgaccgatgtgattgagttcttgagagatacgacaaaatgagatgcgagaaccctgtcatgaatcaaattgtcgaagcttataagcccatttggtcgctcaaacatgctatctctctgatgggatgggactttgagacttatatgcctaaagacggaacggaagaaaggggaatggctgattctcagcttcacatgctgcacaaggatcttctgctaaagaaagattttattgctcttattgagtcggctaagaaacagggaagccttgatgactttgaaaagggtattatacgagtactcgacagggagataacgaaacaggtcaagatacccaaagagttgactgaagcagaatctctggtaagaattagaggaaacatggcatggagggaagcgagggcaaaatctgatttcaaaaagtatgaacctcacttggagaaaatgatagaaataaagaagcaaatcgctgcgaagtggggatatcaaaagcatccatataatgcgctgttagatacattcgaagagcaacttactgtagatgacttggataaggtatttagtgtattaactcctcgtattcagaagattctaaaaaaactcgtagattcaagcagcccgttctgcaaagaaaacaaacttgaaaaatcaaagtatgatgccaacaaagtggatgagctcaatcatgatattttgactcttcttcaatacgacatgaaacgcttcagaatggatatatccactcatcctttcaccgagactatgggccttaacgacatcagaataactactcgctatgaaggcactgatttcaaaaagtcaatatttagtactattcatgaagctggtcatgccttgtataatctacaatgcgatcagtcattgtcttttactcctattgaaggcggatcttcacttgcactccacgaatctcagtcaaggttttgggagaacattctgtgcagaagtttaccttttgttcaattgataggtcctttgattagaaaacaagtaaatttcgcaaaccaaactacagatgacgaattgtacctttatttcaataatgtcaaggccgattatatacgagttgacgctgatgaagttacttacaatttacacatcgcaataagatatgagatagagaaaaaaatatttggagataagcttagtgtctctgagattcctgagttttggaatgatagaatggaacagctgcttggagtgagaccaactaaggattcagagggagtgctgcaagatacacattggagtagcggcctctttggctacttcccgacttacactctgggaaacttgatttcagcgatcattgcttcaaagatgcacaaagatctagagaactatgaagaagacatcaagagaggtaattttgatcctattagagaatggttgagagtaaaaatacaccaatatggttctgcttatgccccgaagatactacttgataatagtctaaatgaaggctataatccggattactttgttacctatcttgaaactaaatatcttagttcctaaaccttactctttttgattggagttatatactaattctatctataaggacgattttaggaataagtctgaaatataacaaaagaaaatacatacaattactaattgaattaataattatatacatggctttatatagccatactcgtaataagtgctgaatgagtatcattattaatttaaatactatatctatagttatagttacaatatcattcattttacttttaggtcccacatcaatgaccatgaatgtatttgctacaaccaatacagctaatcagggcataggccaatcacaatctacacttcaactcggtgtttgtgtatcgggaaacggtacacttttttcgtgtaacaatacaaataaccaaaatcaagcaaatagcggaaacaacgcagcagctcaaagtggtggtagcggtagcggtagcggtagcggtaactctgcaacccaaggaataggccaatcacaaacctccaaccaaaacagtggcgtatcatctggtggcaatactaccaattctggaaacaacgcaaacaaccaaagccaaactaacactggaaacaacgcagcagctcaaagtggtggtagcggtagcggtagcggtaactctgcaacccaaggaataggccaatcacaaacctccaaccaaaacagtggcgtatcatctggtggcaatactaccaattctggaaacaacgcaaacaaccaaagccaaactaacactggaaacaacgcagcagctcaaagtggtggtagcggtagcggtagcggtaactctgcaacccaaggcataggccaatcacaaacctccaaccaaaacagtggcgtatcatctggtggcaatactaccaattctggaaacaacgcaaacaaccaaagccaaactaacactggaaacaacgcagcagctcaaagtggtggtagcggtagcggtagcggtaactctgcaacccaaggcataggccaatcacaaacctctaaccaaaacgcacaatgtgtagcaggcggaaacgtagccgattcatgtaataacaccagtactcaaaaccaaaataatactggtagtaatgccgtaggacaacaaggcggtagcggtagcggtagcggtaattctgcaacccaaggcataggccaatcacaaacctctaaccaaaacgcacaatgtgtagcaggcggctctttaagcaattcatgtagcaacaccagtacccaaaatcaagcaaatagcggaaacaacgcagcagctcaaagtggtggtagcggtagcggtaactctgcaacccaaggcataggccaatcacaaacctctaaccaaaacgcacaatgtgtagcaggcggaaacgtagccgattcatgtaataacaccagtactcaaaaccaaaataatactggtagtaatgccgtaggacaacaaggcggtagcggtagcggtagcggtagcggtaattctgcaacccaaggcataggccaatcacaaacctctaaccaaaacgcacaatgtgtagcaggcggctctttaagcaattcatgtagcaacaccagtacccaaaatcaagcaaatagcggaaacaacgcagcagctcaaagtggtggtagcggtagcggtaactctgcaacccaaggcataggccaatcacaaacctctaaccaaaacgcacaatgtgtttctggtaaagacgctatagtatcttgtgataatgaaaacttccaaaaccaagtaaatagtggaagtaacgcattaacacaacaaggaggtagcggtgacagcaatgatagcggtgacagcaatgatagcggtgacagcaatgatagcggtgacagcaatgatagcggtgacagcaatgatagcggtgacagcaatgatagcggtgacagcaatgatagcggtggaaattcatcggactaagacatacttcaaccacaaacctccaaccaaaacagtggcgtatcatctggtggcaatactaccaattctataaatattttatgattaaatctcataaacacatgtggatatcctcatgattttcactgatttcgatatctagtttagtatctatgtactatacaattaaagagtttattcgtattgttcggtattttaaaaagaaaacacctcgattatgataaggtcaagaagcaatttaatatatcagtattcattgttattgatatgcaatctataatattgtttattatgatactatttagtgtaagtatattattacaagttgacaaagaggtattcagtcaacaatatcaaaatgaaaatgaaactgcagatcacgacttcgatattttatccacaaactctctgaacttatctgctccaatatatcaggcatattcgggagtttttttaggaactaaaaatttatcatccggcccgcctataataagcgaagattatgctatcgaaaaagcagttatgaaaaacgtgggtaatgtaaccaataatatgacctttgtgaatactcacgtatcagatggtacaatcaagagcacatccaaaggagtgattacatctgaaaacggacagaacattagttggattgcgtcagatattggaatgattaatgaccatggcgaattgtttcatggaattgtccaatttaatataacaaatagttcaagtttctcatttctgaataatgctacaggtatagacaaacagacgccggaaattaaaaggacgatttggttaattgagaagtagatatatactggtatggatgggtaaataccaggatatatgaattagttgacaaggccattagaaataaagtgatacctatgagatagacataattataacccaaagctgcgactgaaaaaaaatagtcagaaatagttgagatattacatgatagatgaaccactgttagattagttgataaattagtcaaaagtaatttaacaaaagaatttgtcatagtatatcataatcaacttttaaagacagattggactgtgttgagttgtggtacgattgtaattctactttatgatctaaagtatttgtcaacaataaaacaggtatttcatgtatggatttcgctgactttttattatctttccaaaagtgtgttaacggtactaattaatttaattaatgaaaatggtttatgcatgacctcgtcaattcttacaccgttgttcaatttatctgatatctctaattcagaaatatcataagcagatatcaaaactgtcttgattaatggatcaatgcacttgatttcatttaccaattgatagccattaactttgggcatacggatatctacaaggattatccgatattttttaggatgctcttttaattcatctaaagctactgaagaatcaacaaatgtaactactttgagtccctgtaactctaatgcttttttatatacataaagcaaatctttttcatcgtcaataatcgctatgctacgatcatctgctcgattagatgatgttctaggagtatgggggggcaatacatattatatacaattcgaactattaatgtttttgcaatgaaatgacaatctacaacaattttcttactttctattgacaatcaagatatataattcaactggctatgcggatcataacgataatgaataagacaaacgatactgctatggccttttttaccgatgttaataataaaccatttaactgttttatgtgataaaaaacacaaaaacaaataatgcgaattccatactctaaagtaaccatatttaagtatgatttttcttagagaatgtgtatctgtcttttatgcgatttcctttgaagccagataaatccctatttatatgtgtaataatttgcaatatatagaaactaaattacacaatttgcaatctatgaaaaaatcctttttattacttggttcttgtaattttactattgtcatatatatatattaattttctttatttcttccatttactttcccacgatttttgctgtatcacctgcttttgaaccccccgccttcagtgaccagagtaatgattgggtgcaaacttttggtaacgaaagcattagtctaaaatccgatcatggagatctattggaagtaaattatcttagtgatggaaaaactttggaggccacactttggttaggctcagattcggaaaatgcttccatctatgatcaaccatttaaaaagattagttatggtattcttattaaaatcgctagttataatataaacactggatttagtggggcagattacaattattatattgaatcggttaacggaaaacggaatgaatatctttatcaaccttcctcaactggcagtcaagtgcttttatattccaaaacaaattatactgaattctttggtggtcctactataggaccaggatatgttaaacttaacttaaatttaagttcgactgataatcccagagaatacggaatattattctacgctacagattctttcaaaacaaatgaagttagtgattttacagattgggtcggcattcctccatctgctatgacaatggtaacatctccaaaggatatagtggtaagccaaggaatacaacaactagttcctgccaatatcttttcaaccttttctaataatgttactgatatcagctttaataaaggcagcaatgatggcggctcagaattcaaatctagcggcctacatgtatctatcgaaagaattcaacctccattatttaagatagatgtatctactcaaacacctatagggttctatactgttcccttcactgcttcgatatttttagaaacaattatcgaatctatggaacctgcatctagtcataatcagagtggatttataaattccaagcttcaagattcccaaaaatatcccacatttggctatgtaactaatccatcgatgaatctgacagttaccgtgacaccaccgcttagttttgatgaacagttcaaggaattttggagcatatatggccaaccaatcagtattattgcaggaggatttgcaggaggctttgcctcattagtatttgcaaaaattagaaaaactgataagcagtccgaagacactaaaaggtaaactgagttgtataataaaaactgtaaattattaatactaattctttagatatattgtccccttttttctacaatgcttaatacattttacctagctgatcaattattttgtcctaacgtacatgactgttaggtacggtgttgttggtggatggtgaattgtcgatttccccgattattttgttcctttatcaaggtatcattatagtctttattttttatagactagagtattaatttttgattgcctgtctagacttttccatcaataattaatgcatcaagtgttctgaaccttgatattccataaaatctctaattgcattgattacttctttctcgtttgtaatcattgataaaatggagccattgctaatttgtctgatatcatattcgattaaatcttttttttcaatcattgtatttgttccaggtacttgctcagcatgaatgaaaaaaggctttgtaaaattaccatttgaaaagtcattttgaatatcgatgatatgttctctaatcagatttagtgtgtttagatcactcgcatttataggccttatgataatctcgccgccagtttctgttggtataaatttatgagttattttctcttgctcaaagcccattgcaatattacctcgttgaagcattgcttcggtttgattatttatggtagtagtgggttggtgagcataggtggtgttaatatcatcatcatatcttgaagcttcgatagtctgagatgggtatacaaattcaataaatgaaaggctggctagacttgctgaaagtactaaacttacaaatattagattatacattaatttatgtcgtattgacattaaattgagattataaaatttttggtgtattcgtagaatatatcaatatgacttgagtaatgcattttttagatgaattttacttattttcaaggttatgaaaattaagacagctccaaaaatagattagtatggaatttcatactattttacccggctatattttagtcattaatctcggtagaaaaatggattaattatgtgagtagattaattgcatgatggtatgaaatatttctgagtctatggaaccggccttagaataatccgtggcaatatttttatatttattaagaaaatagttacgaatcaaatggacaccttttatcgtgctacgctcattgttttagtttctattgttgcaataggtttaattgcaatcccattggggaatcccaaatttattgatagggcaattattttggaattatcatttgtcatactatttgtttttatgtggagaggatacaataaagcgctgtatgtatgtatcccgttatctatcttagttattattggaaacagccttgctccaccacatgttaatttgatgataaccttttctaaaccaataaatgcaattattctggttattggtggatatgtattacaagttgttcttatatacactagtttaaggtctatattgaacataaaatcaagaggatcgactactgcagcctaaattatgagaattactatactcttacctttctactactaagggaaattcaacaaaatacaggttgttgagggcgttcaaccataatggtatttgattattttattgcctaatccttgaatagaactgtataaggatttaatttatttcacatgtaccacaaagccggtatctatcttagtaacttcgtttcagtttataactatgctaaattaatctaactagtaactgatttaatattatgtccctttttgattgcaataattgtcaataatgtctgtatatcaatacaatctttattttgacaaaaaacagctcttttagatgttatcttttgctaattaaaaactacttacattttatgctaaccaatggtaaagccctacaaatagacatattgaaactatagctaatccaaagtaactgtatgcaaattcttattcaatgaatctaaaatttccatatctttttgattaatatggaagtcaaacacctgactgttttctaaaattcttttctcatggctagattttggaataacaactaaatcatgttgtaaactccaacgtaccagtatttgtgcaggggttttgtcatatatttttgcagttctcactatatcctggtcatcaagccttaggcctcttgtcaatggactataagcttctatctggattaaattgcgcttacagaattgtaatagatctttctgatataagaatggatgaaattccacttgattaatggcaggtacaacatcagagatgtgtatcgtttctttcaattcgttgatggagtagttgcttactccaattactctgacttttccactatttagtagcttaatcattgccttccatgtttcaataatctttccgtgaactggccaatgtataagatagagatccacataagatagaccaagacgtttaacgctagactcatatgcctttagagtggaatcgtatccttgatcgctgttccagacctttgtagtgataaagatatcttctctttttacatcactttcctttaaggctgtgccaacatctgattcattaccataaatcatagcagtatcaaagtgtttgtatccaatttccagtgcgtatttgactgctttgacagtcgatttccccggaggtatttgataaactcccagtccaagtcgtggtatttgaattccattatttaatttagccgtagaatttaaggtaaatgacatacaaaatataactttagatctgacttaactctatctataacagtcaatcaatcaggacaacaaaatttccctccaacttctacaaatcaaagggaacctgatattcacccaacctttataccatgcgaaattgaatctcacagaattaaaaagatttgtgaaaatctatcttgatacaatgagaatgaagaaatttgatctctactctaccagaactctttctctccatctccctctctccatctccctctctccatcttcttttgattttcacatattaattttaaaactttgcttatttcgtttactttttcgtatctcttataattaacttaagaataatttatgtatactctctttagtcaaatgcaacttgaatatttgatcatcattgagaataaacacctggtcgtgtgattcaaacaactctatcatttctgatgtagatgcattgaaaagattggtcatctcgtaggcacaaaataccagaccctctagtctattcttatcatattgtttttcaagagaaattgcttcggaaattgaagaagttgcaatatcgttaatgagaaaatccaccaaacatatttctttattattagaattctgcgatatgttttgcaatatgtctttaatatgtttcattttatctttttgagattgtttgtactgtactatcgttccgtcaaaccaatctagtttttctaatgcttcggtaattaaagtatttgaagaacgggcaaaacatttgaaccattcgtcttctcgagtcatcttatctaatgacttgatcaagtgttggatagactcttcgttatcataaagaagtaaatgatgtctttttgggatttcatcctgtttttttagccactgatccacggcatcttttacaattgaattgatggagacacctttctttttcgattgattgcccaattgcgaatgaatctcatcgtcgaagcctcgaattatcaaatttcgtgtcatatctttatttacctggtcgtgtcttataagtgatatcacgctatcaactatagaaaactatatataatatgatatcgtgatatcaaactatgagccttataaataaagaaagtgaaaaagaaaaatctgtgaacactaaagctgagaatgtttggaaactgggagattaccgtagcatatctacaatgcttccacccatttctgctcatttggtcaggtcaattggcatccaatcaggagaatctgtgcttgacgtagcatgtggtaatggtaacactgcaattaccgctaggagaaagggtgcaaatgcaactggaattgatatcacatctgaactattggatctggcagtagaagaagcaaaaatagcccaggtggatggaataacttggaaagagggtaatgcccagaacttaccatttgaagatgaatcatttgatgttgtcctttcaacctttgggcatatgtttgcaccccaaactgatcttgtcagcaaagaaatgattcgtgtaacaaagaaaggtggtagaataggatttgcaacatggccgcccgaattggccattggatcaatatttagagtaaatggtaaatacctaccgaaaaatcctgatacaccgccttcaccaatactttgggggattcccgaagtcgtaaaagagagattaaatggaatatcagaaatctactttgaaagaggaacagcattatttcccattcttagtccaaatcacttttgggagtttatgagtgcaaaatatggtccattacttaaaactattcaactattaaagaatcaacacagtactaatcaaatcaatttgtttagagatgatttcctacgagcaataaatccgtacgttgtagagaatggtataagactaggttaccttttgacggtagcaagaaaataaagtctcattcaataaacacattcttttttgtactttgagaacgcaatttatgaagggaaaattcagtagaaatgaatagcattatatgtcataagatttaagctaattgtacatgaataaattcaatgtattcgtagttttaagtatcgtagccgcaacatctttatttgcaggagtagcaatggtaacaccatcttttgcacaagataacatgtcaatgacaatggataactcctcaatgccaatggatcaaatgggtaatatgaccatgagtatggataattctaccggtatgactggtaattcaactacacaataactagaataatatacccaaaacaacaaaaaccactttttttagatcaatcttaacaattaattattgtaggtcagactaatcattgctgccataagatgcaaatacaaaaatgatatatctacctaatataaatgagaattattgagagaaaccattgataaacgaaatcaaaggttcaattattatattgataaatatcttcagtagactcgacataacaagtattttaactgttgtatattgattttatactatgataataatacaggaacatgaaaatcatcagtattatatcagttattagtattatgaccgcaatagctttagtgaatggcgtaactccattttcgacttttgtaaacgctcagacaccttctacttcggaccttccagcaactataggcaacgaatccaattctgatatggccctgacaaataactcgctaccagtggaaaacgctactactgttagtccggtatttcctaagtagatgagtacccatcgacttagccttttatcttagtaacgacattccgttaggataatataagactggtgatgtactgaaggtacagtaaaatataaagtattggaataacattcaattcaattagattaacactaatttagcaccagtctggtatacgatgaggaagttcaaatctgttttattctaaaaaataacgttgtgatttgttactgttgcaattttgaaatggcttttttacgtcatcaaagttcattgcttgatgtacttcaatatggcttcaaatccttagaataaaggttctataatagtaggaacaatacctgtacttggtaaatccaaaacaaagatcatagtcctatttccaccgatttcggtaaagtaagatatttcataattaaactttttaatagatttctcaaaattcattaaaaagttgggatccttgaccatttgattacctgctgtagttggaatagttgctcttactaatactcttgtataattctaactttagatctgtgcccttgataattaacctttctaaatctaaacagcatgtggaattttaaagttctaacaccagtcatacgatttgttgggtgtttttaagctacgcatcagtaccttcggaaggattaataatagatagacctatgataattgaaacagtatgcgagaaagaaaagatggaacctttgttagtaccattaatacaattaataggcgacaatggttttattacaatacataaagtggaggttgtatggttgaattctctgccctcgcgatgcaattagaaaatatttggtttttttcactatggaattaaagataaatctgtacaatgtcagtgattatttacttttaaaattcattgttggactttgtatcagatctagttgatattttcattcttataccattttttggcctaagtgttactagtggctgtggttttatatttgcaatatcttcctcctcaagtgtaattttccaattattgagaacatttgctaacacaatgatgccttcaacccaagctaatggctcccctatgcatgatttaggaccacctccaaacggaaaatagctaaatcttggcattgaggccttaaattttgaagaccatctttccggaataaacttttcaggatctgaaaagtacctgacatcatgatgcattagatactgactcattataatgactgagccagaaggtatggtatacttttcatttagagagtaatcatgtatcgtctgccgacctatggcccaagatggagggtagagtctcatcgactccatcaagactttttctgtatattttaactttgataaatcttcaaaggttataattttcctgtaccggccgtcgtcctctttctcatcatttatgatgttaatttcatctagaattttagattctattttaggattacaagataaaaggtacaaagtccaagtcaatgcgttagcagtcgtctcatgacctgctaaaaaaatcgtcattacttcatctctaagctgtttgtcagtcgttcttgaaatctcttctttctgttctttggccttctcaagcaataattgttcatttttattggttacttcattgtgagttaaactaataaggacagaaagaatatctgattcactctgaagtttctgggaataattttgatttcttatcttagtatcattaatttccaatttatttattttcttgcattcattaataggtgtttttttctgatgcagatcaattttactataaattatattatctagttgatttaacgctttcctatattccaaggttagaggtattggcagtctttcaataatccttaaaaatggaagcctgagtttgttaatatattcaataattagtgtaatatgatcactaattttatcgatctcatttaatgttagtacactattcccaaatagcaatttactaattatagaaagtgttaatttggtcatttctttatggatatttactatcattccatctttccagtttgcatttgcatattcaatgcaatgttctgttattatgtttccataaatctttatcttatctttggtaaatgcttgctggactattcttctttgttttgagtgactttcgccttcatttgttattaatccgttgccaattactcgttttgctaactgcaatcctggacttttaacaaaatattgattgtgttttactagaatgttctcaataagataaggatcatttatgagatatacatgtaatttgggtcccaatctaaaatgagaaatatcgccgtaactattgacgatttcttttagtattggtaaaggattggatatgaactttatagccagattgtaaggaaatatctcccgaggtccaggtggatatatataatttccatttttgttataatttggctttactttcatggattctatctatgttctaatatacaatagtataactatttttgtggtgttttagccactattgtaaattttttataccgtctaataactttgagcagtaaatgagatgacagttcccagatgcaataacccatgtctgttattgtgtaagaaccatacaggatccctattcttttatagatgaataataccctttaaatgattagaatttcaaaatttaaaatttggccgtataacatatccgtcctagatcagtagcttcaatgccctgtctaaaaatcattgacgataccatgactttacgactcaaaataatgaatttagatttcattgctttatagacaatcttaaataattattagattaatactgtccactgatgaaaaaagtctgcattttaaagaagtatcctttcaagtcctattgtattatatttattggagtttttgtgactggagttctatcttgcaatattgataataatcagtcatttgcaagatatgacaccgtggcatcaaatcatcaaataaaattagaagaaagttatctgcccggaattatgtatattgatacgcaagatgaaatatctctttccaggatttcaagtgatagtcctcctgccaataacagcaatagcaacagcaacattaatacgtttccagataattcggaatttaggcaagacattagtggaaagtatagcaatcctaaatatggtataacagaatttgaaattcctgctggatggtttgcaacagaaggtatgaacggagataatggtataatcctcgcaatgcatcctgatacaaccgaagaattttttacaaagctaaattctccttcaaacaaagaaactctacccataatgaatctaattgtacaagacagagaagacctgcgagaaagacaaatatcatctatatctaatgctgaaccatcttctctttcgaccaagtgtacagaattaacacaaaattcaactgctacaataaacgataaacaatttcaaatatcaacaatgaattgctcaacaaaggataaagagcccgcacccggtggtattgattttggtcatgatgagtcaacaaagtcttacaaatatgattcacctaatacaatttacgtcctacaattgatattatctagcgaatattccccaaacaaaatggtaaatgatgtagaccttgctaatttccaaccaataatagataaggcaattcaaacattaaaaataggataataacaaaatgcaaattctttattaattaaatggggtcaaaaatcattgctaactagcgagatgaaggcgagccactggatttttctgcaagggagatagagtcgtcaccattaatttcctgtttgactattagtccttgctgctcaagtgagtcaattatttgaattattggtataactcctaatctatgcgaataccgcttttttaaactactaatcgttacaaaatctgtattgagtgtcaattcaaataataatctttgaaatgattgtgaatacttttccagatcatttctagataaaatcccaaaggtttctgaagatacctgatagtattctgaaactctgtatatcccctcatagaggatgtttaattcatcttttttatcataaccaagtagtttgtcttgaacaagaattggtaggatactatttctaaacgctatctttgtcataggaaaattggtatcatcgtcccatccgatttctgtccaaaccttctcaaattggaccttttttcggacgtcaccattgaccaattcagctactctttttagaaaactaaatgcatggtcttgttcaacatagtccaattctgaaactttcattattagagatctctagcatttttattacatttaaagatgaattgacacaatatttatctacatttaagtgagtcatcatttaaatatgcaatgtctagaattcatgttgatattagcgcgatttaaccaaaggagaaatagattattgaaacgatatgagtatttttgagtttggtgatggctaaaatatttacaggtaatagacaaagaaatatttattgaaccatgatcaatataatgtatgtgctagtattttaaagttttagataccttctggcccatctatctttgaccggattagtggatattcgttatcgaactattacttatattgatctttggcatggaacttattgaaaatcctccaatatgttcggaggagaaattcttaactcctagataacccggtgttaaattactgaacatactataaatttcttcagaaatattttgacgcgcataagttgtattaagggtatttatcaagatcgatattgtcaatatcagtaatagtgaatgatgtatcatcaaaaatatttatgcaataaaggttaatacatagctatgattttgcaaatgatatcaaatcatccagattcaaatccaactaaatcgtcaataaggccattcttgccaaactcttctttgtgataataattcgtttcagctgttcttctttacatgaatttccagtattctaaaatcccaaaatacctgatttgattaatatactatcagatccttcagtgtgaataaaaatatcctccatatatatctgacttgtcatatatccatattgattaattatgagtgatgttgttgattaacttcaagataatgaaatcattataactcgcttagtagaactccaaaaaatagtagagggttagatattttagagacttctaaaataaacctctttgtctcattcatagcaagtgtcacaaagcagattatgtcttcaactttgtaattctcaaataaattattgaattgttagatctacaaatatttattagtaccattattaatatcttgtactagaaacgtcctactataaaatcatgataaaaaataaatatataaaaatactgttcttaaatatcagcaaatgttgtttactagcactaatatatcataactagatatggagtccttcctttgctaataattccaatatttttcttttgaatatttacaacaaccaccattctgaggataatcctttccaaagaattgttattgattgtaacacaataccaatcgcttaataatattatggtactgtatataaacatgttaactccagtaaaggctgacgttgagacacatcaacaacgaccacaaacacatcgggcattagtatttcaataaggggtgcattaggtgtatatgaagtgggggcatgcaaggccctgtatgataagctgaatgaaactgcttcaaaagagaagagttttggaatgatatttatgctgataccgcgctctatgaaagccccctttttacatggttttatagatgcttcatcatttttgagagatagatttaatgatttttggatgaatgcatttgagagctttgatgaatgttcttataactttagaaataatccttattttcaatcttttcagtatttgtggcccgacggacttgaaaattagcgtcgaaagaatcatttcgaagatctttttcatggcttcaattctcgtaccttccaatgggaattcacaatgttttatcacctcatacatcaacccgattttcactttatgaatccttttaacaatctgttcaagcatgataatgactctttgaccaaaaccattaaaaaatactgggactatgaagaactcccaataaagcctgcagaaggacgaccaagattactgggtgttactgttgatgtacaagatactacaacaataatatttgatagttaccccaaaaaggaatccaaaatgttatcaatttatggtaatgatgatatcaaactaagacatcaagtgcgatacgacaaagggattggaattgaacatttgcttacaacaatctcttcacatgtacgacttaattttcctacattaaatgctataacaggagaagttgaaaatgatcaaatactcaaaggaataatgtcgcttcgatcctttatggatggtttttatcctagtaataccccgctgagagaagtacttcaatcgcatcgaaattattggtacaaagtgacctatatccccaaattgaagaaagaacaccatgggaccccgatgccatcaacaatagagttcaaaatatattgtttcatgacaagactaaatatgacgaaaaagttacgactatgatatcagattacattaacattattaatgaattgatagatatagttaggaccaaagacaaaaacataactaaagatagtatttacagccagttagagcaacaattgagagacaggttggtgagcaataacagcgatgaggggcccagagatattaaaaatcttaagggtagatttaccataaatcaggtacagcgggttgtttatggagatggtctaaagatagatgatagtgatgatatttttggcaaagcatttgatttttcaaaagaccattaattatctaatcgcgccgggaattaacgatacaatcgctaaattcgatctaaaatattaataatgttattttttattatcgctttatctaaatatatttacatagaaaaggagattatactattggttatttaaggtattatatgccactattcttgacttgaaaagtaaaatcagtctaaaaattatagtattaatacctttaatgttagtaacatctatgtgcatgattgcttgtttgctaccactgcaacaaatttttgttcaagtttcagctactacaagtagcaatgtaaccggaccattgcccgttcttttgatacatggttatttatcagatgcttccatatggaaaaagtgggaagatttgttaaaaaaagacaatattccagtattcccaataacttttacgcaaactgatgataaatgtggttcagctgccgaacatgcaaaagaattatcagatcaactcgttaatgtcaaagaccagactggtcaaaacaaagtaaacatagttggtcacagtaagggcggtttagatgcaaggatgtatttagccaataacactcaggatgttgccaacttaataatgattggaactcctaatgccggttctccattagcagaaaataatgatatatgtgcacctgcagtatacgatctgaaaccaggagctcctgatacaaaagtaaaggagaatcaaaatactcaatattataccattgcaggtgattggaatcctgatgcaggaaactgcgacctatcactattttctcctcttcagcaaggaggatataatagccttccaaaacccaacgacggcatggttccagtatctagtgtggaatcattagaatattcagatagccttggtcatagtaaaagctgtcactcgaatttattaagtgaatatgaatatgggttagcaaaagatgttctcttaggaaataaataatatcgtagtgataggaagccgatccaatcaccatactattaggagcgtatataattatatattaacggtgaaactgaagcgataatgattagaaggtcctgcgtcgaaataattaaaaaattttctaaatacatgaataaataatctaagaatttacccattgcttgataaaactatatccgaaagaaggaatatttcttgcaatttttcgctaaactagccttattgttgttgtaaaaatatgaagtttgatattttagtttccttctattaattaaatatatttctaaaaaaatacttaacagtataatatcaatattatttattgctttagaacgtttatacttggaaaaaataagaggtgtcttatatcgactatgcacagatgactatgattttagtttcgtgaactagaaatatacttgaatcacaatatttgtggtttttgtactttatatttgtaatacaaaatgtaaagtaaacatggagaatgaataataataaaagtgaacaaggccaccactaccaactagctcctgatttgacaattcatagaataatcaatggcatgtggcaggtcgcaggaggacatggatatatcgatcatgaattggcaattgaggatatgatgaaatatcatgaagctggctttactagctgggacatggcggatatctatggccctgcagaagattttattggacagttccgacggagattaagtgagataaaagggaatgatgaactcggtagaattcaggcattaacaaaatgggtaccccaaccagaaaaaatcacatatccaatcgttaaagaaaaaatacagaaatcgctaaacagaatgagtgttgactctttagatttacttcaatttcactggtgggattataataatccttattacatcgccgctctcaaatatttgtcagaccttcgagatgaaggaatagtcaagcatataggccttacaaattttgatactacacgtatgcaatttataatggattcagggttacaaattgtaacaaaccaaattcaatattcgattatagatcgtagacctgaggtaaagatgatttctttttgtaaggagcataaaattagacttcttgcatatggaagtctgtgtggtggcctcctatcagaacgatatttaagaagaacgcaacagccatctgtaattgaactagatacgttaagtttacgaaagtacaagaagatgatagataagtggggcggatggagcttattccaagaacttttatccactttggatgaaattgcacaaaaatacaatgtgaatattgcaaatgtagcaactcgatatatcctggagaaacctgtagttgcaggtgcaattatcggtgctaggcttgggatatctaatcatagaaatagtaatgtccaagtattcaacttcagtttggataagtcagattatgatgccatagataccgtatgttcaaaatcaaacaacttgtttgacatggtgggagactgtggtgatgagtacagataatgatttttagcctaaatattctcattaaacagtttggaatgttgttccaatttgggagtagtaagcaatatgtaactctcgctcaatattagcaacatactatgattaatgattcattggattattgatttttcataatccttattttttaaaagtggatgcttttgaagattatctaaacaatctacttatttagatccgtagagtatcataagtcaccaattgatggatagtaatctcaggaaataataaattagacaaaaatgtaataaaagtaagttttaatccctatagttacagaaataatacatattacgaaggagaggattacgaaaagtacatttcgtaaggaccttaattaaaaatcatattttttggatatatttttacatgttagatattatttataatttataatttataatttataatttataatttataatttatgcgacctctgtggatatcaacacgattttcacaaaacaaacatctatcatagtaactgttctaatatgcaattcgaattgacgcaattttcaaatatttaatttactagaataggaatggtcaatatacttgttgataaaaaaaattatagcttattttctattagatgtttttccatcaactcttttcagggatatgacattgctatcatgatttgttaattttccataggatctagtcctgagaattgaaccatccccatcagcaccactacatggtgatttgtcatacattattacaatcgtattaaaatactgttgacctgtcaataggagaactaatattatctttagactatcaatctatggtattaaatcgaagattttatatcaataaaacatcttattgaaaataaggcgatttgaatatgaccagtgtaaagttctataataaccaacgactctccgatattgaaaaaaacattaatgaattccttaagaaagagggggtgaagcagttaattgacattaaatttaatgctcttaataaaaacggcattgatgaatatactgctttgattatttatgaagaaaatatgcagccaggcaaggaagatcctcaaatgtacgaatagtaatagatcctctacataggatgtcccaatcactattactatcttcaaagttctcaataggcacagttttgatattatttggcataatatttctttttcactagggatgaagtatctctactaaacaaacttatcatataggacaaagatggaaagactgacaatatattaggtcgaccgggcaagacgcattcagtcgaatcgatttaaattctagggagatgacgttataaaattgctatatattattaaataggaagatctactatgttaactatattcgtaaatcaagaaaaagttaatagtaaaacgtcggacaaagactatatccattccaataaaaaagggaaatatgcgacttcaactgaaaatcggaggttggtatgggaatatattgtgtggccccttatactaaagattaacagaaattattttacaccaggcgaatatcacacaatcagaaacaaagtttcattagaaaagaatattcctacttcaaaggtgtctggagggctggtatcactattgcttaaaggaatcctcactcaagataagaaatattattcaattcattacaaattaattccttatatgagaataaaatcccatctggactatggaacagttttaagagaaatttgttctaaaaaatgatatatatttagtggtaaattagtcttgaattccttcagctatgtatatgcatttttttcttcttcataattcactaaatgattgattattgtcacgaccttgcagtatcctaatcatactgccaatagattaacgcttgactcttttaaatgacaaatattttgcaaacttgatttacctgattagataacacaagcagatacaatttgatttgcatatagcagaacctgctagaagaattatctaataagatttttatagagaaaatactgtgaatagttttaataggttaatgactttaaatatacaaaaagaatatctttaactgtaaagtaaacatattgataaaactagattaaactaattcaaatagtgattctcacggtgaggtagaggtttaggattggggttaagtgttcattcacaaatattccccaacattttttcaaagtttgtatccaattttgacattgacttgttctgaaatgtatattttgaaaaaaatattatcaaactcatagaggtaatattgactcaaaatcacgacaataatgatgaaaaggatgcaacattctcatttgggttacccttaaacaaatgattacatgcctaccagtcaatgtgtacaagtttattataataaatgtatgtagtataataactacattacatgggagacggcaaattattgtctgactcacccgaattattttctagcggattggttgcgttaaacttttcccctattgttaaagttggattatttggataagttagatttgaagaattttctattgaagattgtgatgctactagaattatagactcggtattaaaagatgccgatacactgagaattcccacaaatattaagatagtagctttaatcatatgttcataatgctaacataatataaataattacaagatattgattagcatgatttgttttttttatttagatatttctacatgtatgagcttttgtaatcttgatggatgaagttacactggtgtttgctaacaaatcggattgcaaatgttttaatgagttcaatccaatcaatatctaatttagtaacgaaattttagatgggtatactagaaatgctaatttgcagtaccatccacccaaccattaaagaactacaattatcttagtaaatgattactaaaaaatattcagatatcatttatttctagttttgaaaagatacccattgagtaatgatgatataaagaagagcgagcaaaatgatgaagtgttgatagtaaaaaaaacactcgctcaagaattttttgactttttaaaaacgtttggtgtaattggactagcattagcctttgtcgtaggtcaggccgcttctggactagtaacttcattagtaaatgacatcataaatcctctgattggtctatttttgccttcgggaaatctggatgccatgtccgccaaagtgattaatatatcaggcgagcttacagagtttagatacggtcatcttgtatcaagtattatcgattttctgatcattgctcttgttgtatttatcgcctataagcaactgtcgcgatttaaactggtagatgaaaaaactttagctcagaagaataatctttaatatttattttgagtggtttcctgtacaagtctaatttctcattttgtggaatagtcaaatccgaaatgtatgtctgtccttatgagttcaacttaagaatttaatgatagttattctgaaaatattcaattttcatcttaaaaaggagaaatactagtacttttggtagggattatggaaaatcactcaatcaaacacactgctggttctgttataatcaaacaattttctgaacccccacctaatccggagccttaccctacccctgatccacgacctcagcctacaccagaacccgtaccggagcctagtccagcaccaaatccggaacctgaaccatactaatagactacatattcttagcttatgaggtctctgttcttagcctagtttgttctctccttctattttaattcctttttaataatatccttaatcaatacaaaatagataaagcgcaaatgtctagaattattctatagtcggatttacattaaatatgctgttagcaggaatgtgtactaaaataaaatatccattatttttcctcatctcaatgtttgaatgaatttcttgaaccggaaaagacattaaaaaagttaaaaatgtatgagttctgttcctgtggtcacatcttctttattattaggaagatataaaccaagaataaaaaacaggttaaaaacagaatcggtttagatgtattcatgttctagcctattctatctcgatgctcaaaaagaattattattatattatttatttcagaatttacattgtttctaactctatatcgactctttctccttcaggtctattaattagttttcgtctcgagtatatgaaaaaacataagaacctttagtaatgaagccatcatctttggatagaactaaccaattgatagtataatcaccaaatattaattttgacttattcaattttacagtaagtactttctcagaatcgcctaccttgaggtcattattgtctatccttgtatcattaaaatcggtgacacgtatgatactcacttttaattcaggcctctcgctaaaagtaatgattacttcgtcaggtattacttgagtagaattgataatttgattaggttgaggttgataggcaataggaccagcatgaccactcacgggcattaataacatgtaatttcctttcatatacaaaatagtagataatataataactaaaatgaacgtcttattattactgatactattctttagtttcattgttctacccttcgacaaagtcttactgtcttttataatacaattacgggtttgtatatttataaattttaactctttatctatggaccatctgctacttacattctttaaccaaatttatacaaaatatttgtcatttaggtgttcaaaaatcatattctttttacttgccaatctctttgaaaagagtcagctgaaggtcgttatgaatgtttgttgaaatagttgaaatagagtaagcaactgattatccagggttcctcaaaagggttcatgatgagctctcatttgggttgtaaaaaggtccgtataacctctcaacaaaaaatagcacctgatctagaaattatatttgtttgtcctctactttattgacctggtgatatcacatacatatatagaatatactctacccaacatattgattttttatagtcatctgtaaataccaattcgcttcaagttattcctaacgtgtatcttatctaaacatatggaactatatacattcttaatagaagaagcataaaaacgaaattatgattcttaatattattgtatttgttatagctaatagtataataggaatttgaagtttaaaaaaaaaggagtgaacgaaaacagctcccctagagagtattgcagttgggaggaagtcggattattgacaaaggtagttgcaactaaaatacaaagtttaaacaaaaagtatgatgtgatcctaggaataaccaatggtggaatcattccagctaggatgatggccctccatcttgacatacatcatattcaatttataccagttagaaataaaaatctgtatactgaagaaatgcctcaattaacgaccgataagaaatatcttgtagtggatgaaatatacgatactggtgaaacatttactaaagtgcaccatgcaatgcgaattatgagaagattcaatgatactaatggcaaagacacagcatttatcggaaaaatattgaatcatgacaaatggattattttcccatgggaacgaaaaatattatcatagtatagatacttacatcatcagaaatacttttagtttaacaaatagaaatgaattgcattaacgctcaggtcacgtacgaaactataagaaccatagccttttaggagattggatagttgaacaaaaagtatgattaaagacaataacaataaagatgataatcacgtcacagtctagaggtagaatgtctactactataatgatttgtaacttgctcttacgccataacgaaattaatacctacaaaacatacctgtttctgtaacgacaagatttccattcgactttgaccatgatgccgaaataaacattaattaacaaatagaccatcatggataataaactatgttaattatatggccagtacaatgagtaatagagatctaaacccttttgactggtataaaaatttctttgcaagacatatagacaaaaatagagaaaggtttttcgatgattacttttccggctttgagaagatgcaagatgaaatggagaggatatttaagcaatttaataatatccaatccaatgcaccaaaagaattagtaagagaatatcaaaagcctgatggtaccaaagtgcgagaagtaggaccgatcgtatatggatattcgatgaccattggaccagatggcaagccacatataagccaatttggaaacgttaaaaactttgcgggaggatcaaatgaacatgaattaaatctctcaggtattgggtcaggaccagccttaacagcagaaagagaacctttagccgatctaaatatcactgataaggaaattaaagttatagtggagatgcctggagtaaaaaaagaggagattaaaataactgcgatagagggtacggtagaaatcacaactactggttatcaaagaaaatattataaaactgtagaaataccacctgaagcagatatcgattcagctagctctacctataacaatggaatattagaaattgttttcaacaaaaacgaaaatattaagccaaaaggtaaggaattaaaggtagaataatgtcacactataaccatactttttcatgttgtatgtgttcctttcgttaaaaaatgatttaaaatggcaagtgtaaagtgctacaagaattatcaaactaatattgatgatctctataatcatataaagaaagaactttaaaaggggtcatctgcaaaaaactgcagtcaatggatcgccagtgggttagctggtgctttaatagatatcgtcatacaatctttttctaaaaaaaattaggaaaaaaatgcatcatataagtgaagagattgatccctaccatggccctgttctttctcgtgcggtcatgactgatcggcttcagttgattcttgagagagcttacagctagccttacaaatagatctgtcgattatatgaagttagatagggacgaagataatttacctagtccttgagactgctttactggttcctttgtttctaatatgctgcattaaataccgaagccggaggccggacggtatcgccttcagatttattaggtacttcattgcaattggatttctgtcctgtttctagatacatatcgcactcaaggcatttcacattgccgtctggtccataacaacatgtttctttgcttgtaccattatcaaacttacgattaagaaaagtatgtttgctattatctagtgctaatacttcgtttgaggatgaaatatttgtcaaaaacagggccaggatagctaaaatacattttgataggaacgttttatttatgtttattttttttatttaattcatgatcctacttctaataaaatcataaatcttttgccaataattttcgatattctttgatttcattctcttagaataatagtttacttggaacaaaaatattaatttagactataacattacaatcatcctattagctgacaaaagtatgattatgtcaaccatatcgatttctattttgtgtttatatgtatatgttattttcctttagctgtttatcgcctaccagtttcttgtcatatagtgcttatttcaaaggtcatatatcaaaaatgtctctttaaacggaacgctatattaattaaattgcttaaacaaaatccgatatgttcttagatttataaatatacaaataagaattaagtctgcatacactaaattggctgccaatggatttaacgtggtaaatatgggtcatcttggtccgatgatccaaaaaatgaaatactctaatgatggtatcctcttgaacaccatctgataataatcaggtgcggtactttactacaaatttcataatcactataatattttcatctatttataagatgtttaataagaattaatgtgagttcaaaaattgaatggaatgatgtaatcagaaaggaagcaagagggataaatgatgaagatcttggagaggtgcaagaagtgtcaaacggttttatcgtagtacaaaaagggataattaacaaagaaaagttttttatcccaaaggacaaggccgagagctttgatggtaaaattcttcaatttaaagtatcaaaggatgaagtctcaaacaattatcagagagacacttatccggaacctacccatcaagatgagtccgataaaacatccactatcaggaaacccgaaaaaataactatagatgtgatcgaagaaaaattagacatttctaaaagagctgaaggaagtcacgtttcacacgtcaaggaatcagtgaaggaaataagaacagttcaagttccagtggttcttgaggagatatctaaatagagaaaaccccatacaacaaaacaaactgttacttctcaaaaaccaataacttcaggaaaggagatgaaaatggacctaacgcaggaaaagatagagatgtccaaaaatctataattaaaagatagtgatagaaaagagctaaattacagaaactaggcaggtcactgaatagatcagttcagaaaccggattcaaataataaaacgacaaacaacacatattatctctgtaaaccgttgaattggtaataaatttagaaacttagatgtccgttaataaattgcgtattgacaagttatcagaatccaaccgaatctaataacgattttatcaaactttaagataatttgtaaccaagtaaaacatactacttaatatttgaaaaagatgcaaactgaaaagaataattatgtaatttgatagatttatgaaaatatcggatttttttatagaattataatgtagacattttattagataatatgattgattacaaattcaaaatagtctggcaggcatcatattattgactagtttctaattatgtatgcaattttaaatatcgtccaatagatttacaaatttttaattcaaataccactctgaagttaatcagtattttaagttatttgtgatagttatatagtttattctcaattaggatctatgaataaccctaacaatgatagtagtagttttgattggaagaataatagtatagattggaaagatattttaaaaaaagaagctaggggctatgacaaaggagatgatttgggagaagttcaagaactgggtcataattttgtagtgacattaaaaggaagaataagcaagcacaaattctatctaccaaagcatttggtgaaaggttatgatggtgaaactttatggtttaatataactcaacaagacgctgaagataatttcaaaaaagataatcctccaaaagaaggagaatattctaggtatgaatccgcttctgtaacgcaacagccctctgattcaaattcttcatctattagtccaggagacaatattggtagatcgtcaactggtaacattaatcttaatgaacgccttcctttgatagagcgaggcagccaggtttcaggttctaataagaaattcaataaatcaaagacagctgtggaggattgggattcaataattcataaaggtgctagaacgggggaagggctagccataggaagtgtaaccgccgttaatgcagattttataattatcacttctgaaggagcacgagaagaatatagtattcctaaaggtgaagtcgattcatataatggttcagaagtcattttaaatatctccaatgatcgactaagtcaatttaaggtaaaggtccctaggtaaaggtcaagttagtaacaaagttggtatactcaacgaaaggagattataatttttgtctctattactacttctatctatatagttacttacataatcaaataactggaaggtgcctccttggtaaaataaattggaatcctaggaatgttttaagataggttcttactactttgtatcctagtatccaaactattgcattagagtataatggaattgataatcactttacaggaaataatataagtactctcatgagttatatcattagtcataaatgtatttaattctctaattctcaattaataaatgttgagttctcactgaaaagagtgtcgaagtaaaataaccttatagatttataagaatttggtaaggttttcattcaatctaagaaaaatttatttaaggacttgaaccattaactaagtctttaagtccttcaaaaattcctccagtagcatttgaaagggcttcgccagtctcattgacagcaccacccaacccttcagttacatttccggctgcttcgccagtctcattgactgcaccctgggcattctctcctgtttgattgacttgagttgtattttgagcaaaggagttgacacccatgcttccaagagaaagaactaatgccatacatatcatgaaaattgttgcattcttcatttctaaaaggaaataaatagtaatatataaatattatgttaataggaatatttcgaccatgggaatcaaccaagaaccatgtcaaaaaagccgttctctttctgagattgaatcctgatctctgatagtaaacgttaagataagcgttatgatagaaaatcatatttttgctttctcacttcgtattatgaagctacagtctattgacaggcattatcattccaaggcaatatgagtttaaagttaaaattatattctattctatctgatattttagaatataacatgtgaagcccttataacgtctgcttcatctaggaggttgaatgtagataattataagttatcatgacctttctgttatatgaacaacactttcaaagaaaatggcgatcccaaagacaacaaagatagccaacaatcgtataacgatactctatcaaccagttccgacatgcaagatgaacaaattgtaagccaaattccactctattgcgaagattttgaactaacaaaaaaagaagtagaaactaacatccaattggagaaaacatgggtacacacgacaaagaaaattgaaatcccaataaaatacgaagagatcctactcaacggcaaagaattcggttcttatgaccaaaaagaaatagtggaaatgctatcaaagataaaggataaaatttcacatgtttttcatcatgatgaagagcataaaaaaaacaataatgaagattctcgaccggataagaagtctgacaagcagcagcagcagcatgataaccgtgatccttctcatgaaaatagggaattagagattcattatactaaacaaggttcaaaaaaagaaaaagtcgattcgccatcaactccattggtatcaccaaacggctacaatactaatcaattcgaaaaagtcattcctttatggggcgaagaaataactatcaatagaaaattagtcaaaatgggggagatcattattagaaaatatcaagttagtgaaaatcatgatatacaagttgaattaaataaagagaaatattcgataaaatatcctgatggttttgatattaatgaaaaatataaaaccttgacctaattgttatcaggaatatatcttttgttaaatactaggatatgtgtctacctcaaatgacaaaaatatcgatttagatagtctggccgaaaaagaggccgtaggaactgatggcttagacttaggtactgtcaaggaaattggaggtacctttattattactcagaaaggtttgataaataaaaaaaaatatcatcttcctgtctcatctatagaaagctttgatggggatgtagttagattcgccataaatgaaacgaacttggaaagttatgaacaaggggaggaaaataaatttgatgattattcttcatttaaggcatccgatatgtcaaaagcaattgaaactacaattcctttactgagcgaagatctgcaagtcacaaaaaaaaatatcgaagataatataaaaataataaaagaacctatgaaggaaaccaagactgctaaaattgagttaatgtatgaaaagataacaattgaaaaaaagcctatcaacaatgaatataatgatctggaaaattttaatattaaaaatcagaaatcatcgtcgaatgaatctgaatccacaacagagcttgaaagccaaaatgattcaaaatttaaaattattattccaataaaaagagaagaacccgtaatcacaaagagatcctttgttacagaagaattaattgtaaggaagcaatccgtaacggaaacaaaaactattacggaagaaataacaaatgaagaaataaagaatgacagtcaggacaatgatgaaagtaaaaataggataccgctttagtattaaaaacaatattatacctaaaagttattatgaaataatttattgtcctcattaaacgtatatcttcaaaataatctttaattatattttttgtatgctttattatactacttttaatgatatgctgtatattgtttgttttcaccatctattaaatggtatctaagaaagttacatcaaaagatgataaaaaaggattagcttctgcagacaaagaaacaaagaagaaggtcgcaagtaaaggtggaaaagccaaggccaaggtcaccgcaacaaagaagagtagcactacgaagaaaaaatagtattaaatctataatacttatttttaataaattttatttctttaatatcttggattcttataaaataatgacatgatggaataaataaattctttttcatggtaaatttctggtataaataaaccatttaacagcttaaaattataattttataatgtattaaaataactgtttaagcgattcgtatcttttaatatattcaattcctttgggtgatattacatagtgaggaacatccgtgtactcgctatgcaatattaggtttttgttggtaacaggtttaataaattgataagataataatgatgagagtgtatgcttgtttgttgaaatcctgtatttagtttgtgggattggctggttttttagataaagtagtgagtcatacacactatcatagcgcgttttatactctttcacttttactttttgtcttcgaactaaagccgtcacgattaaatcaaacattataaaatatatgcaaatcttaatacgacaatcgattaaaaataccttgtaataaatatagacagttaaaatagtagaatcattgataaaatagtcacaaaggcgatgacaaactatttttgttaatataaaaagactaacccaaatggaatttgctctcttgttcatagccacatcctaaatacgttttggaaattatcgctgttatatagaagtgttcacctgagttggtaacaacagtccataaagaagaactatccagagagactttgaccctacagcaattgatggaaaagacatccttgttgtgccattcgaacttttacaattatgtgagcaataaatcaatgacgtttctatactttatcatcaaacatgtacaaacaattaatttcattactttatcctgttataggagtccctaggacatcaaggagaggagcgaacaggacatgacaggataggtataatgtaaagaatcagtataaaactcttaaataaaacgcttaaataaaactgtataaatttaattatctgttcgatgatatttaattattataatggattcttggtatagcaaaagtgcgcctgtgtttaacagtaagaagagtaaatcaattcttcatccatttactgtaaataaccacaaaggtaacaccttaaatttgtaccaaggatgtcagcacagatgcggatactgttatgctacttatgaatggtcgccagaattttatgataaaatttatgcaaaaagtaatgctcctgaaatattagaaagtcaattattaacttggaagttaccaagtgtacaacctgttatgatttcctcagccaccgatgcttatcaaccagcagaattaaagtttgaattaacaagaaggtgtgttaaaattttgcagaaataccatataccttactatgtattcacaaaatctgcattaatatctagagatcttacactccatgaacaatacaaacataattgctttctagtgtggtcgattacaacatgtaatgaaaatatccgacgaataatagaacctgggactccaccctcatttgtactgtttaaagtgataaaaagatttagtgaccgtggaattcgatgtgctgtaaatatcgatccaatacttccgctaattacagattcgttaaatgagattgagtcaataatagataattgcttcaattcaggtgtccgttatgtatttggagccccgttaagacttcgatcagatatttgggaaagaatgaaaattgtattcaaactggtaaataaaaaggaaacagaagttatcagacagtataccaaactttatcactttaaggaacccgtgagacagggttataatttttatgtggataaaatttatgcagatactatacaaaaaaatctaaaggaaaaggtaatggagaaaggcatgttgtttgatttccctcatctagatgaaaacagatacatgtcgaaaaaaaagaaagacaataataaagatcaacttacattattgaatttcattcagaaaaaaacattgccgtagataaatatagacgatatagataaaatgggggtagagaatagtgattcagatcgagtgaagttaaacaagatgaacgaaaaccgcttaaaaattaggataatgtcttgccaaggtagcaaaatttgaaaaattataatatatttaatctgtattgcaattttgattctcattatgtgcggaatttatgctatcgcatttattatggagcaatatcatactcatgggtcctcgaacactcaaactatgctgttactactaacacgactaatgctatcctaatgctaccactactccgatgaacgtgactcaagttaatgctacttctactaatagtaccaaaccagtcgatggttatggtggttcacccactgatccattaacagcggtgagacacctatatgacgatcctatccctagagtatatcagttttgtaaacctaatgataaaattatgacggtatgttagctatacgatagccgttctccaaatacaacattgatcggagtagagtatatgatcgattgtaaagtatataaaattttaccagatagtaaaagctgaattggcattatcaccaagaggaatttctccagaccgagcaaatccaaaattcccctttctaaatgacccgcaacaaaaagaacggctattgaaattatctgaatcaaatgggaaggttatttagattgggacccaatagataccatacccatatcctacctcaaatacaacaagttcaacatccatttatggtgaaccagactgtaaataataacactgaaaaatatgttggtagctttaaacaaacgttaaagtaccagatttattttatttagtttgtctgtcttctaataacttgaatgttctaatttcttttatggtagtgcaaaaaaattgtaattgtgatagatagaaattgggatggttagaccatgtaaatattatttggtagtattggaaagtttgtcctctgtatccctttctaatctaggtcctatcgaagcccttccaccaccggctctcgagcctccaatttcaattacatcgtcaaaattactaagatagcgtagggtatcaaaattcactcgatgctctatagcggcatgttcgccatgttcttcatctttatgaaatgctggaaccacaccaaaatctttgattattgtctcgcggaaagaatcagtattagatccctcctttaaaaatacctgaagcgtgtaacccggatactcttcttcctttaatgtatgtaacaagtctatgatcaatttagtttttactttaggcaggcaagttctcatggcatcctcaaattcagtaaatttcttctcgataccgtctgtacagtccatatgatttcacttttctcatatataatatagtataaatatttcatagattctcttagatatgtaatctttatcggtaacgtctaaaggtctttccctgtacatcctaggtaattatatgctcgactttgtagactaatattttaataatgacagactatgtaatcaatataaaatattttatgaatagtgttatagtattttaaaacatagaaccatttggacccaatgagtatgggaacactaatttcttactaaatttgtgaaattaatgtctctccttagttgttaccgcttttataatttctttgccaatttcatcagttcagcgtctaatcctggtgaaaactcctgtggagcttctggcatgataggtatttcagcaccttcaggaaatccttcaattacctctagggtaccaccatcatcaaatggggaatcacctttgaatatcttatctagtaacgatgtttctcctttatttgtaaatgtccacatttgattatgcaaattcttgttttccaagtctttaacttctggcatattggatgtatctattcttggaacgggtaaagctttcccccaatttactccaagagtctctaaggctttggcaaaaaccttttcatgcaccaaatctctgactattaaataggagactgtagacctaaaggctttattatcacacatttcatacaacctacacttttgtaatcttcccgtggcctcgagcattaaattatataacatgttaagcacaagatttccactatcatatacatacgcagcattccaaggatttcctgctgcatcaactggtcgagcactttgggctgcaaccaaaaagtggtgaatatttggagattctaatgcgattgataatggtaattcatttggttgattcgtattagttgaagcgccttctaaaaggatatttattgtatttgttatttgctctacatgtccaatctcttcagtagccatgcttcttagtaaatcttgatagggttttgcatctcctctaaaattcatattttggaaaaaatactgcatcatagtacgcatctctccaaattgacctcctaaaccctcttgcaaggcttgagcggccttgggatcaggtttatctgcaggcggtatcggatgaggaattctatttactgataaaaacatatcataacatactaaagatcaaagtatttaacaaacatattgcaataattagttaatcatttgaggaaattaaaccgtattatttcgttattactctaatacatacatacattatgacagattcaatttactgaatttacagtttaattctttgacagcctggacaaaactgatggtaaatatcatttcatttttgttcttttgttctatcgccatcttttttccatttgaggttgaaattcgattgtacaatgaggacattgcatactttcatgaataataaactatattaaatgtaaaaactgctcgctattttattactctctttaagcatgtcccaactgtatattgcaaattgaatggttataatattatttctatctattgcaaatgtttaaaataaacatgtcatgtttgaattatgtaacacaatatggttacaatcttaacttattccatttcttgctctaatctatattctatgtccagcggttaacctttctagatctagattaaatattactaattaatatgagtagaacccaaaagtattggacctaggttattatacggtaaaattcaaacttttattaaattattggaatgaaattggtaagatagttcatctactttttagttgagttatttaaatttttatacatataggatcatagtgccaaacaaaaaagaaaatatagaaaatctgcaaaagaaattgggtgaagttctaggcttagaacgagcagctcaaaaagcagtggatgaactagtcaccatgaagttattaaaatctgattccaaaactgaagctaaggaaattcaaggggaggcaagtactcatgaggaaaagattcaagaagttattggtattttttctgaagataaaaatgtgaaattggatgttgctaaagtagaagaaagtgctaaagaaacagaggagaaagctactcagattatgaagacttacctaggcgaagagccggatacatccgaagcattagaattcctgtgtctagcagaaggcggcgaagtttctcattatgaagttttacaggctatttgtgaaaactttgataataaaaaagcgttatcaacagtaaaatctatcctaaaagaggaacaaaggcacctctctcagtgtattgagatggccaaatcggcagtttcataataaagtgcttatcaatctctataatattgataaactgttcatgtaatagatgctacacaatgattctattactctttttatagtaagtgaaaataatttattgaagtaggatgggttaaaaacgtaagactaaaagtatatagatttgatccttgacctaatgatcaaggtccattacacttctcttcaataagagagccaatatgattggttacaatttcagcatgaatcaatccgatacactaatttacattgaagatgatattatcattgaataggataaaagaactttttcttggtttatggatggggaaataatagagaatttaaaagattatggataccttggagcaaggaatggctatcgcgatttatttgaaattacagggagaccaatatggttatcagactatatagattgatagcaagtccattatcgaattatgtgcttaataagaccatgtggcgagaaagtatctttctaatccatcccatgaccgccgcataaacccctcaaacctaattttaacaaaattgatgcgatgcttctaattctcacaattttgtaaccatattctggttttatagtatgttatataatcaatattgtaatacaaaatgggagaaattatagacaaaatcaaggataaagctaaagacgtaaaagattctgtggtcgatactaccaaagatgttgcgggcaaggcagataattcagtagatcaatcaggaagaacaacggtggattctactgataaagagtatgaagaaggggtagctgggacaaataagcatagacaaagcgatccattaacagaatattcagataaagaaccaatgactccggctaaattaaatgcaggcgagccaacggccgtaaagagagatcccagtgatcagaaaattacttcagaaggtcaaactggtacaactacagatacggctgctgagcaataccgtaaacgtggaatgactaaggtagactcagattcatccaatactatgtagttgatcatttgaattaactacaaatacggataaatttctttttttttgtgcctgttaaatgatgaaggccacattaagcaaataataattagcaaaggaaaatatctagtcaaggaattaaattataatcaaacaaaatacctgtagttgtctttaaatactactgttctaaataatagttgcagatttatctataagtccttaacattaagatatttggataaaataaattatatttaaaacatagaatcggaatcttttgacctttcatctagcataacacgagtgacgagtgaaatattgtctcaactttgaatattttgccccttgttataactaatttcttcatttgttatttcttccgtaatagtttttgtttccgttacaggattcttttttataactacttcctctcttacaaaggatctctttgtgattatcggttcttctctttttattggaatcaagaattctgcctttgaataaatttctgatccatcacccggctcttgacttgattccacattattctttaaatcaatattcgttcctttctcataggtgttgtcattttgattgatatttcttctttcaattgttaccttttcatgcattaactgaatttgcactgtttttgtttccttaataggtacttttacaatttttttattatcctcaataatgtttttggttacttggagattttcactgatcaatggaattaatgtttcttcatttgttgacgtatcttgtgactggagcaaagatttgtcatcggctgcactttcatcaattttttgttcataaattgaaagatctgactcatttaacgagaagtttagaaaaactccattaaagtattttgcagaagactttggaaggtgataaattttcttattgagcatacctacctccgtaactaaatagtcgccggctacttctttgactgtaccaaaatccaagccattctctccaagcgcttcttttcctacaacttcattccaattgatttcagtatcattttcagatgacatataaaatatattattttaacaaattatatattgataataggaattactctcaaatttcattaattagtgtggaatctgttaggtctggactgttgcttatatctgctcccaatatttgataaattagaataatgtggtataacaccaggattctttttctctcaggtagtggggagatatccaagagtataaatgacagctttagaaatgcgggagataaaagcctcttgattcaatttccgaaggaaaggaaaaaagtgattgtgtgtaattgttgtggcattagataattgactatttagaaataaatatctcgacgtgtttgccaattaactaccaacatgctgtcaaattactgaactatttaaaaattgatgtctatagtaagttatgagagcagttttaattttggtttcactattgtttatacctctagtaaatgtagtcaatgcacaaaacatagaggggcctggagtaccttttgatcaaacttccgataccaacgcaaatgtatcatttcttcccggagacggaaatatgaatttttcagctgataatatgacagtgggatcagaaaaagcacttaacaatacgattgggaatagtactgaatctatgaaacctggttttgatccaagtaaaccaatagacgagtatgatactaattcttctgattggaataagatccatccctttgcacaaggaaggagcgattaaatttagtaagcaccactaatccatccatcacattttataagtgtcttaatattaatgaaataatttcagaagttgtgggtcggaaatggacaaaaaagaataaatccgtttttggaagatcttagaaaagtatattctttcaaacgaacaggaggattaaagtaactgacaagagaaatatattatgaaaaaactacttgaccctttctaattttatataatttgatataacaaacattgattaaaacaaggtataagacttcaaattcaatgaatgcaaaatatcatattaaatgaaattaatatagaacttaatttcttacctctgatatttacgttattaatactaagtgaaaatgcctttcatctgcataacatttatttttgtaatgtctttggagacaagaaataacatatcaaaataaattattgtccgaacaggctttaattatgctccaccatgccctacagcgttaagatcgatctcatccactggccttccagttattaggaacccttgtaggaagagggatttaccatagtgtctcttataatatggttttataatattaatactgctgcgctaattactgttgtccacaaaccatctttatttccagcagctgactgagtgaaattttgtgtcttgtagatttttcctgagagcttccattgttcttcattctgatcccatgtgagtgtcgggtctgtgggcaatccaattgttgtggcgagcatttccatagctaaatcctcagcataatctccggcctttacagccgtctctcccgtcgaatggtgctccgacaaatacccatatcgagcgtcatcggcgggcctggctaacccaatggatgcagcaatcagcctgtttggctcgtttgtagccgatctagccattaccgtaaaaacaatttgtcctggtttcaaatattttcttccctcgtccttatttactatcttacattgcggtggcttaatactagaaacagatacaagattcaaatcgcttattgaagcatcacgtaaggcaagttcaaaacttgtgagataatctttgtgggtgcctctgcctttagtaaaaaacattatctttggaatatatgccaaaggatctgacaaaggtattttttcacttgattcatgatctccaatcatctctagacaaattgtgtaaatgataggttaaaaacatgattcaataattacagatttctaaaaagtctgaactcttcatgctaatgaactgtattttctcgagaatcctagatgtaatgaagattgaaaaaaaatataacatttgacttaacatgtaaattaggttttttggattgtaattactcttgtttagtctaccaaacaaagaacaataaggattgttttattgaatcgagtcttcttaaagcaccaaaatttcgcaatttatctgtcgagcatttaagaacgtttcaacatcctaaactttaattgctcctaatttcttcgattgaattacttaatgaatgcttcccactgataaggttaaatatttaatagtaaattttgacttagtggcgaaagtcatagcatttcattcatacaaaggagggacaggtaaaaccacactagcggtaaacctttctgccaatctggtgtcaaagggttacaatgttctgcttattgatatggacgtatatgctccaagcttatatgtatattttaatattcaacccaagaaatggattaatgattacttaaatgataaaatttccttttctgattccatttatgatttctcccatgttctgaaggaatttcatttgaacactcggatcaaagaaaatgtaggctcatttcatactgtattttctaatccttcaaagcaagaaataaccgatttggactcagtcatgagaaaggactcatcaaagtctcaaatgttaaagaagatgctatttttaaaagaaacgggtattgcagatacagactatgattatatcatactggacacaagtcccggtattcgatattggtcaattaattcattggccatttcagatactatttttttgtctctaaagatggataatatagacattgaaggtactaagcatctggcgatggatgtatacggttccttcacaagttatggaactatttcttatcttttattgaaccgagtcgcaggctattgtgagcctccggagatcccagatccaggcagctctatttacggtgaaaactctccttcttttggctcattagtgttagaacaaaatgaaactattaagaatctagaaaggttaattaaaatggacgttatttcaatgattccttgttattgtgatatgcagtttgaaagacaggagtatttaactgcattaaaaaatccagaccatcctttttcaaagaaaatcgatgaattgtcaaagagaattgaatagttcatgtcagcctatgatagttgagaatcggttaaccgctcggatatggaatctttttatggaaaaaaagaaatatctatttgatataataattttggatgaaacatttccctggtaatgacatcataagtagaaacttaacacaacctgagcttggaatatatctgatttatgggccaaaatcatcgggaaaattacattattgcaataattttgtcttaaacggaataacagatgggattttttgtatttgtatcagttcttcattcatagaaaggaaatataagcgcgttttcttctcggggaaagagaacctgtggattaatttgaaggtgttaaatccatataccttaaacagatacggtatgtctgatttcaatgatggtcaagcgctaatgcatctttttgaagaaatcagacaattagttgacacacattcaaatcaacctgtatactttgtcttaagttcattgaccaactttctcgaaaattttagtgatcaagaggtgatcaaatttgtcacaagtttggtctttcttctcaaaaactatgaaataaattccatttttacgatagacaacacagatcctaaatcgtccttattcgttaacaagatggcccatctttttgatggactatttgaaactaagttgccttctgattcttctcaacccctcaagtacataaaactagtatcaatatttggaaataataatagcaaatctgattggataaattacacactagataataacaatattatcacggcgattagtaatcaaacgagactaatttgcaatgtatgtaaggagcaaattaatgaatctccagtattctatcaagacctatcgtttcatcaggagcatttgaccatctatatgaaattagttaatttttacggaaactccaaaattgcggaatttggatcatcgggaatattatatgcaaacttcttctttattgatatcgttggattgtcagaccctgttttgtcagttaaaaatcaaatagaaaagatccagatattaaataatttaattaattcatgtaattcttataaaaaagatcgtgataagaagattcttccaactggagacggtatggcgataggtttcttgaccgatcctaaactccctgtagaattaagcttggaacttcacagaaaactgggaatacataattcaaattcatcaagtcaatctgtaattcgggtacgtattggaattggttcaggccatgtatttatagtcaatgatttgaatgataatcaaaatttatggggtccaggtataatacttgctaggagagttatggatttgggggaccaaggtcatattttgattgaaggtggatttgcaaataacttatttagtattgataatgagttaaagagagatatacatcatcttggaaatttttccataaaacatggtcaaaaaattgacgtttattctctatataatcaatatgcgggcaacgctgaaatcccacaaaaatttttagatttggacaaatcaatttaatatatcatatattaattatatggataaatcattaaaatctgatttgataaatacgatattccgtttttagggaattcattatcctatttataattaccttttaccgtaactatttatattaatattattttttttgtgttattacttggtcgatttaagtactagaaataatcaaattgctattgctcctatttttaacaatatgttccctaataactaaaagtaatattcaaatgtctatatggatgggatgggattttaaccggtatagtgtcgatgcctcgcatcttgagaatgtttttatagctttgccaagtaaaaagcctgcatgggtatttttcttgatgttcataaagtgccatttaaagaagagaatctccaagagctagtaaatgctccagcagatgaatatggcgtaacacatgtcaatttattttacaacatggaagctggtgtatgtttttgtttattaaacgcccctgataaagaggcagttataaagcatcacgataaggttaatatagaatgcgaatggataacagaagttagcatggcaacaggtaacgaatctttaaaatattctacaaactgagcgtatttcgttcagaaaattatctcctctgccaaaattaattatagggaccggaatagccaattacgaaaacaataaaacttgtcagtaatttacaatttattacattggcttattttgacaagtaaaagagtaaagataatcttatatctgtaggtggattaataaccttaagttattagaaatgccccaagatatcggcataaaggaagtcaatgtaaatcatacccttgatgaagcccttaatctaatatctaaaatattttccagtactgatcaatatttagaaataattgtagatcaagattggttatgccatttagtagagcatccttcaattcttacacttgtcaaaaaactgaagcatcgcagtattgacaccaagatcgtagtggaaattaacaagatgaatgttaactattcgaagcgactaatgaagtattctgatataaaacattcagatgggctagtgagctgtagctttagaaacaaacaatcctactgtttttgtcacatctcagaaaatgaattgagcgatctgagtcatgaaattgaacctccagaaaaatttgtccattttttctatgtcgataacactcattttgtaaaccaacaaagtattttatttaaacctctatggcatgattccgttcccgcaagggaaaaaataactgaaattgaaaaaggtgtaatggaagttatcttaaatcctgaatctaaatcagaaactcatatcaattctaataaaatactttttcgcatagtggaatcttgtgtagatcaagtactagtattaattcctacaactgctctcttctggagtttttatagtagcaatctgctcgtttcaatttcaaagatgttagtcaaagacgtgactgtaaaaatactaattcacttggaagatgatcaaactgccttaaaagacgaaatacgatataaactcaaagaattctctcaggatttggatattaatactaattttttctcaaaaaaaattccccagtcccatatctcaataattgtagacaatgttgttttagtagaaattgattacaagaataataaatccattcaatccgaagtcgaactcaaccaaatagtttccttttccattaatgatacccgcgtatcatcctctacgtcggtttttgacatgttgtggatacaatctgatttggaaagacaaaaaaagatcaaacaaacctattttgatatttttaaaggattcaatatgaaaagcgaaaattatactagagattggaattttaaaaaaaaagacaaggagtagtttaatacctatgtccaattttgcactaaaattaccagacatcttgaatgttattaatgtcccttggtgcaatgcagggagtctagaatcgaattaatgtagtgcaccattgtgatgctcttatcaattctatcatactattggtttcatgatgtatcttcaataattcatatctaatcccatcaatacaatgctcataatctagtaccattatatgctaggtaaatccttgaatagtattatagagttcaggcgaatttaactattaatgcataattctgtagtcgatataaattcaaaacaatcacgagaaaaataaactgtatttttattccatcataatcataaatataaaatgataattgctggcaaaaatccaagtcaaacaatctttcatcgaatgatatgccattaaccattaggtggctttccaatgaatctttctttttgtcgttatcaagaatccatattgcaaaatggtcaagtccaggctggcccacgatattaacactgttaggtaagatgtttgttgccctccaagtattagtggcaacatgatggtgatatccatctgcgacaaaaaatatactacaggacaggatgcaatatggtaaagaccaagcagagcctcgtaaaatttttggctttaggaaggtttgatacacataaatgaacatgacctatccatgtttttactaggaaaaccacttaatttccataaatttcatgatttaacaaattgttgatgtcccgagattctgttaccatctgtacttttttttgcacttatccatgcccattctcaaataaacgaactagcatcactttaacactcaaattttgggtataaaactactgtaacggataattttgtctatttaatatctatttaaccatctttcctaataaatgataattatacttactttactttagaaatattagcaaaaaaaatatcttatttattgattctaaatcaatacaaaaaaattattgagatttattcggtacttgataattgtcctctaatttcaccatttggattttgctcggtgtgaacattcacatacgtactaccattcttcattgctgctatcaagtctgatgttgttttaccttgcattggaccctctaaattaattgctgtaatattaccatttattgtaaacccattttgatctggattctgagctggatcgaatttgaataaggttaccacaattggtccgttttctcctagaactccgctatgtatatgagcttgtgttacagcctgaattcctgtagcattggcatggaaatcgattgtctcatttgttggctgaattgggacaaaaattgcttggccagttgcttgcgtatctacggctggaacttcttcttgacctgtaaggtttgcagcaaaatcgtggtttgcaaataccgttggtgtacttgaaattgcagatactgcaattacgcttcctagcgctagagctatagttagaaataacatcttattgtttttgattgtcatccacttattgtcaataatgtggtatataaccactttgttggtcttctcattatcctagaaagcagcgattgcctcttactgttacatgccgtttccgtcggccttcctgaagtcgattatatcacaaagaaaaagaaaattttaagttcagtaatacaactatcactatttaatcagtattttaaatttgattcatatatcaccatatgtctcactattacataatgtaagaaaaatttatattatgtaatatatattacatattttaggagaataataaatgtataatagagatataataccaagcgattggatcagccgattctttgatgcaggcttcggaagaggtagagatagaggattattcaatacaacagacgtgttcagcgatcttgacaatatccatgaagaaatgaatagaatgtttgatgtatttaacaatatttcaaccaatgctccagaagaacttgtaagagaatacgaaacaaaagaaggtagcaaagttagagaagtcggaccaatagtatacggatattcaatgactatcggaccagatggtaaacctcacgtaagagaatttggaaacgtcaagaatttgtatgataacaatgtaaaaaaaataggaggacaatcgcataataagtcgcctatatctgcagaaagagagccattagttgatgtgaatacaacggataaagaggtcaaggtagttgtagaaatgccgggtatcaaaaaagaagacataaaaataaaagcgtatgattcccaagttgaagtaacaacatcaaaggattcacagcgaaaatatcataaaaatatagaacttcccgagttagcagaaattgaaaccgcaaggtcagtatataacaatggtatattggaaataacttttgacaaaaagaaagtcaataaacccgcgggtaaggaaattaaaatagagtagactctaaatgactactctggaccttaaatgactatatttttttctaggtttctaaaatagaaactttatatttattttgttttgatcaaaattatttggtaatattgtgtattcacattatgatctgaataggtaggaccttttgatcatacccaaaacttaggaccagttaaatgaacttttctatgctgtgaggagatgaaaacttttatagatactaaagctgtggctcattaataattagagtgtgtttgatagatatttctttgctttctccattaccctcttttcaatttcgggtaaaggctgattatttattaattctttgaattgtaatgaatttacgatcgcttttccaccataatggttattaaaatatatgaatatagtatccgtattttcctttattttgttaatcttttttatccatggaataagttccttttcagaataaagataatcgtaccaataatggtctcgagttgtgtttcttccatggagtctgaccactgccaaattatttgatgttagattattctcatttgataaaaatcctagattttcatgcgcaggagaatcggttaaaacagatgcgatattaaagtgatgtagcaattccaaaactccttctgtattccatgaattatgtctgaattctatggcaatattgttcttattcttaatatcaggtcgttttctcagtgcatctaaaaagatctctaatctattggattcactaatagtaaaacttggtggtaactgtattattattgcacccaatttcttattgctttcaagtggtgaaattttattaaggaattcattaaaatccgttatcacattcctgttaatatctaatctcttttcatgtgtaattatctcggggactttaactgatattttaaagttattaggtgttgtctttgttagtcctataaataagccttcattcatgtgattatagaatctcttatagaaagtagcgtccatctcaacagtgttaaagaattgcgaatagtagttgagtttccgagttttattgtcaggataaaatacgtttagccaacctcccttttcagatgaatcaccataattccatccagaacatcctaaatataattgagaacacatgaataaaactaatatgataacttgataaataaaaaaaatcgattccttttctattaatgcaatgtgagataataagaatcaaaaatattgactcggttttcaaagttttaatctcttcaatgtatcatcatgattatgaagataggaatattaggatcaggggaagtcggtagaagattagcggatggatgtatgaatcttggtcaccatgtgatgattggaacgcgtaatcctgcaaaagaagaaatacaacaatggattgacaagactaaacataaagaaaatgcttttgtaggatcatttgctgaggcagcatcttttggagaattaattatcatttctaccctgtgggagggaactcggaatgcaataaatttggccatttcatccaattttaatgacaaaatagttattgatacaacaaatccattagaatttgctaaggatatgccaccaaagctttcacttgggtacgacagatctgcaggtgaggtgattcaatccttgctacccaattccaaagtagtaaaggcatttaatattgtaggtaatcctcatatggtttatccagactttcagggaggtccgccaactatgtttatatgtggcaattttaaagacgctaataaccaagtagttgaaaaattattaaccccattcggttgggagtcaatagacttgggaggaattgaacaatcgagattattagaaccccttgctatgttgtggataacttattacattcaaacaggatcgggaaaccatgcattcaagttgctaaagaaataataatatatacctcattatagtatgtggaaaatcaaaataaaataatactcgatattaactagatatgtactgtacacttttttagcacttgaattataaaatttgtgtcgatactgtttaatggatcattcctaacctaaaaactcatagaataatatccaattatcacgtattattaatgaaaacatcgacctacttgcactgccttaacaacttgttaatattgcctatagatatgttgatattctgcacatgagtaccatcccaataaatttttgaacattttgaacatctataaattgttgatatgcttttgtatactttctcaggaatgggattacataccattgtcttatcaagtttactaagaacgccgttgcaaatagtacatggggtattttcatttggaaccggatcgatatatctaataccacacttctctaatatgaataccaaatctttaacttcatcattattatggagtaacaaacaattattacccattttagagatctttaaataaagcgctttatctctagttaccaacatcttctgttcatttatacatttattgattaaaaaatcgtcgttagcggctaaccagaattcggtgtcaaaccccattattcttaatttctttgcaatatttcctagcacacaatcaacgataaatcttggataattcacaaacttaatcagtatgtttccattacttttagttattctaatattgataaattacttataagactttcttggtcatttatctcccctctatcggttataactgtccaggaaaaaagatcgcaaaatatttgatattttgatattattactaaagattataattcttaattgaacatcaaactctaaatttttaatattaaaagtaagattataagtgttgatgtgcaattagcttgaatgtctgctgataatgatgttcgaaataatttagcaaaatatgagaaatttaagggtggagagcctgagaaggtaatgctctatcatacacttaaacttgaaaacttgaagataataagtgataagacaaattatttggatatggatactgcaaagattccgattgtcgatttcgtatgtgacagatgcaaccttccaatggagaatcaacaacatccctccaaagtagatctcgtctgtgtaaactgtaatctcacatatccatagtatcagaacttaattttgagagcgttgtatcaactttgaaatgaccgaactattttcaaatatgttttgaatttagtataaggttgttattttgactattgcaaatagttctaccttaaataggatcatccttaagtgatcctaagttaagatccaaatgaaaggatgccgcgatgcagcaaacattacattttagggcagaatttacaatttcagaaggaaaaataaaacaatacaaaaaactcataaaggaaatgagcaaagtagtgaaggctaatgagcctgatacaataaattatcagttttatttcgacaagtctgagacaaggtgcattgtacatgaaacatacacaaattctgaagcggtattttctcatatcaatggggttgcatcaaaaacaattcttccaaggatccatgatttatctcgaataacgagatttgaggttttcgggattgcaagcaaaaagctacagaaagcgatggaaggattaaatccacaaatctatgttctatttacaggattcaatcgttaaatataatgtatttccgcgcctattcctagagaacacagtatgtgagaaaataattatcactccttaatcatccattgtgaaattctctacattaattatcaaaatagtgttaaattagttcgactaagttagtataatgactacctattataatttaatctaattaaacatgtttaaaataaatcaaacagaatatttttatcaatctatgttctatatgataaaagatgtgtaatgtattccgacatctcaaaaaacgatactgacattgcaaaattcgagagattaaaagataattttagttggttctattcaaattatgaggagttcaagaaggattttcataatcagtatgtggcggtcaaagatagaaaatatctggataacgacgtcgaccttgaaagtctcataaaaagacttaatttaaagaattacgacgattcaatcgctatcgagttcataaattctaaaagttaagacatttcgagtaaatagccacaattatttagcaaaagattgaaactccaggtaaaatacaaattcaaatcaatgtctagtggatatttattctgatgtagaattatcatcccgtagagaatctataccgtttgacagcacaactccaattcttactctattttatttgaattgctatatctgggtgtcgaataatctcgtcattactttaaataaacatttatagaaatatatagaaatatgattacaccttatcttcaacacgagaaacaggcacctgaaatttttcaacaatattttatatatttctaattatcaatgttgatttaatggtaagatacgtaaaaaaagagggtaaagggcctatggaaattaagtgtggcaatgatagtaaatggatttgtatgtgcggactaagccaaaaccagccattttgtgatggtgctcataaaaatacactaaatgaggaggatggaaaagtatataggtacaacactgatggcacaagaagtgagatccaaatctgaatgagtaatacttttgatttattctatttttttctaatcaatagcacaagaagccattcttggtaatttttcttgctaaaaagtatttttgtattgttgcgcactttcacacgtacaattatctattatttctataaggctagctcaaaggtgatcctttattgtatatcaacttaatatcggaattaggtattaaagtggacgagaatgaaatagatagatgataatatagttatatctacaatatatcttacaatggaatccgattataaattcaggtacgtgaatgaatacattacaaatttactggaaggaaacataacacttcagtatgaggatatcgatttgaaaggtgaaaaaaaaccggtcgaatatctagacaagattgaaaaatggttggaattcagaaatagagttagaggtgaggatccagatgaatttgctaaacttacaggcgaattgtttactcatcttttagctatacgattaggtggtgtaattgtagatcacacatgtgaatattgcgatatgactggtaacgaagatgtgcataataccgaatcactatcgacatcgacaccaactcagggatcaaatgaggtttcagagttctaaatttaattatttttacttttactttaattatttctgataaatcatcattctattataactcgtggatttattcaatgctatctaaataaagcatcaaaagtatgaaatggtctaactaatttaattaagtccatgacttggaaaatcaatttgatatttcaaatcgatgtatagttattttatttaatactattctttttgctgttaccctgatgctatgcattcttagaaaagaatgagcagagttctctgatttctgtgtttattattagccatgtgattattgttatagtcaaatacttaaccttgggtcctgattgtataattactaacacggtcctaaagcacctgtaaatcctagattactttaatattcttcttaccagattgtttagttataagagattttggtaccttttaatttagttgcctttctgaggaaacaaaggtaagaatttgattaattcttattgagaatcacaatgagtttacctatgaacatgttaattgaagttgctatgaaaagtctaaaaaaagcatataatccatattctaaattatctgtaggatgtgccttaaaaacttcctctggcaagatctatgatggggttaatattgaaaattcagtttatgggctgactatgtgcgccgaaagggtcgcagtctttaaggccgtttctgaaggacaccccgatatagaagaaattgccgtggtggcctctaccggaaagccgatctatccatgcggagcctgcagacaagtattaatagaattcaatccacgaacaaaaattcgtttgagtgatgaaaaaattataactttattagaaatacttccctttgcattttcaaaagacgcatttgaataaatttggtagaacacaactgactattgataatgcattaccttcaaaacaataacttcaaaatttgccaattccaactcactgtcgttatgatactatccagggaatcataatgattaagcaatagcaagtatcgttatccttggtggtccataattaaagagtagttcgtgctttatcctcattgttctggaactccagatttttctgttgatttgtttataccatcttttaaactactaaggtatgcaattgttgcacctagatttccaaaacctatggaatttaatgtttcagagggtaccattattactgtatttccctgaattttcatggtttcatatagcatatttgattgcctcaatgcatatgcaacaggattattggaataaaccttagacgcatcgagaaatttctgagccacaagaacctctgattccccgtatgtcacccttgcttgtttctctctttgagcttgtgcttgcattgacattgcagattctaattcctgtggaattattacctgtctaatctcaacaccagtcaccattattccccaattgttagattccactgcgatcttggatttgatgctttcgttgatttcttctcttcttgatagaatttcttgaaacaaagaagagcctatactatttcgtaaggtcgtttgtgatacttgttgtatcatgtcattaaagttttccacatttagatacgcatcgctagccctttcttcgatgattttgtatctgagtattgcatcaattgttactggaacattatcctttgtaagcattctttctgccttaaactccgttactttctcacgaacatctataactaaaacgttatctgcaagaggaattcttgtatgaatccccggctctacctgtttcttatatttacctaatcttaaaataattgcccgctcatactgattaataagaataagaaaggaggaaataattaaaatggcgcttactgttaacaatatataaaataccatatcaatatcggtgaccatctcagtccaaacggctgcgatcaaaattatgatagccaatactagttgaatacctgatccttttttggtaaatttattcttggaaaaaagcatattaacatttgatgaaatagacataagtatagaaagtaaaacaaatatataatgttattacaatttttttttaaaagtctatattattgcaatgatgagtgaaagttttatacttgatcgtctccaatttacagaggactagatgatgatctccttcgtagtttcttttacattacaaatgcttaatattgttactgcagaataatacaaatcattgagattcttgttgcaatttttaatcatttggaatttcttatgctgttcaccctaagtgacaaaacataatacttaattttgattacctattctctgcagaatgtctaacaatcacaaaagcaaggtggctcttgtaactgggagttctaccgggattggttttgaggcttgtgctacaatgaggaataaaagcaaatctaggattttagagaatattgcaaggagtgaaaatttataaatcagagtatttgaaatggatatggacaaagccaattctgtttgtgatactattgaaaagatagctatcgaatacggtaaaataaatgtacttgtcaataacgctggatatggtctctttggagcattagaagactttttaatggatgaaataaagaatcaatttgatactaatgtttttggtgtgattagagtaattagtgaagtactgccaataatgagacaacaaaagaatggaattattattaatattagctccctgtcgggattggcaggaatccctactcaatctatatactgtgcaacaaaatttgcagtagaaggtttgagcgaggcccattcgtttgaattagatccttttggaataaaattagtcttaatagagcctggtgtaataaacactgaattcgtaaacgatttaattgtacctaccaataaatacggaattgataaaggtggcggattggtgcgtccgtcttacaataacgaaaacagaatcccgttatccatctacagcaacacggttaacaagtttttatctttttattatagtgctatgagccatacacctcatccacacgttgtagcggacgaaatagttcgagcaatcgctaattcttctagcaatgacaataaaaacacaccattgagaagtagtgttggaaatgattctaaagaatattcaaagctcaaaaaggagttatcggacagagattttcacgaattattaaaaaagaacctattaaaatgagattgaaaaagatttatgtgaaagttaaatagtcgtgtactatcttcatttgttttgtatttgtttactgaaatgatgaggtgccttgcgctaattttctgccctcaaagatttgggccaaaaacactaaccttattgtggtttgataatcaaactaaaaaaattatagaactgttcacaatacttttgaaagcatttaatcaaaaagttggatagtcaaagttagtgttttaacaacttgtcaacttataaacaaaaaattgacctcttattatggtttaaactaaatacaattcaatacatactcgctaatgagtccacaaataatgccatgtcctttacgctttcaagggggcagtaattttttgtcaagtatatcatctagccaatcaaatatcctctgattagtgatagcgggtacaccacactgacaatgctcctctcctccttcttcttgggtaaatactatgtacttctttgatgaaggccctaacgatgtcaggccttcatagactttctttggttggcccggaaatgaatcgtctttctcaccctctaagacaagagtaggacatttaataagacttaaaatatctttagttgaatattttttagcaccggtaattaattcgtaaggtgaatttgttccagtagtccacattccatgttttatattgaattttacattcggatccgacttcatcaaatccgagaatgtcgcattaacaagttgcgaattgcctgcttcaattgcaaccagaagtgattttggcagacctgatttaattgcgtcgtatccatcatagaccccgtcatagagaacacatgccgatatcctcggttcaaatgcagcggcccttgcagccaaatatcctcccatgctgattcccattaataccacccgctctaaatctatattgaattccttcctttttattgtaataaagtcgaatacaggcgttaccaccttttcccaatcatatctaaaaggtattttctgtttacgaatcacttctccctgtcctggaccttcaaaagtcaaacaattataccctctttctaatgcgggtgcagcggcataagaatatagttcttccaatatagaatcaaaccctccatgaactataagtgtcggaaaattattactgcttgggatatctaattttctattgcgattatcactatgtactcgattagtatcaccatcatctatacatcccatattcttaaatgcggcattttgttcttctatatgataatagtaacccggtaaaattgttccttcataagggatttccacagcttcaactttaaatggaaacgtcgatatcgcatttctaaaacattctttactaagttctattgacgcatgaaatcgtggatcagctggctcaattagcaaaaaccccgctgtacgatagtaattggatgcgcgcaaaaaagcctcgtttgcgcttttcaaatgaccttctgatatacaaacctgggcatagtaatgtatcctctttgctgtctttatccattcatcgtaccaactctcaaaatcacattctttaatacgatatgctgtagcgaggcattctccaatgtctgctcctttatagtaggtttcagcaatagttcttaacaataatgcagaaaatgttgaatcattaaaaatcagtttcaatggtaagttaaatcaatggatccatgcagataagtattgtgattagtacgtaactgataaaaaagaactgtataagacgattctatttgatgctgttactatgtacttatcagaatatttcttctgttttcttttgaattacccgtggtcgctattttaacaattttaacaggtaagactgctccaaatctttaatttatcccatacaaaagaattcagggcttgtaaaagtcaattgtattgtttaaaatccatataccgttgaatatatagcaagtaattacaagtaatcttaatattttctttgcaactcgataaaattatgcctggcaaaaccaaagtaatataagattactgatgctcaaaaaaataaattatagatcattttttttaggaagccatgccagaattacttttcggattagtatcaaaaacttaattttagcttaaatattcatatcgctgaatccgatacaattagatctgatttgagagcatcaagcatgattttgcattctctcggtcttttgtctatctctaaaaatactatttgttgccataaccctaaatccagatggccatttttaaatggaattgttatactagggctacttagtgaagcgcgaacatgagaatgttcatttctattatgccatgtattgtcatgttcatattgtatgttgttcggtgttatcctagaaagcatattaggaagagtatttgagcccagattcatattctatggtggtaattgcagaagttgatccaaccacaaaaactgttgcaattccattttttagtttgcttttagctataactctcgcagtgtcttctgaaatattgacaatatcattttcatcattaatgttaattttaatagttatatctaatactttcataccagactttggtacgcctttttattttctttttgttttagttggaatcaactgatagaatgaatataataaatatttatggaacactattatctgcctattaccagactgttacaattcatatggctttggacatctagaacgcataaaatccaattctaggaggatggggattattccttcttacatctaaaacgtatctatcagatttcatttatggtagcactggtgcattatcagagtcatatgcttgcaattagcggcgcttatgctgattgcaaaggctacaggaatgattattaactgtcagaattactcattcattgtgaaactttttgaaaataatgtatattcaaagatccctgtagttaccattatgataattttttgtatttcagttattttttcaaatcacccttattcattctttgataactcaatgttcgtttatgcaactactaatccttctactacgaattctgttggaaaagttattgcacctgctcttaacaataactcattttccaattctagtaacttaaatacagaaataatcaaaaccatgtctgataaggaccggccattactttgtggaaataatgtaacaaattccaattcctatgttcatgaatttattacaccgattttgtgtagtcaacctgttggattaacagtggatcaagaaaataatatttggatagcatctggaaagtcaggtacacttttggtatttaatactaaaacactacagtttgataaaaccataaaaataccaaactggcttgaacaaacaagaagcataggttctatgatatgggatttaaaacttgataataatggcgacctctggtttactgatgagcttagtaattccatttggaagtattttgtcaaggaaggaaagtttgaaaattatagattattaggggaaggtggataccctctatcaatagcctttgattctgatggtaacgtatggtttacccaagtttttggcaatagacttggattttttgaaccttccaaggtgataaataacaccacagaaggtatttcagaattagatatgtcaagacaaatcgaattccagactatgggacctatttctaatggttttggattcaccaatgacgatacaaatagcagtactactaaccctaccaacgcaaatgatacattgtggttttcaactgctatctttcctgtaggagggcatattattaaatacgatataacagcagggtctctaactattcacgatgtgacctatactcatagtgttccattcagtattgcagaagatgaaaatggtactctttggactaatagccatattgcaaatcttttcttttcgttaaatccaactacaggcgaaataaagcaatatgcaacctccaacccctctacttctggcaatttaaccactttgccatattataatgaatatagagatggaaaggtatggttcaatgagcactatggaaacgccatagcatcatatgatcctaaaaataaaactctagtcgagtattatattccatcacaaaatccgttatgggttaattcttcaaatccccttagattcatatttgataataatggatcaatatggtttacagaatggactgaaaataaactaggtgtaataacaaaagatagactagataatattccaattgctattggagtatctaagaataacataactttggatagggaaggtaatagaggagatatgttagatatttacgtttataatactttatcaagtaaccattcaatatcaacaagtccattaatcaatgcaagtgaattatattctgatattagtaacaacgatacaaaattgaatgagtctatgaatataagtatggctgcaacatcttcaatatctaaaaatggtaaacttgataatcttacggcacagtttagtcctacatctctaatcgtcagtgaacccaaattatccaatacgagttcatcgccacaaactacctcatttaaaattgaaccaaccaaagaggcgattcccggaaactatacattgacaattagtgcgaaatacaatgatgatttgacagtctcaaaaataattgatatgttcataaaatagtaaaataagttcatgttaaaaatatgagtaatctactctaatggaatggatggctttaatctcattcattttttcaagcttgctaacgtgcatatactgatgatcgagtaactgactttgactatccaggcgaacttgttttggactgataagaaataaatgataaatgatttacttatttttcaatatatcatatccaatatcaatttatgatttataaatctcagtttacaatttatgaatatgattagaccaatgacaagttacaatggtattgatgatgacaagaatagtttagttattaaaccaacagagttaaagaaaaagatggatgagggcgaagacatttttattttggatgtcagaagtaaacaggaacatgatttgtggactatctcatacgacaactatccagattcacttgtcatcccagtagatacattagcttctatagattctctaaaacagattccaaagaataaagaagttattacattttgtgctcacggccaaaggtcttctatggcagcaaaaacacttgcttccttaggatataatgttaggactgttgaaggaggtatgactggatggagtaaactgtacgatgttgctccaatagatatcgaatcaaatattacattgaaaatttggcaaataagacgaatatcaaaagggtgtatgagctatgttattgcatcgacaaaagagaaaaaagcaataattattgatgctacatgcgagattgacaccgttatcaataatctgcttcaagaaaatggatttatagttagtaaagtacttgacactcatatgcatgcagatcatctatcaggttcagtcaaagttgctataaagtatggatcagagatagcagtcagttcatttgaaagctacatcacgcaacagttatcacgtgaaaaggaaccaaaatatagattaatcacagcgggagaaaaatttgagataggagatggattctacttagaagcgattcatacccctgggcatacagatggcagcatgagttacttattgaaaatacataatgttgctcaaaaagaagatataggcaaacaagaaaatagtggtgataattttgacaaaaatgatggcaattcaaattactatctttttacaggtgataccatttttgtaaatggggtgggaaggccagatcttcataataaatcagaggattataccaataaactttaccatacttaccatgacgtgatatttaatctacctgacaaaacaattatactccctgcacattacagctccgcttttgaacataaaaaacccattcttgattcattgggagctatcaaacaaagactgactactataattgattctaaaattaaattcatagatttcgtaacttcaaacataccgcctcatccaatgaattacgaaaaaatagtctatctaaataagaacttgatctcctgcgatagggtcgatcaagtggatcttgaatctggtccaaattcttgtggtatcaaggcataatgatttgtccctatgcgtgtagattaatgaaaatcctggtatcaccttgacagttgtaacacaacccaagatgtgaaggcatgccaaaactaatggttaataaagcaccggatatcttgagtaaaaggattatgtattctatgtgtgtcaataaatgagttcttgagaaaagttcttcgaaaattgtctgaaagatttaatgatcctgaagctagagcacatcttattttgacttttatgataattacctaatgatacatggtttccctcaaaatttaccacgaacaaagagggatttaaacaatttatctcttttctttggaacgccattactgattttagaatcatatttgatgagactattaccgaggaatttaaggtagcttgtcgatttactttgcttgggattcacagggataagtttctgaggatgcctccaaccaataagatttttagagaagtggtatgaccatcttttactttcaggatattaaatacgttcagtgttgaatctggtagatatgatttctttattagaacaattaaagccgtagtcacatctgctagattcatatcattttattaggagtatccatatgaaaggtaaacagagtgttgatgctattgaatcctctacttcattccttctagccaaaaattaacaatagtaatattcaaaatgtaattctatacaatggtaacatactttctttaggatggaaattcatttaattttcggatctttggtagataaagatctgatcataaagctctaacgggtagtcggtttataccacccgatctcaatttagtcgattttattaatcttatcttactagataatactcctaaaaatgcaggattaaatgggaatagtaaaagagaagttgcacttatactaaggtgtcctgtgggtgcccgtaccattaatcattagttgtttgaccattttctatgacggtattaaacatacttttgcattttaatgataataattcttgaaattgctattcctctataaccggatgaaagttcataaataacaggtttaaattttcttgacaaaaaatactcaagaaatgaaacaactgcctttccatgcatatcggctgtaaaaattattataatttctggtcttaattcgttaacaatctttagtagttcgtctatacaataggattttaaatttattttttcccacctataatgattacttaaaactaggtatttttcagtgtcaccttgatttggattggtactttcagaaataatagtaatttcgtcattcatttactggcacatcgtctatacatacatttttatctcaagtgcaatttgttataaaaattattatatgtgtctaatttatcggtatatatcgatatcttaaataattgtggactagtcggatttactagtcatagcatctaattgatcgagcaaagtgtcaactatctctagtttcgaacctgcttgcacaatgttcccatcatttagtgcatctttggcatcgtttacatgctactgcaccctcatccaaacatacagatggataaaacgtatgacttgcaattacattctggggtctatgtgttaattagttcattttcaattagaaatccataatatattcatagaagacgaaaattatcgatgtcatgctgactttacttgaaactattataacggaaaattatttgattatctaattatggtacttaaaatgttataagcaatgaactcccgaaaatctaaagggagttgagatatgaatgagcttttctgatattgaaaaagcaggaaaactggcagaacaagtagctttgcaaattcaaaattccaatggcaatcttagaacagtttattataaacttgaagaaattctgataaattataggaaaaataaggtagacgtagatttaatcatgcctgctatttatgaagtcgattttgaatttaataagacgaatcctgatggtagatctgtatggattgcatatgcagatgcgttacacgaagagttatgtgattcaacaggcagtcttcacaagaaggtgacatctggaaacgatctaaatggtgcatccttagttaatcatattatggatcagttgaatttaccaccgagttcggctcttttgataagtcccatagctgcaagtatattgggattaggagtaacagcgttttgcaaacacgaaaataagaaatgtaactaatgaacatatcaaagttgcataactcagtctcgatcaaatacaaaaataaagcagagtacattaaagaacatttattgatcaatttaactcatgttttgatgttaagaaatatgccgtcatatgttaccattctgataaaagaagaaaagagaactggtaattattctagatcaatagtgtttttaaaaatctctgtatctttaataaaactatatttaaaatcgtctatagtaattacattagtacagcctcggtcataaaactttcagcataattaaattatttagtcaacggtttggcagtgagtagggttttaactactgcctttctgcaatgactaaccgcgaggtgaaaaaattcgtattaggtttaataactttcttccatattgttaattcatgctagaaaagcaaaccactgaaatgaaagagaatatagatataggcattgaagcagaaaacagaaaagaggttgtaggtattcttaatattttgttagccgacgaatacttgctatttacaaaaacgcgtaattaccattggaatgtagttggcaaggatttcaaagagcgacatgaattttttcaagaacaatatgaaaaattagatggaatgattgacgaaattgctgaaagaacaaggcaattaggtggagccacagttgcaacgatgaatgagtttatgcagattaccaatttgaaggaaaatcctggggaatatccgtctgatttaaaaatgatctctaatttattaacggatcatgagagcactataaaatatctacgaaaaagtgcagataaatgcgacgaggaatataatgatatggggaccaatgattttctgataggtttaatggaaattcatgaaaaaatggcctggatgttgagaacgcatctagactaataattatatctgaggccatttgactacaatctcaaggtctcagctgcgctatttatgatttaatgagttatggtatagttcgacaacctttctgggacgaggaagcttcctttttggatgaacatgactgaactagcaatatatcttttaacccttggacagaaaggaccaagattgtggaacccatctataattaattacatgaaatgtaaattgaggtttaaaagggaacttgaatatgtaattactactactaccttcatagtgatatctgaatattttacagttaaaatttaatagttagaaaggtaacttaggattatgaaatcttctaattcaaatgccaagaaaaggaaagtggtaatgatttgtgaagatgaaaaggaattacttgatctttattccagagtgttagaattgagatatgatgtcataaaagtttgttcaggagcagaatgtatacgtgaatatcttgagaataaagcgaatggatctccaattgatctccttttcttggattataaattaggtgatatgttgggcgatgatgttgccaagaagattaagaaaatgaatggaataaagataatcctaatttcagcatataatttggatgagccaattaaaaatgaactcttagaaaataaatatattgaaaaatttttacaaaaacctatccgaatgagacagataattcaagttgcggcagattcaatctgacatgatttaaaaaattctttttctagatggtaatatagtaattcatgtgatagggccagaaaaagttggatatattactactcctcttgtttttttatttactatgaataaatattgaaccaagaaagattgcaaatggggactaactatggttggttagaatttcttcaatattgtgagtataaagtatctgttataattgtttatgattgatcatttactcacttttgtcggttttattggtacgtgtcttgcgttatctagcacattgattcagaaaatgaaaatagtcaaactaaaaaatagatgtcgttcgatttgattcattcttatcttgattattggtctcatggtaatgaatgacttatggaatgggaaaagaacttattgttttgatctcgaggaattctgcagctatgggattgaatatttgtctgttagcttgcaaatcaaaattttctgataaaccattaagagaagataatgattatttctatcgacttggataactggttgagttgaaaagattcattttctaaaacaattgaccagttacttaaatgatattattttaggcgttgctaaagcatcatccacagaacttgtggaaaataactgatattttactattagaattctctgcataaacaagaatatgaactattttaagtattattctccaaatatcttcatgaagggacgatgcgaagagtgtggattagaaaacgttgaagtaatgaagatatcaaaagaaggatcaaatgaaaaggccactttgtgtaatcagtgtagacctgctgatggtgcttatgcatattaagtttccacttggcgctatgcatgaccaggatctatcaccgttgggtttagtaagatgattgaatacaacaatcatgaacaaaacagactgatggcgattaacttaaggccagaataatacatgtaaatcttctcactagcagaaaataatcaaaaagcatgaatatatttaaccctagtttaagggatattgttagatatcaaagaaaatcttaaaacatgatcaaaactattttatgtgtagaatatgggcgatccggatccactagaattactttcaaaacaggacatgcgactcgggaaattaattaaatctatcggaaatttttcaattcagatccacgataatctctttgaatcattactaaaatctatagtctatcagcaacttgccggcagtgctgcaaatgcgatatattcaagatttctactatattatgataatgctataccatctcccgaacagataatttcaactcctgacactgttttgagatttagaataggactatcattcaaaaagatagaatatattaagaatttggcaacaaagatcgcttccggtgaattaaatatccattatttacccaaacttcaagacgaagaaatcataactgaattagttaaagtaaaaggcattggtagatggactgctgagatgtttcttatcttcagcctgaatcgcgcagatgtaattccattggacgatttaggggtaaaaaaggcaattcaaaaattatataatttatcagacctacctactcccgcgtacatgctagaagtatcgtctaaatggaaaccttataggagtatagctacttggtatttgtggaaatcattatctagatttgattctattggttagctttccagtaaatcctttatcatgtagtcgagttacctcatctaattttagaaatagtgttttcccccttaatcccgatcttcctgtctaaaatgtttggccccataaacaatatacttttgttttgtgatctaacaaaccttatctcggttaaggaatatgaatctgggtattttgataatctgtataattttatggtcacacttccagatttcgtcaaaagcatgcattgtgaacctccttcattctgagatatctttctaattttacattaatttgttttgataagttcctatgatatttgataaataatacgcaaagcctatttagcgatgggtaaatgaaatcaggcatgaatacttaagcttgtcaaaagctaatattatttagttactacaatatagggataacttataatactcatgagagaacatacctaatatttttaccaataactagatttttttaataggtgttaaatactttgttaaaaatataaattggaaatgcttaaactatatttactcttgatatctacgcttttggcatcctcaaccctttttgcaataccaataattccatccatgcaggcacaagctccaacatctgatctaccaatgactataatcaatgaaacgaactcttccaataatactgcagaagatgtcacaaatacttataacatgtcacaaatacgttctcagtaagatactgcaaatctctatattctgaattttactgtaattttgaagttaatttgatataaatgaatctgctatagtaagatatgaggatttggactctcaaatatctagggaaatgaactagaattgccatcatttctaaataataatgctattctattatctacgatcactgagtgttcgatcactatttcatgcttattggaatccattaatccattactatgactacggaaagaaaaaaaaatcctatccagtgctatacttgtggattggtggctagcttaccttttagatgtaattactgtaaagaatacttttgcagtgatcatagaaatcctttacatcattcatgcccttttttaaatttctataataagcggatacaaggtaccctctttaacgataaaccagatagcaaatccaatctatcaggattacgaaacataggtaatatattgaacataaagacgtcaaaaaccgaactcattcatctttcagtagctactgcacttgtaatttgtgtaggtctttcattgaataattatagatacttctcttggcaattccttgcaatttttacaagtgcttttctagtacacgaattggctcataagtttttggcccaatattatggtagctggtcagaattcagagctgagatatatggtcttattctaacggcaatctctgctcttcctataatgcccttcaagttcatcgctcctggagcagtgatggtcaggatttatgaccgatctaaatttggtagggtggctctcatagggccgcttacaaacttggcaatgggtttttcatttttgattttagctttgacttacgactcctctaacccttacttcacggttggtgcgtcgtttaatggctggatctccatgtttaatcttatacccatgggtatcttagatggccaaaagatttttgattggaacaaattagtatggggcgctgctatggcagctgctatggcactttttattattggatatctatagaaaatgctctaacccataatttgaaagttatccttcttatatgaacatcgaattgcaaactaatatctaattatgattactagaatttttaacaaatctcaaaaagtgaaaaccagctatcatatccaaaaaataaattaaatgaaaaacctaacatttgcaaaggattccgtcggaaaacaacatttatttttaaactttctaaatatcgattaagtagatgaaagaatatttagaggaaaaggttataaagtacatagttttcgtcaaatgcgattaaataataaataaagtttcaattctttttggattaatttaatttagagtgaatataaacgttttaagtaataggttccattcaactaagactatagtattccactactttcttaattaaccggacgctgtcattctgcattactatccgtgacattaattctttaaattgcaaattcttaatagcaatatcgatgatgtagttctatgacaaacagccaatttctttcaattttatttgtctcgatgatggcaacactattggtgagtgcttatacaatttcgagtgtaaatattaactcttatgcaacttcgtctcttggtcagtcgatccaacaaaatcaacaagacctgcaatcggctatcaatagtcaggtccaacaatcgattaccgatactattaacaacataaacaatagtaataattcaagtattagcaacatgactagtaatccaacacaaaatattaccgattctaccatagatttgataaaaggaggtattacgagcttacagaatgatccactagataacagcactacttggatagtaggcggtgtatataggatggaaaatcttagttcggaatctccaacatttaacggatcattttatatggtaaaaacagatggtaattcttctcattcacatgaaatctatgatttatccttgaacaacccaccaactgacagcgctataagtaatgttatacatcttaatggtaccacaactgtgaccttgagagacgaaccaatacataatgtaccaacaagcattaccttgttaggtgacagtgccattagtattttgttggatccatttagggttaataatcattttggagattcccctatctacggtactcagcaattaaaatgtgtggattcacctgcatattgtaaatgagattaatagtcggaataactcaccatgatattaggctgcacattacacatgaacaggatctttgcctaattcatacttattttttcttgtaatatcgtgacctataatgtgtttttccattacattatatactcaatcgactattgtatattgatttgaattggattttcctgattatgttgacggtttggaaacaatcactaatcaagatctgttatgggtttacttagaaaggcccacaagagaaaaaatggatataatatccaaaaaatttcctattcatgagttgaatatcgaagattgtttgtcaaagaatcaactcccaaaaattgataggtatgacgaccatatctttgttatacttcaatttccaaattctctgaaagaaagagctgctccaagctttacccaactctctttgtttataggtaaggattatctaatttcaattactcagggtgatctccatccgttaactgaactatttagaaattgtaaaatcagcgatcagaacagcaggagtaatctcatgggtggatctccaggatacctattgcattccattttagatgctctggttgacaatctacttcacatattgatgaaaattattggaaacttagacgacatagaagatgaagtatttgatgataaagtggcaaatgctaaagaaatatctatcctccggagggaaattactacacttcgcaggatagtcctgcccctaaaacgaatcatgttagaaattacatctagagatgtcaagagattttcgggtagcgcagaggaagaagatctgattgattattttgacgacattaatgatcatatatcgaaggtactagaagcccttgacgagtcaaaagaaacaattgaaatttacaaagatacagataatatgttgaattcagaaaaagcaaataaaattctaagctttctaacaatattgttcacactatcaattccaattaccgtagcaggaactttctatggtatgaacattgttattccaggcagtgtcaatgagggggaaaaaattatagattactttccacttattttgactgcgacactttcgtcattgtccgcaggagttatggtatattactttagaaaactaggctggatcaattcgtagaatcgtctgagagggatgtcaccatttctttattctctatattaaacttacataagtaaatcatttctctagaaggaatgtgggatcgagatggaggggaagagatctttgcttgcctattccattatttgttgaattcctgtcgatactttcaccatttccattatatgaacggtcattataatagtagtcatatttttagtgcctgttaaaaaactagtggaaattatctggttaatttttcatgacagagtgcaaaaacattcaattgcattcatgctcagctcgtaagaaaaataagtaagcaagatcaaattgcaaatattgtatcattagtatttctcattagggtaaaatgaaaagtgctttatctataccgcaatatgtaaaatggtaaagtaataaactatataccattcgttaatacgatctgaattgatttcttaagatactattattggtatctttcaatacttggcattccttgcttataatagattgtaaagttttgaccttgagaataaggacaattttcgatcgacctgagtataccgtccagtgcttagactatgcaagtaccattctgttttatctttactacgacgttctcctgaatacttgggctaaaaagctgctgtagagatccacccattaagataaaaaccaaaactactcctacaattatgaataaaactgccaacatttttggtgaaagatctaaatcgattttctaatacaggtacactagaattcaaccttattattatactatgttttcattttttattgatgtataaccggatcctcgaatgcatttgatatctttatatggttatgatatcgcaatatatcatttgaccgggcctgtagtcctagggtgcacacagtatgaagtgaaaacatctacatttatactaacttatttttagaggtatagttgttaattttatttaaaattaatgtttaccagcttattaatccttcatgcattacctctatgtttactttgagcctaaatacgatatgaattctacaaaatgagttcttaggtgacaagtcagcaatctagttcatttgtcaaagtttcaaatccatcataataataaataaaatgtaaattggtcggtattaaataagataaaattcttctttttaaaatgaattgaaatttcgtactgcttaaagttattaggattatgatgaaaaagctcttattaaaactatacttaatcttgcacaaattaacgatccattcttagatatttgtaacggaccgatgtctgggttacttctcattaatgatcttcaaattaatgcagttgtaatggaatatacgttctgaacatgacaattatgatcataatttttaaaaattcaaaccttctgttaatatctcattcttttaagaggcttacaattctttgagtattaagcgtagctgatgcaataaatatattgctttaggttaaatggtaattattattatgtccacatctataatatcaataaaataatgagattcataagcctgtccaaagaactgagattatctcaagtaaggatcggtttcaatttatgaataaaaagaattccgggaaagatgcatggattacactcatgatccttagctctcttgcactaataactatgtatggcgaaactatgcttattcctgctatcccatatctgatagatgatttcgggatatcctataatacgtcatcttggatattaacagcttatctaattgctggcgcagtaatgactccaatcataggtaaactttctgatatttatgggaaaaaaaagatattggtgattgtaatcgtggtatattctgtgggcactttgcttggaggattatctaatgatatctttatgatgatgatttccaggataatccaaggcgctggtctagctatgtttcctgttgcttttgcaattatcagagagaaatttccaaatgaaaaacttgcaattggtcaaggaatttttacttcagttttttcagcgggtgccgtagttggccttggattgggagcaactattgttgaatattttagctggcatatgacttttctctcaatagttcctctaatgataatattattaattgtagtaattagatgggttagaattgattcggaagaactcgtctcaagaatacgagggattatagatataagcggaactctggtattggtaggtatagtttcaactttccttatgggtctgacgttattaccgaattctatttctggtccgaataacaatctattggtaataattttaggtctgtttataacttccatagccttgttacccgtgttcattctcacacagagaagggcacaatccccaattattgatctcaacttgttgaaggatactgttcttttgcctactaatatattgataatgaacatcggtattgctttatttataatatatcaaactttgccaatcttgatacagagtcctactccgcttggattcggtggtggtcccttagccactgcaagtgttcaacttccattcatgattttgtcatttgtaatttcagttatatctggattcttaatatctaaaataggtaacataaaaccaactttagcaggaggtattataagtactttcggattctttctgctttttgtttttcatccaactacatttgtgatatctttagaactttgtattattgcaataggattagctttagcagaaataggtgcttttaatatatcattgatatctgctcctgtaaaccagactggtacatccttaggaatcaccatgctagtattcttgattggtatgtcattaggccctgccattgctggtatctatttagagatctttaaatccgccgtcgataatacaaatgaatcttatcccacccgtatcgcttatgactcgatctttgtaactgccgtatttatttcaatattatctgtgggactcacgctgttgataactaagagactgttatgtaaggcaatatagtcttaggtttgtaaccatgcatgatccaactatttgtaggattgaaaattctatcatagtagcagtcctctcctaaatatcataatgatcttaattaacgaaataagaagataatatctaaatataaattagaattcagtcactctactatcctacaatacttaaattgaggtatatgttgaatatgttataagtaatttgatgctgctattattgatgaaaaatcaattagatctgaattgtaaaatatccatagaaataattagaacgtatataaattcctaaaacaacttgaaattaactcttgaaaagagaactagatgacacttttaaagcatatattgtacaactaattattgataaaaaaacagagcaggcactagagagtttaagtagattttatgagatcaaaccgccccaaatcgttgttggtacaatcaaaggaaagagaaagacagtgtacgcagtatatgtccaaagagaaagtaaaatttattgcataaattctgatattttttacaatcccttcataatcatgcacgaattctatcatcatctgcgaaccacagcaggaatccataaaggatcagaaaaacatgctaacatgtatgctagagactttgtcgattcttataaaattattatgaatgggatgatggcgaaaactaaggatatatagcataaagacatttgtattcgcctttgaaatattgatcaggaacatcaaacaaacctatctaacattagtaaattgttcttattgttatttgtttgatcatcgggtcatcttcacagtactctttctaggatccttattgttttaactgattaggccaattcgaaaactcagaaatatcgaatgcaattgaccctagtaagtgaaaatgtcttcatcttttatgtactatatttcctcaaagcagctcccatcatatggatccttaaaatataatgtagatattcttacaccttaaattattttacatagtctagtaatttattgcacaaatctctaccattatatataatttattccctttaacacactaacatttaggacaaagatagtattgatcaattgcatcgaatcataacagatgtgttgataacaacgtgtaatctaaagactatattttgttgattgttattaaagttgctttatactttgatgaatttttgtcaactcttagtttcgtatatttgaccgacattggtttacaatgaccctttgttaagttcgattctagatattttggaataatggaaattgataacaagttattcgattttggaaacgcaccatctaagaagataagttttactcgagaaaagatccgtatacccatttgatagggaaaatttcataaggggggcaaaatcgaaatcattccaaaattattcatctaataatgatagaacacaatacaatattaacctctcgtaaaattatgttcaaatctggtgcgatggtaatgttctgttatttgaatctaattcatgttatacttgtaaaaaggataggtgctatctttctcttattatttagtagtaatgtcggattacaatgaatgtacttatcatataaatcaattcatttactctgttttagtctaattattctttgattaatctagttaaagcgtgataaatgataaagatatcataactatataagcttcgagccatcgaattgctgttcactcttcgtatctttcttactaaaaaagatattgtacattttttcaagtaatgagttatcaaactcctttattatataatgctattactacttgaatgataaggattttatcagtaaatatgctattaatattcttagtactgatttttacggcaccaactgcacaaatgattttttatcaaaatgttgaagctcaaggatcaaatacttacagaagtagtagctcaaattttgatatcaatagcatatttaataaccttcaaaataatattataaatccatcagacggattgaattccgaaaatgttgaagctcaaggatcaaatacttacagaagtagtagctcaaattttgatatcaatagcatatttaataaccttcaaaatagttttaccgatccactaggacaggtggacataatttttccccctgaaagtacagagtctatggtacctgtaaatcaacctagctccacagagtctatggtacctgtaaatcaacctagctccacagagtctatggtacctgtaaatcaacctagctccacagagtctatggtacctgtaaatcaacctagctccacagagtctatggtacctgtaaatcaacctagctccacagagtctatggtacctgtaaatcaacctagctccacagagtctatggtacctgtaaatcaacctagctccacagagtctatggtacctgtaaatcaacctagctccacagagtctatggtacctgtaaatcaacctagctccacagagtctatggtacctgtaaatcaacctagctccacagagtctatggtacctgtaaatcaacctagctccacagacaaaccatctaccacagacaaaccatctaccacagacaaaccatctaccacagacaaaccatctaccacagacaaaccatctaccacagacaaaccatctaccacagacaaaccatctaccacagacaaaccatctaccacagacaaaccatctaccacagacaaaccatctaccacagacacaacagactctatagcacctcaaagcgataaatcagaagaagaatcaagctccacagacaaaccatctaccacagacacaacagacacaacagacacaacagacacaacagactctatagcacctcaaagcgataaatcagaagaagaatcaagctccacagacaaaccatctaccacagacacaacagacacaacagacacaacagacacaacagactctatagcacctcaaagcgataaatcagaagaagaatcaagctccacagacaaaccatctaccacagacacaacagacacaacagacacaacagacacaacagactctatagcacctcaaagcgataaatcagaagaagaatcaagctccacagacaaaccatctaccacagacacaacagacacaacagacacaacagactctatagcacctcaaagcgataaatcagaagaagaatcaagctccacagacaaaccatctaatgcagccggtaaaaaacctgtagaatttacaaagataatatctccaaccaatactaatccttcaattgaaggctaaaacttggagtcaaagacctatgataacttggagttaacatttttttcttccatataccaatggatcctgcaacgaaaataaagttaagattagtatatctaattcactttgtaaaagcattgaactttaatacaatcttctgaaatgagctagccgtcgcttcctgccgatctctaataacgatcctattccattttccttaaggtcctgtcgagttaatctgcacttgcatcttctagtatgtcattgtcgaacttgacagttgcaggtaaaaattgggatttcaactattgatatgatcttagatatatttgttaaattaaatgatgccatatttggaatagatctgtaatgatgaaaatggctcctagattagtatttaattaaacctttgggattcaagaatacgcctaaaaaggataaaggggattagtgtaaagcatatcgcgaatccccaagtaataatacatgtcctataacgtttctaattcggttctgctggcttagaatcatttggagactttgaagaactggtatcgacgtcctttttcctttcagccagttttaatcctaactttatcaaataaggcgctaagaacgtggaaattagcgttatagttcctataatgggtaatagaaaggaactcactatccctatatctattcctccttttgctacaattaatgacatctctccacctcttgatgatgagagactaatacctgtctgcatagatgtgagtttgctaaatccttgatatctcgaggtgaggtacacaatagcgaattttacagctgaagtgactcccacaagtaatagtgcgggtattatgaatactggtatcaatttgatatccattaatgctcctactgaaacgaaaaataaagctacgaacatatctctgatgggtgttgtcaggatacttgtaacagcatgtgattttgattcagctatcaggacacctgcaaaaaaagcaccaacagctactgaaatcccaagcaaatttgacacataggcaaagccaaaggccaaacctagcacagccactaccaaaacatcactctggttcgtccttgcaacaaaatcgactaagcgtggaattgttctcgaaccaattatcaaaactcctgcaataaataccactgttattcctatggggatgaggatttctacaattgatatattacctgttaccgtggttgattgtaataaggcaaaaatcgataatattattatgtcctcgataatcagaattcctagagtaagatatgacgcctcctctcgtaggatctttaattcttctaataccttcattatcacaactgtgctagaaacggataacgctactgccaaaaacaagctgtcatagaaagacatgtttagtgcctgccctacgaaaaatcctgcgatcagtgttcctatttgttctgctactgttatgattgtggcccttttacctatcttcctcagattacgaattggaaattccattccaactgtaaatagcagcaaaattattccaatctctgcaaacaagtttaagacttctacattactaatgaaactgaaagggggagtatgaggtcctataattatgcctgcccctatatatcccaaaattagtggctgcttcaatttatatgaaataattgtcattaccgctgcgattatcattattgtcgcaaaatcttgtaaaatttgggttatttctatagccacaataaaaattaatatatatattatataaataattgtaattgtttaccggacattaatttaaaaaattttgtttacctgaaaaatacgtatgctagacagttcgatagagtttttttacgctgaaaattagtttagtattccattagtaaattgcataacaaaagtatttctaaactcaattattcatcttttattaactgtggttatgggacctgttctccttccgtagttattttataatgatcgacattatttgcactaacaaaaaagtagaaatctctttcataccctggtttaaaagttgaagaagcaggtgtaatgaacctgctggtttcggaaactgtgctattcttagaatcaaataattctaccaatacttttacatctctcacatcgaaagtcgagttattgatagcggtgcctttaacagatattaatcccgttggactttctcctacttcaatttctttgagctcgagactaattattgtgctagaaagcgaatttatcattccttgttcttgtgcatttatcgggttcgctgttgaatttaccagaaatataatgactattaaaatatttggtatcaaaatgaaggaattacttattacattcactctttttcctctccctactaaatatttcataccgtatcctagatatgaattgttatccggtgggtaaagtcgtatttatgtgacaaaagtttgtagtttttatatttgagattagcattgaattaattatggagtaacagtatcatgagatcatgaaaaatacctcggctatacacgaatactagcgaattgattaattcgataaatgatacatcgttttccacatgtaaggatttttatgaattaatttttgcttgtttctgacaaataaagtaaaaggagggagatcattcagtatcgtattttacttaacccctgtttccgtcttctacttcgataatttggtcgtcaggatatttgaccaccttaatattacaatgcttgcactcgtagtattgaatgtcatgcctatgactaatagatccatttagccatatcatcatatttcggcatctcaaacaagacatagtcatactcatgtgtgacaaatttgtgttattaaattcttttgattttttactaatttcaattaaagtctcgtttagatagatactttaagtccgacaatctgccaacttaggacattgctctacaagattatttatttaataaggataaatggtaaaattatgagtttgtaccatagcttagaatattactactgatagagtaccaaaactagcgattggtatcttagccgccatagcaattttaagtatttaaatagtaggaaatgagcaaggacagctttttagcatggtacaaggaaaagatgcatttgacacaatgtggcttcacgagtttacccatgatgtaagacatgtgtccggtttttcctgtcattagcaaccaatatcatttttttaatttccgatgtccatagacaaaccgtatttcagatatttttgatcgaattatcggaataagacgtaaataccgacttattccttataaattataatatcttatttctcattattcccactatttccaagttgtaaaatttatattaaaattgtatatgatagtgatcgtaaccatgggtaaaaaaataaatgttgcaattgccggtgtaggaaattgcgcttctgctctcattcaaggaattcactattataattctaattcatcctctaaggattctatcggtcttacttcatttaacctcggtggctatgagccgggagatattaattttgttgctgcatttgatattgccgaatccaaagtgggaaaggacctgtctgaagctatcatctcgccaccaaacaatgctttacaaattattaatgttcctccaattggaattaaagttcaaaagggtaacgtgttagatggggcaggaaagcatttttcagaagtggtaaaactttctgatgagacaaataccgatgtttacaatatgctaaaagaaacgcatactgatatcttaattaattatttgcctgttggaagtagggaagctagcagatactatgcagaaaaatgccttgaagcaggtgtttgttttattaatgcaattccagttttcatatcgtcagattatacttggcaaaaacggttcgcggaaaaaaatgttccatgtgcaggggatgatgtaatgagccaattgggtgctactgtagtacacaagacattggcaaagttgtgggtggacagaggggtatcgattgatgagacctatcaactaaatattggtggggatatggatttctacaatatgttagatgaagaaagattggaagacaagagagttagcaaaacttcagcggtacaagctatgataccatatgatgtgccaatgaggataggtccgtctgattacgttaactttcttcataacgataaagtttgctatatttatatgaaaggccgaatactgggagcagtacctatagaactagacttgaaattacgcgttccagatgcctataatagtgcgggcgtgatgatagatgcaattagaggcgcgaaaatcgcattagatagaaacatctctggacctttagagagtatttcagcatactgttttaaacatcctccagttcaaatgtcatattccactgccaaatctaatttcatcgatttcatcggcggaaaaaaggaacgataggttaattgtatagtgtattattaacaacttaaaatccacattgatttttagacttattttagcatataggttggttttgctagatcagttatatctatccaacattttgcaattttatcaagacaagaaatactatttatcattgcaatagaatatgctccgtttatcacaatctctttgttagatgttatatgctgttttaattctgaaattgactttttaaattcatcgtagttttcaattaccttgaaagccttatccctgcttgtactcgtaaaagcttcgatggaataatgctgcatttcttcgagtgcatatccgatttttctaatcaaatctgctatttggctcttttccctaacttctgatagataagatactaattctgctattaaatctcctgcagtttctagataattagctgctattctgtaatcgagcatatctatattgcttagattcagattgctcgcaagttttttattcataatagctgttcttattattctaactagaaggaaatactgtctgtctatttcgtcgtctcggctatcaatttttttctttagatcgcttccaaaaccttcactaagtgaatgaatcgtttccttgaacattcctgcaatgattgaattcatcatactcagtattttctcaatgtttagagttttagcatcgattagaaattgaagatgtatgttatagctattctcatcaacaatttctaatccaattaattttcgagtagccctttttattgtttcactatcttcaaatgatatttgtttctttgaatgtatatttattagggtataccctaataaataagccccaaaaattttgtttaacaggatttttatcaacttatctttaatatcaacatgatcatcaatatcatttcttgattgttggtgattgttctccattccatactcaaattctatttttatttcttcgtcttggtaattattataaattgagacagtattgtcaatattcgtttctatagttatgctccttcccttacccagtgaatttttctttatccaatcatttggaagggatatgagaatactactgcctatttgttgtaatattcgggtatatattgtcataatttatatatatcaatataaataaattatactatatttttatatttacttttgattataaaatgctgtagtggttttagttactcaaatgcctgtggcagtggcaaagggctatagtcctggccacattaccggtttttttgccacaccgaccaagcctaattccatagtagatccgaaatttcttggatctataggtgctggttttagtattgataggggaattacatctactgtcaaagtattttactcggctgaaaataactatgaaataagactaaacgggattcctaattttgagctaaaggtgtctaattttgttgtagcttattatatgcggctaatctctgaccctgtttttctttcaattgagcatgattgtgatttgcctattgggtttggattaggatccagtggctcggctgctctaagtctttcttatgctcttaatgcggcactaaagaccaacttgaccaatcttcaggcagctcaaatagcacacaatgcagatatagcttgcaaaactggactgggaacagtaatatcggaatttacagggggttttgagttacgtttgagtgagggaggacctgggattggcagagttataaaatctgaattgtctccagacctacgcgtcatcattttatgccttgagcccatcaaaaccgagttgtggttagatgagtccgttactagtgagaaaaaacattttttgaatcttttgggtagaaaaatggtaaatgatttaaataaagataaaaatgtcgaatcatttctcgatatgtcttatcaatttgcaagtgaatatcaattggatgagggtaagtgtcattctccattacatgtgctgcaggcagaaggcattaaggctagcgtggcactatttggacatactttatttacactgacccaaagagataagatgtctaaaattgtgagattattagaacaatttaagggacaactattaatttgtgggattgacaatttgggtgcgagactgattaaaaagaatgactaagagatgccaaggaaaatagaattacacgaaagtcacccaaggtatttatccttgttaatgagagaaaaactggtaacaggttttagtaggggattagtagcaacagagggtctgatcgctcatgggaggggtgaatgctttgactatttgctgggagaatgcacaacagaatcggctagagcggccataaacgttgcctctgctatgctgttacttgctagatatccagtaatttcagtaaatggtaacgttactgcattatgtgcagagcagatatgtgggttaaatcgatctatagaaaactcaatcattgaaataaatctcttttattataccaaagaaagagaaaagttgatatcagaagaattcaaaaaatatggattaacaacattattaggtatcaacccaaaaaatcttgtgagtattccggaactagagagtaacagaagactagttgatcagtatggaatatctaaagctgatgttgtctttgtacccctagaggatggtgataggactatggccttaaaacgtatgaataagaaagttatcacagtggatttgaaccctctctcaagaacttcattgacatccgatataacaatagtggataatattgttagggtaattccccagcttattgaaagggtcgaatatcataaaaaatattctagtgaaaacgacctgaatgaactcatagaggactttaataatcttgatggcttaagaaagacacttgaagtaatgaaatctaaacaagtatcccttttaaaaaattgacttgcatattatttctattagtttttttagactctacgttaggagttatgacttgatctgattccaaatatcagtcacctacaacaaaaaaagaaaaaaagtgaaaaaatcactgtcgtgactgcttacgattatacaacatcaaaggtatgcgacgaatcaggtgtagacatattgctagttggtgacagtgcgggtatggttatgttgggatacccaagtacaatttctgttactatggaagaaatgatggtctattgcagaggtgttgttagtggatcaaacaatactgtaatcatagccgatatgccatttggatcctatcagtttgatgagtcattggcttttctaaatgccataaagttcattaaattaggttgtcatgctgtaaaaattgagggtggtgttgaagttattccccttatcaggaaacttacagaatatggaattccggttatgggacatattggattaaagcctcaaacctcattcttatgggaaggttacaaggtacaaggtaggactgctgattctgctattgcattgtacgaacaagcaattgaaatagaaaaagcgggcgcttttagtttagtactagaactagtgactagacaagtggctgaacaaatctccagatctcttattattccgacgattgggataggttcaggtagcggatgcgatggtcaagttttggtctttcatgatctgattggatcatacaataaattcaaaccaaaatttgtaaaaagatatctggaatcatttcctttgttattgggtgcaatgaaaaattatattgcagatgtgaagaatggcaaatttccagatgaaaatcattcattttccatttcagaagaggagttattaaggttcaataaatatctcagtacaaaagcaaagattcgcaagctgaatccaaaataaacgggacaatatgccatgagagaagatgaatcgttcattaaaaaattcgttgatactaacgacgatgatagatgtgatttacatccgtcaaaggatattaaatgcactttgggaaatgaattaaacggaaggcgagttgtaatttgtatcaccgctagtgtagcttgctacaaagcgatagacttgataagaattatgataagacatggagctgaagtatttgtggtaatctcaaaggcggttgaaaaattcatgcataaagattattttttgtgggccagtggaaattcggttatttcagaactttctggagatttggaacacgtaaggttagcaaactaccaagcatctgatctgataatagtatatccgtgcacagctaatacaataggcaagtttgcaaatggtattgacgatacaccggtaacctcagtgctatctatagcattaggagcgggagttcctatactaatcgctcctgcgatgcatgatgcgatgtaccaaaatatgatcatcaaacaaaatatacagtatttagaaaatattggaatagcatttatgaatccgatccttgaagaagataaagccaaaatagcaactgtggaatcagtctttctgcgaagcgttgaacttgtaaagaatcaaatttcaaaatatagtaagaagaatggaatgtcaaacgatcggttagactggcatttttgtaagggttcgattgataaatcgttaccattaaatcatcaacaaatgcgatcttttatgaagcatagaaaaattttgatatctacaggcagcaccattgaacacatagatccgattcgggtcatttctaatactagttctggtaaaatgggttattccttactaaggaaggccattgatttggagttagatattacagttgttaagggatcgacatcgatggatctagaatatactaaactaaaggaccagtttaattttaagctaatcgaagcaagatcaaccgaacaaatgatggctagtattgtaggagaattatcttcgaaatcatatgatattatcatacttgccgcggcagtttctgattttaaacccgaattttattctagtgataaaatcacaactggcactcattcgttagtcattagacttgtgccaactggtaaaattgttgatcaagttaaatgtattcaaagagaaacgtatttagttgcttttaaagctgaatatcatgtttcagagcgaatacttctggaaaggtcctaccagaagctattagattcaaatgccaacatggttgttgccaatgacgtaagcaatgaaggtgcatttgttggctccgattcaaacaagattctaattgtggataaaatgaaaaattattatgattttccacttctaaataaggagaccgttgcagaaaacattttaaaactaatatatttagatttatctaaagaatagaagatgaatacttgattaaattatctgatttcaattaagataagtctattaattttatataaataaaattatataaagaggtcaaaagtaacactatcatttgtcgttaagtaagttattgagtcgtcaaaatgatattttagtcatgcctggtgtatatgatgctttgacagctaaaattgctgaacacgtaggttttgaggccatttttcagacgggatatggaacatcggcctcattgttagcattgccggattttggattcttaagtattactgaaactgttgaaaacgctcggcgaataacccgagcagttgatataccattaatagtggatgtggatactggttatggtaacccgttgaccatatctaaattagtagatgatttgcaaaggattggcgtttcaggaatatttcttgaagatcaggtttggccaaaaaggtgtggccatatggtaggtaaagaagtaatcaattctcaagaatacgtccaaaaactaaggtcagctattgatgctaagaaaaaggactcggatttcataattgttgccagaaccgatgcaatggctccattgggtattgaagaggccataaaaaggggaaagctgtatagcgaaatgggtgctgacatcgtttttgtagaggcacctcgttctcttgacgatatgaagaatattgcaaatcaaattgatgcccctttagttgctaacatgatagaggaaggtataacccctaatttgacctcaaaagaacttttagagatgggttataaaattgccctctttccactttctgggttatattcctccacgtttgcaatatttgaaacgtttaagactttaaaagagacaggtacaacaaaatctctaaaacataaaatgatgcaatttaaggaatttaataagttggttaatctagataaatatatgaacatggaaaaaaaatatgcttgattttattcaaagaacctaaacttgactatttttgaatatacatatagtttatgctattttgatcgtatttggcattggttgcctaataggaactattccaataattcaaaactttccatttcctgtaggctatgattccatcaattattatctacccactctatataacctgaattctaaccccgttatcggagaagaattatttccggtttatatatttttggtctatattttttatttgatcgttttttcagatctatactttgcctataatgctgtaaatattgttttatatggatcattcggtgttaccacatttcttcttattaagaacgtattgagacaatcggttgataaaagtatactgtttgccatttttgttatgtttcagttaagtactttgagaatggaatgggatttacatagggatattttggcccttgtatttcttaatctttgtttggttaccgtaaacaatatgaagtcacttgttaccaataagtttgttctcttacaatacgttagtattagtatcatttatgtggccacaatattttctgatagaatgataggaagtttattaattgtatcttcaatcttcctttcgatcctacataaactcaagatactaggtgtcgttaacttattaatactaatattgtttctaacctacttcttattatcagatgatgtcacttttgtttctattggctcaaacccaattgatgtattattgaatcccgtatttaacaagaatattctatttcattatgatttacttgtactgcatctatcactaaatgggatccttattccatttttcatcataggtttcctcaaaaagtctgattcgttaacccttaaaattcctacttttgtgacaatcatgttttcatttagttggctaatcgttcctaattatgattacttggtaccggagcgttggataattctttcgggattttttatttccatatttggactgtatggattctttctacttgtagatagattggtaaattcaaaactcaaaaatctcatttcagttttatttatagcttcttttgtcacgtacggtattttgtttatgatcctcccgtatggaattgtttttactataccttctgtattccaaaaccaaactggcttgacattccctttgtcaatgtcttttaattcattagagatatctaagaaccaagatttggtgaaatctatagaatggattaattctaatactaagaataactcacaagttattgggacaatgcattggagaggatggtttaatttattcctagaaaaaccacgtcaatatattttttcagagactatatctcttcggactgataattttacaaaagagaaaaatatagtaggcttgtacaacctgctgaaaagtaaaattgattctcaatgtgctaataaagtggagacgtttactaacagtagttccgcgttgggaaatgaagaaaatattttcttgatcgatttgaaatcaggctactatgatactccggacaaccatccaatagtttacgattcagaatattttaatatttatgaaattactcattcaatttgtgggtgatcagtccttctatctgggtttaattaatgatttaattttttcgatctgagtctttctagtaaattttcttatatcatcgggatacaaactatcgtacccttccagtttcggtttataggataaataataatatagcatatacaatgcccctactcttccaataggtttgctagtaccaaaatatagaaaaaatcttccgaatgcaaatagagggtgataacccagagttctcatactagcaccgaattcatagaaatgatgattttgtccaaggggtcttgtatgctcaaattttgcttcttttaaaatagtctctttatatccattttttctagatgcaattaaaatagctgattcgtaacccattttctcaggatagtgatcgtattctttataaaaaaaggaatttctaacaaatctgcctgctccacgaggggttttataaccaataccaccaaaatttccagataccaccgcataatctttgttcctatccataaatctaattatcttttcagcataatcctcggtatagatagtatcgtctgttcctatcatatggtaatcggtttcccccaaacttttttcagtcttcagagtcaaggctttattccagtttttaaccactcgagaaatatcatagccgaaatcaggattggagatgataaataagttatctatttttttagatatctctattaatatctttccagtattatctttagagccgtcatctattacaattatatatgatggctttgtggtttgatttgatattgacattaaggctttttcaatatcgttttcagaatttctacatgttacaattgtaaaataagttcccatagttttagatgaccaagtaacaagtaataatcactgaacatataagttttaaaatcgtcaaggaataaattatattcgatgtgaagaactgggtacacatggattgactcttccaaacagaagaatgggttgataataccggaataaactgcgattaatgaatatagatgaccaatatctttaggtaaatgaactgactcgtcatagtatgtaattttaattatccatagaaaatgattaaggctataatttttcgtataaaacgttatggattgcaaattatgtctataaaaaaaattccatttatacataacaatcctattcatttccttgtcttccaacagtcgaaattaaaattttgaattagcgattatcaactttatggatctagagcattattttatattatcttttatcaaaatattcaaagttgaagattttgcacttatctaccgaaggactacccgattggaggattgaaaaatctgcactaacggcatctagtcaaggacatgaggtaatatttgctggatctaaaagcccatttaaatataatagaaatacttttccaaaaatctatgaagttatatggacggcaaaagccagatatgggattccttattattggcatttagtaaaaaaacaaatatttcgaattataaaagatactcgacctgatatagtccatgcccacaatattttctctgctaagatgatgcttgagtttgatataccatttatctacgatgatcatgagttttggtccaaacaatctcaattattacttgaaatggataaactagatgaaggtgtggataagagggtgcgcatgaatgaattagtaaaagatgtgcaaagaaaagtaaaaagaaaaatagtgaatcgtcatgtcaatcgtttgtggactaaatgggaaagggaattagtttcaacaatccccacaattactgtttccaacgaaatagcaaataggctgagaattataggcaatagtaacaaaatatttgttgtccctaattttccaacgaaatttgaaataagatattctaataaaccccgtcctcacaaccagttgtcaagcgtttatgctggggcggacggattcaacaaaaagaagtatccaaataagaatttagacgggttgacagatatatttacccaaaacgatatcggagatcttacagtcattggttgggatggggaaccttccaataaaatcaaatatactggttttctacacagaattgacatgtttaaagagatgtccaatcattcgattggtttgataccatttaaaaaacactggtttcacgagtatatgaactctaataaagcatatgaatatgctcatgcagggctttacgtaatgtgcacaagttcgcttaaagatactcaagtcgctttaaaccaacattgtattacatttgctgatcatgaggaaatgaaagaagatctattatattttaagaataacatggatgaattgtatgaaaagagattgaacttatttgaatatgctcgtaataatttgatttgggaacttaatgaaaaaaaaattctggatgcatacaaaatgtgctaattcttgaaaccatgttgttcgatttgaaatgagcttgataacttttgactgcgattaattcagtttttcatatattcacattcaaatctttccagagtgaatctgatttggtactttattaactgccctatctgggtgaatctaagcaaacaaaataaatatatcttgagagtgaagtaggaaggcatgtcatatattccgaatgaatactggacacaccgaggaaaagactataagaagaatttcaaatatgatcacaaatttgaattgcaagagcaaatgctaattgagtatttaaaaaaatattcttttgactctgttctggaggtaggatgtggatttggcagaataacaaaattattacttactaattttccaaaaattaaagaatattttgcatttgatctttctacacatcaagttgaaaatgctaagataaacatcaggggggtaaaaaataacacaaatatccaattcgcggtatcagatatacaatcatttcaaccaattcagaaatatgatttagtaatcgcgtcagaagttctgatgcatgtcttgccttctgaaattgaacaaattattcaaaagttagttagtttatcaactaaatatgtttgcaatattgattggtttgaggataaagttcctaaaaaggcagaatcttttaattttgttcaccaataccaaaagatatataataatattccatctattaaaaatgtttatcgcattccaatactaaaaaagaaaggtttcttgtctaaggttgatgcaaaacagtctatctttttcttagaactaaaaaattaatgcatcatctctgttaatgattaagtatcgcagagttcaagcttgtactatagatacaatcattctagaagaaacgtgttaaactgaatagtatttattcaaactgattatgatattctctatagaatgattttttctaacatactcgtacccttcattgcttaatctgttaatctcttcctcatcttccattaatcttattaaatcctcttttagagtctccttggtggttctgtaaatcggtggtctgtacttctcatataaataatcagatacataagctattacaggttttcttaaagccataccttcaagttcaaattttccgaaccaacccacatcaggcattattttcccgattacgatatctgatctttgaatcatttgcattgtttggatatgtgaaaaattaaggatttcgactatttcacatttattctcctttcttagttcctttagacctatagaataattttcagatgttatcgaagaatgagttctgtaataagggtaatgtgctatctgttttatctccttattccttgcagtattatgtacataaagtgaattgacatttttacttatttcgtcgaaatcgatcggattaggtacccattttccgttcggtgcatagtctaagagatcaggagtagaaactaggcaaaaatcaagatctttctttcctctaatgtcatctccatgataatgcttcaaatatattttaccttgatttctcccttccaagctcttccttaaagaaccataaggataatgataatgccaaatatcatattccctttgtaattttttaaataacttccatctcgctaaaggcgacatataattaatcatgttacctccaaactgattggaaattagtttattgaagacaaatacatctacttcatgaccttgttttttttgatagttagataatattgaggctactcccgacgggttatttatatgagctattttcatatacgaaaatgtagctaatcaacgtgcataaataaaaatcttgttacactacaacgatgttgattgatccgtccgaattttggttttaatattcagaaatggcaaagctcgaacgcttacaggggcccaaaatttgttttgtcctaattgaacaggatcatttctaaatagcattaattgttcttaatctgtaattcatcgttataaatatatgattccaaattttcacttgcaattgcaatatcgatggattcatctaaattgcaatgcatagtattaggtgagattgtgattaaatggggaataataggaaaggagtggattaataacggatttaataaattttttgtagcttttcatatcaaagcaattttgaaaaaatgagactgatcttcagcaattcactaaatttattaaattaatcagatatatgcaatctagtaatgtctttgattttaaatgatattaatatagcaaattttttaactttaaggtatgatcctacttttactaatttacatactcctttgaaaagtgattattttattgaaaaagaaattgaaaaccttgactcaaaaatagagaatattgttagggcggacttggaatcaaaactgtcacaaaacaaggcttcaaaggtttctattgccttaagtggtggcgtagattcaggatttacattgatgatgataaggaatcttctgcctgagatacacattgattccatatgcgttggttttggggatgatgatgatgagatttctgaagcaaagaaaattgctcaacaatatgattctgatttccacgaattaattgtagataatgcgttgagggatcttccaaagttgatatccatagcaggaatgcctaaatggaacttgtatcaattctactcattagaacaagctgccaggtactctaacatatttttttccggagatggcggagatgaaacatttggaggttatatttttcgttatagaaaatttctacaagagctagaaaatatcagcaacccttcatggctagataaatccaaactttatctatcatgtcatgattgtgattgggttcccaaccaagatgacatatttaataagagattaggcttttcatggattcaaatctatgaaaactttagaccttattttgataacaaccttcttccgttaaaccaattatttctagctgattttaatggtaaattattacatgattggattccaacaaatgatacttttggaaagtacttaggccttgaaattgattctgtgttcttaaatccgaggctaatagtcttggctgcaagcataccatggcactataaatatagttatgaaaagaatataggaaaacttcctattttgtccctattaaacaaggtttcgggctttggtaaatttcaaggagtcaaaaaggggttttcattgaatttattgaatttgtggaggaattatggtagagaaatcgttttatcatatcttaatgaaaattcagattcagttaaaaataatatcattaatcctaactggatagaagagtcaataactttggttgatagtacgactcattccgatatgaaaatccgttatataagcaaattattgtcgctactatcttttgagatttggtatagactatttgtatcgtttacactaaaagcaaacacaaaattataaaactaaattactttctcttaagattgagaataacgaacaacaatcgatatgctggtatcgatactgataggtatttacagaaatattcatagataccactagaaatataaaaatattttatgagtctcttttttgttcaacatttaatagacaagataaatccttttttgatgggactcgatatacttatcgttgtgcgctgcactgtgcatgtaaatcaaaatgaataataaatctaaattagaggcccatttagtatggtatatgaaactaaagatatcgcgagtcttcttaagacgacgatggttggattttagaaatggacatagtatttatttggcatttttccttacttttgttaactttatcttaatatcgtacaactttttcataaagcaactaccatttggaattggtgattatttcaacctgcccatgttcgtacttttatttgcttcaatctatatccctgctgctattattctaggtgtttggcatcgaaagcatcagtactctgttgaaaatgaagcattgctcagacagaattggatgtgggcatggattagccaataccaaattagattgatcaagggcaagaccaatccaaaggaggatgaatatgttataaattatctaaatgaaatactagtcagaacgaacaagaaggatttgataggcaaagggagtgatgtaactgatctaccaaaagaaaagaagcctgaggatgacaaatgattagatctgatcttttataatgcatttactaatctcctcattttttcgaaattaacttcaaagccaaacctcttttcatccttcttcatgtttttatacatactcaataacaaattaaagtgcttgacggtacttagtttaccatccattttgagccttacaattcggtaaacgtcatagtaatagttgaatttccttagaattttttccctatattgtttttggtcaaactttaccttcttgtgtttgttatcatccaacacctgtagaaatatttcacagcttaacaatgatggaatgattccctcaccaagcattggaaacacagtacctattgattctcctactccgatgatattgttgtcgtaaaaaggttccatcagtttcggcggtgaaagtcggatgggcctgcctatttttttgattattcgtgcatctggatgagtttctaagaattcttttactccgtgatactttctgtcaagatttcctgctcccataaagcccgttccattgtctaaaggaaaataccaaaagtatccacgagcacccttgtagccaattacatgaaattcatttatatcttgaatgttttcgaccatatactcatatgctggaatcgcaaaatcctcttgtgatttaggtaaaaatctcctatggaacccggtacaatctaaaacataatcgtatttatctataggaaaagtctttttatcacagttaataccgtactccaccctgataccagtgagcaaatcgctctcccattgtttcttattataggtaactaatccgtctaaatcgagaaactcttccttaccattaggaagtcccatccttaatcttcttcctacatgataaatatattcatcaaaattaagtcctgctttacttgaaaagtactctaacatatgccttgatgctccccatgcgcataccggccaatgcatctctttcttatttgattcaaagatagttatttcgtggccaattttatttaacatcccaccaagataacttccggctacgccggctccgatcacagctatcttcaattgatatggttaggctcgaaataatattaatatttgtatattttttatagtccactttactccgatgattgattatacataacgatttattacaaaaaaagttctaatcaatctaattattaattatttatatctgatagaaagtaatcttgagttacgtaaaaacaacagtttcccatatatattatacaattgattgtttgtttgaatgaataacaaaatatatctcatggcggcattaattgcatttgcatctgttggtgctttgttaatacagccaactgtagcatcagcacaaagcagcatgatagacaatattttgaacagtgctctcccctcttctaatactaatgataataatcaaccatcacaagcaagtagcagcagtagcagcgcagtcccattaagcaccagcttatcttgtggtcaagttattaaacaaagtgtaaaactgacagccaaccttgattgtaagactgatggtataattgtaggtgctgatggcattacaattgatttgaatggatttacattaagtggcccaggagaaaagagttctaaggtcggaatcatgtttgcagacaacgatggcgtaactgttcaaggtccaggaacaattaagagcttccaagcaggtgcattattctcaggtggagaagacaataaaatatccagagtcacattcacagagaatgaaatcgcagtatttgaaacaggatccaagaatgtagtaattgaagacaatctaatgtttggaaacagcattggtgtagcagctcactcctcatcaggttcaaagttgaccacaaaccttttcaaatcaaatgacttggctggtgtgacattggtcaactccgcaagtaatgaactgtcaatgaatacaatccaagggtctgtaaacggtatcttcttagatggccaaagcacaaagaataacgtaaattcaaataatgtattgcaaaaccgcggtgtagatttgaataacggtaacggtctaccaacaaacataaacgacaacgtgttctcagacaataactgtaacacatctgtcccagacggtttatgtttgggtagataaaccctcctttttcttctaaataagacaatatctgaaatttctttttcaattttaaaatcaatctatcttttagcaatatatttattttatcgcagtttaacaaacttgttatgaatattcaccatcccctcgaccgagtcgcttttgtttacttatcttttatcgtcctactaagctttattctctcattttcaaatctgcaattgacttcaacaatttatatatatggtcaagaaacaaattcttctagtaataatgaattcttattaagcatcaatcaaacatatctttctttaattccattaatgattgaggaagttcaaaacaccaatgcgagcgatatcccgattaaacaaataatggaggcaactccttcaaatgcaactgcccttcaagacattgtcaaaaataattctaataaaacagctcaaaacgaagacaatactactttaaacacaagcaacaacgcttctagacctcaggacctcattccagtcgttgttaatatgactcaaaacaccaatgcgagcgatatccctatcaaaaatgtaattgatactgttccttcaaatgcaactgcccttcaagacattgtcaaaaataattctaataaaacagctcaaaacgaagacaatactactttaaacacaagcaacaacgcttctagacctcaggacctcattccagtcgttgttaatatgactcaaaacaccaatgcgagcgacttggcattcatgcgaatcattgatgcaatccccggatacaacaactcagagttagataatcaaaatttcttaaattaatttcataagtgaattggaaattagaataaaacaatagttacttaatactcattctttttccacagtgtctgcgtaggcatccataatccgataccttatatacttatcatcgatggaaaattttggtggatgtggatcattagtctcagacttacaaactggacatttatcctttaatgtatattgcttacacattctacaaattctaatccgatgtttcatagttgttcaacgattaaatgtttgtatgggttttctttgattcttcccttgtaaatttaaaagttcctgaattcttttctatattcgtctttatcttttcgattgcttgattgagggctttctcagctattttgaaattttcggctgtaactgtgatcctgtattttggggcacctacgtaagtaatatctattttagaattatttttggatccatctacagatcctaaaatattctttatgatatcaataccgtctccctttcttaccataatatctaagactgccctgacttcgatatgtgggatctgaatcttcttgctttctacttctatcgcttcaattacttctggttttaattcgagactagataatacatcagttcctttgatggcgactgcttcaaatgcatcatagataaaatcatatttttggcttattttttcttcaatctctcttatgctgttttgatcatagccaagattggtctttatcacgtccataaaattggcgcctttttcatctttttttacttccatgactttcgacttcttttcttcgccagtaacctgttttaacgaaagatctacttctgacctaattggattaactctgattaccttgaggactgttttttgtttagcctttacatacctctcaatatttctgatccagccagtggctatttctgatatatgtaaaaacgcagtaagattgtcatattcgtcaagcgttacatatgctccatggcccgtaacttctttgactgtaactataactatttctcccaaatcggggagttttttggtttctgaaatactcactatgtttaaaccaaattcttagattaattaattttgcttttataatcttctaaaaatcaatacccttttttgccttaatgcccttattgtatgggtgtttaatttctctcatctccgtaaccagatcagccctatgaaatatgttgtctgttaagtaattccctgttaatattacagttactttagctggttttgagtctaaaagtgaaataatttcttcttcttcaattagtttaagctttaatgcataattaatttcgtctaaaataacaatatcataatttccagagtttattttctccttagcgattgccaaagcattttttgatgactctacatgctccttaaaatcatgatcatcatctattattcctacaaatccttttcctgttattactaattcaaaatttggttttaatctatttgagctataaatttctccataattccactcgcccttgatgaactgaatcatacaaacattcatttcgtatccaattgctcttaaagctacacctaaagctgcagtcgttttgccttttccattaccatggtacacaattattaatcctttatccatagtcctcttcagtattcttaattcaagtttactgaagctctctatttagtatgttcatccaaagtaaagtatggtcgataagtcctactttagccatgacattctatgtgatttattagattgcattaataatttattttgaaacttattttcatgttgatcaagtgaggcaatcatggataatgaaaatcaaatccgaccataaaatatgactgcaattagtttaaattaactcgacgggttaggtgttgcatgtaaacagtctatgttccagttaacacctagcgagtttgaatttactgtaggaaatgagtgttgtagattagcaacttcttttaaagatagacctcacgtcgtaccggtttcatatatctacgaaagcaatttattttatatttcaactgactataatacaaaaaaattattcaatatttatatgaatccaaatgtcagcttagctatagatatttacgaaccaaatcagaacaaaggaatcatcgtaaacgggaaagttaaaataattgaaagtggtcaaatttataacaaaatttattcacttttttacaataaatttgagtgggttcgaaatgatccatggaaagaaggagaagctccttttatagaaatgaaaccgtattctaaaactagttggggaattaactgatttgaacattaaatttaaattggaacaagcagccggcgtagtctgtcaagctatctacccgatttctgtatcttcatttagtggaaaaggtacagaggttggaatttgtacactatcgagcatggaccttttgaagaaaatctcgcgtaaccctataatggataagcttctgattgtaggacgtttattttctgaaaacaaaggtattgatcatcttattcagttttgtacgatatccttgactatgaaatatttgattttatgtgggaaggatactagtggtcattacccggcggatgcattaatgaatttaatgcgaaatggattggatgaaaataacaaaatcattggaaccaaggctccttatccatttataaaatctcaagcacatttggttaataaatttaggaagcaaataaaactaattgatatgtgtgaatgttatgatttgggtagaattaccgatatggtaaacgaccttacttaattttcttagtataaagcaactgatttggctctgctgcttgcgtttttctatcagtattaattgtcacagagcctgtgctaccttttttctctctattttggatatattctttatagtcctcatctatttccatggctgcttgtaaaatcttgctttttattgtattagatgaattaataaacatctttgtatctttgggaagacagtgaccacctattccatctcttggttctagtacttctacattccattttgtattgagtgattcacgtaattccgaaaaactgatactattagacttgcaataaaggtaaagctcttctgcaaatgctatttggagatatctatgagcattctctactattttggttagctctgctacttcaactgatgatactggatgcattggaattgatagactttttagcccttcttttgtcgctgtagttgtagttgtagttgtagttgtagttgtatctattccttctattcttcctgctcttgtagttggcattccttctgttcctgttgtttgttgtgggattacctcacgtccatcataaaagttaagaccatgttgtagacaacagttgcttacacctcctacaatacgtaattgatttacaccgtgaatttcttcttctaatgcataccatctatgtggtgcatgtacaacgtgtagtctatgatctactttttcaaatactttttttgatgtaccttttggtatagtactttcaactgatattagtgcacctgtctttgcttctctagatatcttttcaacaacggacatcaaaccatctacttgtggtgtaaacatatcatctggtctatgtgtggatacacagataattaatacgtcaaaatcaccaaagtttgttgcttgttttattccataattggtctcagctgattgcatggttttttgatttatatcgtatccataggtatcaaaaccatgttctttaacatattttgcaactggaagaccaagctggcctagtcctataataactactttgttgtagtcgtttttataattataattatacatccttttagtttcttcattcaattaacgtaaaagaataattaatgatttcttaagattctatcattctttaaatctattactttttactataataatttctagtatgttttaaatctcattgatgttgcgccgcgtttagctctactaataattttgaatcccttagtcttgagggatgaatgaacgtacattcaatcaaattttgggttttccttttgatacttgctttgatatgaatatatctgatgatatcgtgataaaaaggttcatagtggattccttcaaaactatttccctcaaatttctcgaccaaagtacttgtaaaaatcatacttatctttttagttatggcaatcaaagctatttctctaatgaatcttctaacttcatgtctgatattcttattctgattatagagaaataagggtattacatcatcaagaattacacaatctatatctaatactttaattttttttaaaagactaattagtttatctatttcatagattctttgataagttatatttttcaaaaagattctaatttccttgtcactaacatctgttatctcttgaagaaattcataaatcacttccggcctaaaattgccagatccgtctatatatagcgtttttttccttttcgtgctaattagggcgcagattaagtatataagctgggttctcccatgacccttcttttcaatcaattcgatgagtgtaccatttcgggtcaacaggagcaaaagatcatctaattttgctagttctgtacctatgagattgggtaattctcgatagataaaaatattgttttgttaggcacattttgctagaggaagctttttattgtagcctagggtcttttcacaattgattaacaatatggcagcatcaccttcacaacaacctactaagagaccattaaatgttttacagcgttctttgaacagaaaagttgctgtaaggttaaaaagcgaaatcgaatatagaggcaaaatgtctaatgtagattcttatatgaatctaattttagttgatgcagaagaatttgagggatctgatctgttagcaaattatggtaaagtcgttataagaggtaataatgtgcttttcatcaaattagagaaagaattctaacagcaagtattttctgaattcttgctcaatgataataatgctcaatgataataatgcaaccacgaaaatatatatttacatctgaaagtgtaacggaaggacatcctgataagatatgcgataggatttctgattccattcttgactcatttctaattaatgatcctgatgcaagggtagcggtagaggccatgacaactacaggtgtagtcatagtagctggagaggtgacttcaactcataaaatagatgtccaggatattgtaagaaatgaaataaatgacattggttataataaaccggaatatggatttgatggaaatacctgttcagtgttagtttcacttcatgaacaaagtcctgatatctccatcggagtcacatcaaatgaattaaaagagcagggcgccggcgaccaaggacttatgtttgggtttgctattgacgaaacccctgagtttatgcccttgcccattacccttgcccataatttgtccctgcgtttatccgaagtaaggaagaaaaaagagttagattgggttagaccagacggcaaatcacaagtttcaattctgtatgaagataacaaaccaaagtcgatcgatactatagtactatcaacgcagcattctcctgaaatctctcaagaacagattaatgaggaaattaccaaattagtcataaatcccgtttgctcagattggattacatccgaaacgaaagtttttgtcaatcctactggtagatttgttattggcggaccgcctggcgatacaggattgacgggtagaaaaatcatagcagatacctacggagggatgggaaggcatggaggtggagctttttcaggcaaagatcctactaaggtagataggtctgcatgttatatggccagatatatatcaaaaaatatcgtggcagcagggttggccacgaaatgtgaagttcaaattgcttatgcgataggtgtagcaaaaccggtatccattatggtcgatacttttaagacatcgatagtagacgaagaaaaaatagaggctaaggtcaaggacatctttgataccagtcctgcaggaatcattagatctcttaatctgaaaagaccaatttataaaaagacttctgcatacggacattttgggcgaagagatgttgactttagttgggaaaaaacagataaagcagacgctttaaagacaattagtatccattaaacaacgtaaaagtttttttttgagatctttgcatgattattttagtcgatgaaggttattgagcgagtcagatgagaaagtcactagtgatctatctctcgcggaaagcgaacaggatcttcctcaagaagttaaagagaaaaaattaaggggccagctaagaactggttacactactgggacctcagcatcggctgcttctaaatccgctcttcttgcactcttaacgggaaaaagtttcgaaagtgtacgtattacacttcctaaaggtaaaatagttacactcaaaattgcttggacaaaaatgaatgaaaattcggttacttctgcagtaataaaagatgggggagatgacccggatgtaactcatggtgctgaaatttgttctactgtcgaatttacccatgataaaggtaacatacaaatcattggtggcacgggagtcggtaaagtcacaaaacctggacttggattgttgctaggacatgctgcaataaatccagtacctatgaaaatgattcgcgaagcggtgcatgaggtttttgatctttatccaaagttagttgaaaaacatggcttgaaaatattaatctctgttccaaagggggaagaaatagcaaaaaaaactgataaccctcgactgggtatactgggaggaatttcaattttggggacaaccggtatagtacttccatattcaacggcttcctttgctgctgccataagacagagtttggatgttgggaaggcactacatgcagatacttttattcttacaacgggcggcagaagtgaagatttttgtaaaagtttgttcggcaatacttatcctgatcattgttatgttcagatgggtgattttgcaggctatagcgtaaagcaatgccacgacaagaaagtcaagagagtatttatagctggattcattggaaaattaactaaaatagcaatgggcgtcaagcaaacacacgtaagaggctctcatgtcgatatggaatttatggctaaactagctaaggaagtggatgcttctgaagatattttgaaacaaatcagagaggcaaacactgcacgacatgtttcagaaatagttgaagctcatcatgtcgaaggtttttatgatcttatttgtagaaatgcggctatccagttaaataattattcaaaaaacgagttatcaatagaagttattatgttcgactttaaaggatataccattggtaggttcccaaaaaaataataggactcgtttggtaaaaatagtttatcttagcctgtttctgaaggaattattaaaagctcggtgagaaactgttaagtcattatgttttcacaaatgatactatcttacttaaatctcaatacaatttttgacctgacagtagattcattgacgtagataataaatctagcaatgcaaacttataataaaatagttattgtaataatatagtaaaatataggagattcatatttagaattgaatgagaatatatacaaaaagggcatcgctattgtcgctataactaaaaagggcattgaaatcgcaaagagaattcacgatacgttaagcgaatcgcaaatctatgtaccggaaaaatttagggaatcggattcatcaataatttacttctctgattccgtaatgaacaggataggacccatttttcagggatatacttcgataatttgtatcttttcattgggagcagttattagattgatctcacctcatttgaaagataaaaagaacgatccggctgtaattgtaatagatgatactgcaaaattcgtcataagcacgctctcaggacatttgggcggtgctaacgaattaacacttaaagtatccagcatcttgaattcgatcccggtaattactactgcagcggatgtcaacaaaaccattgcgatagatctattgggaaaaaaatttgattgggttattgataattttgaaaatgtaacaaaggtaagtgctttgatggtgaacgaagagaaaatcggagtatttcaagatgctggagaaaaggattggtggaatatggatcaactcccaaagaatgtcgaaacggtacctttgattgttggcttgttatctaatgaatacaaggcctctataattattacagataaactagtgtcaaataaattcctgactgataaatcagtaatatatagaccaaaatcactttatgtagggatcggattgcattggaatacctctaaggaatcaattcaacaaggcatactaaaagtacttgaagaaaatgagttaagcataaaaagtatcaaggccattacctccatagataaaggtaagcgcatcgttggcttggatgaattttgcactgagaacaatattccactacttcttttttcaaaaactgagctaaatgagatagaagttcctaatccatctgaattagttggaaaatatgagggaacatctagcgtgtctgaagcctcttcattggcaggttcgaagggtattttaatagtacctaaacaaaagtttccaccagatttgactgtcgcaataagtcgggtgaacaatcagtgaaaaaagcattgttgataatagatcgaggaagcaagatgaaagaagtacaggaggaattgcatcatacatgtgaattgattaaatataaaactgactattcttacgtaggttattgctttctagaagttattccaccttatatcgatgaagggattagaaaatgtattgataaaggcgctgattctataactattgttccctatttcctttaccctggaatgaaacttaaagatgctgttacccaaactgcatccattatttatcaagagaaaaaaaaaatagtgattacaaaacccttatcatatcaacctattatatcggaaatagttctcaagcgggtaaattccttgattatcgaaagggatctaaataatgacaaaaaaaacctgtgtttattgttaattggtcatggtagtagcgataaacgttctagagaagcttttctatataccgttaatagcttaaaaaaaacataccggaatgttaaattttgtttcttggaattagaaccaccaaatatagaagaaggcataaaggaatgtatgacttctaacccccatacgatagtagtaatcccatactttttgcataaaggcgtccacattcaaaaggacatcttagttgatttatctaaagcacaagaaaaatataattttgaaaggttgtttatagctggacatataggagtggatcctgcagtgatagagcttgtaatcacactagcgaaggaggctgaagttaaaagtgggattttctaacatcaaaagtaatgactatggtataggtaatcctcaatctcgagacatgtctactagggcttttggaattgagaaacaaagttttgatattattgaatccgaaatcggaaatcatgaatatgttgacaatgaatgggccgtggtgagacgggttatccacgctactgctgactttgattttgcaaaaaaagatagaattattttccatgaaaaagcaatagaatctgctttcttagctttttccaggaaatcatttatcgttaccgacgtggaaatggtattacatggtatcaataagaaattattattggatttagatctaactggaatttgtcttataaatgatcctcaattaaaagaaatatcaaagaaaacaaacaaaacaagatcagagctcgccatgcagaaggcggctgacaagataaatggtggtattgtcatcattggaaacgccccaactgctctttatgaattaattttgatgataaaggaaaaaaaaaccttaccattactagttattggaattccagttggatttgtgtcagcagttgaatctaaaattgatttattaaaaatggatattccttatattacaaacataggaaggaagggcggtagttctgcagcttcatctattattaactcgctcatgctgttgtattctacaagaagatctacaaagcaaacttcgaaggaatgattgtgttatttttggtgttaaccattcaatagaaaatagttttacttgtaaaaatcataatgtctgttcatattattttcttgagtactgaatacagcagtctataaatctatctgagaaagtcgaattagcaaaatgtgtgtgcatgtatgaagcaatacagttatgagcatggaaaccatcctttccatcctttataccttttcccttttttagattataaatcaactcaacgtcggcgttgttaataactacatttgaataatgaaattcatgacctctcactttccgcatttttccaagataagtttgattattatttaacaaagcctctgtataaccaagagtaactttatttgtcataatggtatctgcatcaaacaaccccaccattttgtgcttttttttaccgttcttatagccagaaattgtttttgttaaatacattaatcctccacattcggcataaatgggtatgcctttctctgctaaatccaggattgacctgcgcatattagaattgctttctaatttatcagcaattacttctggaaacccgccgcctaatatcataccatttgtatctttagtcacaccattatcatcgaggggactgaaaaattcaatttttgccttactgtgtaataaatctaaattgtcctggtagtaaaaattaaaagacttatctaaagcaatggaaatctttacttttgaatcaagcaatttttcagaagcttgatacctggattttctatctacaaagtccaatgagaacttttcaaaatttgatttatttatataattcatgtttttacatatctggataatctcttcaaaatcaagatgttcggcaataatattggaatttattatgatactatcttgtaatttgtcgtttagttccatccttggtatcaagcctaaatgtctttcatgataaattaggcttttatcattaaatatagttcctacaatcggtatcttaatttttgattcaaacgcttcagcaatatatctcaaatgccgttcactggcaaggttgtttagtattattcctgaaatcttgatgttgcgatcaaatttgataaaacccaaggcgatggcagccaatgatctggctgcttttcttgcatccacaactaaaagaataggcaagtctagaatccttgctacatgtgcggtgcttgcaaaattattccttccagacattccgtcgtacaatcccataacaccttctagaaccgtaaaatcagaatcaatagaattttccaaataagattctaacaatccgtcaattcccatcaaccacacatcgagatttcttgatcggcgttttgatatcatattatggtaagatgggtcgataaaatcgggccctattttgaagggttgaactttatatccccttctcaaaagtccctgtattatagcaattgatattgttgtctttcccaccccactagtaattcctgctataacaattcccggggttttcatcatagaatgttatcataaatcacttaaaaatattatttcaatgagacctttctggttatcaatattgtagtaggtgtattcagcttccaaatgggagaacacactcaaaatgactattctggtgaaattcccaatatctactggcttaatatttttttcctcaaatatctattatatgttaaaccaaatctatgcgattcgtctctaatgtgttgtaaaatttttaatgatttcttgtttttggggacaaagattggctcgctcgaatatgacgtgtaaacttcttcgttctgttttgccaaggaaatgcagtcgatctctcccatgcctatctttttcaattttgtaattgccacgtttaagtgaccctttccaccatcaattacaatcaagtccggaaatctatcaattagtttgtcatctgaaacatctttgcagatattatcgggcgaatatcttctcccaataatctcatccatcatcaaaaagtcgttttggtataataccttttttattttgaattttctatatccgtttttatctggaatgccgttcataaatcgggtacaagctccaacagcgaaatcatttccaaaattcgaaatatcgaaacaatcaataatgtatggcaatcttttcaatcttagtaatacctttagttcatcaagagctggttcatggttcttttcaacatatgtctttagattgttcaatattaattgcataatattaaacttgttcgtgtcattggatttcgagtgatgttcctctgataagtaatctgaatccatagaaattattttgatctgtgttccggtcatctggtacaggacttcatttaactttgcttcctcttcaatatttttatttagatagataacatttggaactgttgtactagaatgatagtattgacaaatgaaattttcaatggaattatctcctaataagtcaaactgatattttttcatatcatttatgactccgttcttactaattagtgtcattacgtgcataattttttgattatcgtcctcaagaaatcctatatattcctctgatttgtagcctccgataaaattattttccattttctgatgctgtaagagattttgtagtctggttagggtatctctgatgaaaatagctctttcatactcttggttgttagaagcaatcttcatttctgcctcgagtttcttataaaaatctccgagggcttcgttattgtctaatattctttttaaggatgttacattttctttgtattgctcttcattaatcttgttaatacagggagcatcgcagtttccaatgtgatattctaaacattcttttcttggaagtctggtgcagatccttatcttaaacattttcctcaataaacccacggataagtatcttgagctaccttttacaaatggacctattacttctccttttgttcctgaaaactctccgtttcggtttctccttgttactagtaaccttggaaacttttcatctgtaacttttaagtaggtgtatctttgctggtctttaagttcaatattatatattggcctgtgcttcttgatcaagtttgattcgaggagatatgcttcaatttcgttatctgtaatgatataatctatgcttttgattttagtaataagcactctggttttccaatttccatcttgatttttatgaatttttttggaaaaataacttttgattcttctatcaagatcctttgctttgccaatgtaaataatcttttgttgataatccttcataatatacacgccgggattatggggataaggatatttgatatagctggactctcttgctttcaatttatatttttacctttgaatattattaatcatatattttaagtcaaataacgatgccattactaccaaaccaaatatctattcacttatttttctctattaccaattctttcgctcttaactttctcattttttcttttagaaaatgtccggtgtaacttgagttgttctcagaaatttcttctggagtacctgcagctataatttgtccccctttatttccaccctcaggacctaaatctataatccaatcagcagaagcgatgatatcgagattgtgttcaattacaataatggtatttcctagttctcttaatctaaataatatttttaataatttctttacatcagcaaagtgcagtcccgtagttggctcatccaagatatacattgtgttacctgaatccctttttgaaagttcagtagccaattttatcctttgagcttctcctcctgacagagtagtggctggctgccccagatgtaaatagcccaaacctacttcatccaacaactttaacttgtttcgaatggggggattgtttttaaagaagtctaatgcttcttccacagtcatattcagaacatcggaaatgctttttcctttatatttgaccgacaaagtttcactattgtatctggctcccttacactgatcacatgtaatatatacatcaggtaagaattgcatttcaatttttctgacacccgctccgtcacacatatcgcacctgccgccaggtaaattgaatgaaaatcttcccatcttatatcctctttcctttgatagttgagtttttgaaaatagatctcttatgaaggtaaaggcattgacataagtaatggcatttgaccgtggggttctaccaattggagattgatctatccctatgactttatcaatgttctctattccgacgatcttatcatgctttccaactttagatttggatttgtaaaaatagttggttaggtagttgaacaatatatcgtttactagtgtggattttccagatccagaaacacctgtaactactgtaataacgcctaatggaaaaatgggattaatatctttaagattattttcagatgcaccaaaaattttgataaatctctctccaaccagcctgggttgaagattttcatttaccttatttcttccaattaaaaaatctgttgtaagggaatccttactttcgagtatatcgtctagttctccttgagcaactacgtgcccgccatgtgttcctgctcctgggccaatatcaataatccaatcagcacttctaattacttcttcatcatgttctacgacaataactgtatttccgatgtctttcaatttgaaaagggtgtttatgagtagactattgtcccgctggtgtaaacctatagttggttcatctaaaacataaagcacaccggtaagattagtaccaatttgggtcgccaatctgattctttgggattccccacctgaaagtgtacctgcatttctattcaagttcagatagttcaaacctacatttgatagaaacttaagtctactattaatctcctttaatatttgctttgaaattatcatatcactcctatttagggtaatgtcaccaaaaaattcaattattttttctacaggaaggttacaaatatccatgatggattttttatttatccttacagaaagaacctctttttttagtctttgaccgttacacatttcacatggcttttcaatcataaattttctaatttcttcgcgtttggattctgagtcggtctcattgaatattctttgtagattgaaaattactccttcaaacctacctgagtattcccatgagctatcactcgatcttgatgtataattatattttatccttgaatctgttccgtataatataacatcaatttgctccttgctcatcctgtctatcggcgtgtttagattaaaaccgaatctcttacctacatcctttaacatggatgttctgaaacttgcaaaatggcccgacgaccaaggtttaatggcaccatccagaatagttttggtcttatctggaattattaagtcgacatcaaactctgtttgaacacccaatccgtgacagctggggcaggcaccaaacggagaattgaatgagaaaaatctaggttccatttctccaatacttatgttgcatacaggacatgaatttttttgagaaaataaatgttctttaccatcaattagaaccatgacaataccaccacctttatcaattgcattttggaccgcctcaaacactctgtccttctcatctaatattttattgtttgatattctatcaataacaatctcgatagagtgtcttaattgtttctccttggctgaaataatatcgaattttttactgtctgcaatatttattatatctttgtcaactctgattcgagaatagccttgttcctttagagattcaagagtcttttcataagtcccttttttttctctaatgacgggagccaaaattactagcattccttcattagtgttattactattaatggctagaatggaggtaacaattgactccaaggattgataggatatttctctttcgcaattaggacggtacgggataccgatttttgaaaacaacaatctaagatagtcatagatctcagtaattgttccaaccgttgagcgtggatttttattagttgtcttctgttgaattgctattgctggtgatagcccatcgattacatctacatccggtttatccattatttgcaaaaactgccttgcgtatgccgaaagcgattccacatatcttctttgtccctcagcaaaaatggtatcaaaggccaaggtagattttccagaaccggacaaacctgttattactattaatttattttttggaatttctaagttgagattttttaggttgtgttgttttgctcctttgattactattttgttttccattttagtttaattggttctaagttttaacaaaatttcatttacctttttaagatgctgtctatgttcaatcgctttttcaaactccaattcctctgcaaatttgttcatctgagtctctatactggttgataactctattaaatcatttctagtcattgtttttagattaacttccaggtttgagatatccgaattcttttgaggtatgggctttaggatacttttgggttcgattttattttctaggttatattcaatctgtcttttgcgccttctcttggtttccatcactgcttcttgtatggattttgtcaccgaatttgaatatagaattactttcccgtctatatttctagccgcccttccaaatgtttgaataagactggtataatttcgtaaaaatccttccttgtcagcgtccaaaatggccacaagcgagacttcaggtaagtctaatccttctctcaacagatttatgccgaccaacacgtcaaactcgcctgctcttagctgccttagtaattcagttcgttccagaccatttatttctgaatgaatatatcttactcttatcccatttctagataggtagtctgccatgtcttccgccatcttctttgtcaatgtcgttactagtattctctgttttttggaaactctctcttcgatttggcggattagatctggaatttgaccattggtcttttttatctctatttcaggatcaactaatcctgtgggtcgtactaactgctcaacaagattatcattattatttatctcatatttaccgggtgtagcggatacaaatattacattgttgagatatttttcaaactcatcaaactttagaggtcggttatcaaatgcgctgggcaatcggaatccataatctatcaaagtttttttccttgaataatcccctttatacattcccataacctgaggaagagttacatgcgattcatctataactaatagaaaatctttatcaaaaaaatctaaaaggcaataagccggctgcccctgctttctgccatcaaaatgtctcgaataattctctattccgctgcaatatcccaattccgatagcatttcgagatcataatttgtcctagatagtaatctttgtctttcaagttcggtaggcaaattgggtaaccattcttctaattctttctttatagaaactagtgctcttctttgactatcttcatccacgatataatgtttggccggaaaaatgattatcgaatctagttctttttttatctctttggttactttatcaactactgtaattctttcaatattttgtgcgaatagatcgattcttatgatatcatcagaatagccgggaattatatctatgatatctcctttaggaccctgaaggatccgcttgtcaaatttacatcatttctttcgtatcttatttttattaaattcctgatgatgttttttctatctgtttccatctctctcttaagcatgagggattgctccctccactcatgaggtgaccctaaagagtatatacatgaaacagtagctataattattgttggttcacccgacaataacattgaagtagattcaagccgcatttgttcgattttttcatttatctcggtatctttttctatataagtatcagtttgaggcaaatagctttcaggttgataataatcatagaagcttacaaaataacctacattattgtttggaaaaaattctttaaattctgcatatagttgggccgctaatgttttgttatgtgatataactaacgtgtttttattgtatttagctattacattggcgactgtaaaagttttaccgctcccagtaactccaaggagtatctgtctttttttattattttctattccatctattagtcctttgattgcggctggctgatctccgctgggaattagattgtttgatatttggaacctgcccaatactgactacctcatatatttatacagtagaccctgtccctctcaaataggaatttcttcaacaaatttatctaattctatatgttctaaacggatacataatattttgcatttctttaacttaagaatatttagacaatgcgttaactggagaaattttagagcccttgtaggccggataaagcccagaaaaaatgctcagaacaattacaacaatcccaattttagatatttctacgatattaaaaacggggtaaatatctaaaggtagattaagaaaataaaggaatccacttaaaaggacatgcgaacccaaaaacccgaatacaattcctacaatagctccaattatccccaaaaatactgattcagttaaaaacattccaagtatgacccgatttgttccacccaatgccttgattattcctatttctctggttctttcaactactgaagtatagattgtaataattattccaatggaccctactatgagcgaaaaaattgcaatacttgatataaaggtactaattccgattataaatttggtcaaagttttgattatttcaagtgaattgagtatggttacctgattgttaaagtacttttggacatcatttacaatgctttctactttgtctatatcgtcatacgtcaagaataacagatcataatcatctgatttttccagaatctcctttcctttctgtacatcaatgaaaatagaattatctatgatcggatttccagttgaattaatgattcttaggactgcaaaactgttatttattgagggatttgatttgacattcgtaagttccttcaagttacttattgttacccttttactattcatagattgatctttgtcttctttaccgagtgcattattgacgattatctcggaagaattcatgaaaattttctcacctattttctgaggtataatgacatagttttgagatgtcaaatttgagaccatagaccttatgtctaagttagggatgatatcagtcaaattattaatatctgtagctagcacattggttacttgggaataattttgataatttaacattgcaacgccctgataagcaggatttatctgttgaacgccggaaatttcctttaagtattgcatggctttgttatcaaaggggatattttttcctaccatagttatattctggtcaaagagcacttgtagtttattccgtattccttctatgcttgattcctgtattttatcggtgttcgatataactatttgattgggaagaattttcttaaaattttgttctacaaagtatattaaaccttgagaaaggctatttagggaaactagtaatccgcaacccattataatcattaggattgttaaagcattccttgtttttctctccttcatggagctgtatgtaaggaaaaaaacctctttaaaatccatattgtctagttatgaggagtggaactgctggtaatataatgtttttaaacaggtatctaatacgatttatgttatatttgggcagtactaaccaaattctatgtataaagaatatttcgattgaaacgctgggcaacattgaaagatatctgctatcagacggatttgaagtaaaagaaatccttgccgatacgaagacaatcaagtcccagaacttgaccgattatgatgcagtttttatccttggaggtccaatgtctgttaatgacaatattgattatctgcttgaagagaaaaaattaattcagtctactttcaatcttgaaattccagtttttggaatttgccttggctcacaactgattgcatcaagctgcggaggaaaggtctaccaaggcctaaaaaaagaaatcggatggggcgaggtaagaataactagtagaggccaatcgagcatctttaataaaatactggggaataagatacaggtatttcattggcatggtgatacgtttactttacctagtgatgctgaaattttgtccgaatcagacttatatatacaagcatttagattccaaaatgctcttggaattcagtttcatttggaggtaacaaaggatatgatccgaaattggattcataaatatcaaaaagagttaaaaactgaaaaaataagtgaagctagtattttttacaatatcgataaaaacatgtctgaggtaaaaaaaatttcaaagatagtatatgaaaattttaagcttatgattgaataattgtattaataaaatcttgtgaacagagttgacctaactggagtcttctagctgtataatgttactacgattattttatctaacacgcaataacttttactatataatagaaacacatttgaagacaagtaatccttgaataattttttttggtttgattcatatctattttgcctcataaactatgttagaaggagtttgggtagaccctaagctgctgcctagatcgcctattgctttaattacaaattctccaagttttttattatacactatattagagttatttgaattaatatgctagtaaaagactttaagatattaatttttaggagaacgcaaatatgttctttattcaattataacctttttcttgtttctacctgtagtttacaaatagaatatgtatgacactatttaagataaacttttaatagagggattatttctgtttgataaagtatcctgttttcaaattattattgcatggtatattgacagggtgctttcataatttcctttactgtggactgaaattgggtcgagccatagaggtgcctacaataatagatgaattaaggtttattcctatgtaattacttaaaggggatggcataatcgtaaaattgatatctgtttaagaaaaatacataattaaacctaaggggccttcggagggatttgaaccctcctcaagcggtttctgtattcttttagaagctaagtgaaatccacagccgcctatactaaccaggctatactacgaaggccactaattgaatcaaaattttatatcaattatttatatataattgttttaactctcaatacctggtaaaaattatacatcaagttctttgactgtacaaaacttatatttctacagttatccactataaagatgagctgctcaggcgaaatatattctcacagcagtaccgatactgatcttatccagattacacccgctgtcaagctaaaattgaaaaaggccaaatacggtgtatttaatcattcagccgtagaattatgccattggacaaaaaaatcattttctgatggggggtcttgttataagcacaaattttatggaatatcaactcatagatgtatggaaatgactcctacagctcttaattgtgagaatagatgcatttattgttggagaccaaccgaattttatgatacattagagatgcctgtacatttagttgatgatcctgaaataattgtccaaaaccttttggaggaacgacgaaaattaattgtcggatattatggaaagactggagttaacatctccaaattggatgaatctctttttccagaacattatgcagtttctctttcaggggaaccaaccatgtatcctaaattacctgagctaataaaatacttgtccaatctgaaggctacaaagtcaatatttttggtaactaatggtcaagaacctgcaatgttatatagattggccagtgaaaatgcattacctactcaaatctatctgtccactaacgcttcgaataaaaatatgttttataaaataaatggaccaaagcatagaaatgcatgggagagatggcttcaaagtctcgattttatgtccggcgtaaacacccgcacagtcttacgctttaccttaattcgagattttaacgacgatcatacgtttattaaggattttgctaaattagtgaagatagccaatccacattttattgaattgaaatcatatatgcatattggaatgtctacaaaccgattagaagaatcaaatatgttggagatggatgagataaggtcatttgccaagggattgaaaacccacctgggaaactactctataatggatgaaagtatagtatctcgaattgttgttttacaaaataaggatcgatttatttctagatggatagaaacttacccgtagaatagaacttatgatcattttagggttgagtttaaataccattttacaaatttatctaaagcagcctttctatgtgaaattttatttttcatttccaaatccatttgaccaaaggttacttcagaattttcagggacgaagatcggatcgaatccccagcctccttttgtaaggtgaaaggaaattttgccttttatttcaccggtaaatgattttattttctgaccatcatagaatgctattattgacttgaaactcgcatttctgtttattttattgccaagcaggtcaataatccctctatttccaattgttttacttatatatgaagagtaaacagcggggaaaccatttagtgtttctatgaaaagaccgtcatcttcgacaaatacttccttttgataaatcttgaatgcttgttgaactttgtcttctgccacttcagctaaactatcagattgaatttcttttagttccatttttttgaattcaatcttaattgttttttttctagttgaaagtaagttctctatttctttatatttgttaatattgctacttgcaaaatacataacgttctttaacatactgtttaatttgattttactgcactaatttgggtcttctaatcatcaaatagcttagacaagatattaaatttatatgctgtttagagataaaccttaacgcttttgaatattgagaattttctagcaatgattgcctggctgggagcgcttatcttggcaagctgggtgctatcatatggtgcagagcatttgtcgactagactcggagcgaagtttgtaggtaggaccttgttgagtgttgctacgacacttccggaaatagcaattgtcatttatgccgcatctgttggcctttatgaggttgcaataggtgcagggcttggaagtaatatcttgatgatgactcttggtctagcattaatgttactaattgcaactacaaggttatcaaaagcgcccttaaagagaatcgatgtcagcaccttcaagattgataaagtgttcttgttggtttctgctttaatcagtgcaatgctattgcttgacggatataattatatagatggattcatttttgttgggatgtttgtagcatatatactcatagcatatatcgaaatgaagagagaacaaaagataaatgaacccgctgttgttcaaactgtggaaggtaaatcagtttctactccagttcatgttctaactaataagaatgatatgacaaaagccattttggctttcgtcgcaggtactattggtattttggtcgctgctggtccatttattaattctcttcagaccttttctgaggatattggagtctcaactattgttttagcagtcattattagtcctattgcaggagaaatgcccgaaaaaatttctatgatgatattagccaggaagggagctgcaggtgctgcgatagcaattgctaacgtccttggctcaaaaatactaaataattctctcttattgggtgtggcaatcatagctgctatgtatcatggtgggttctttactaccattcccaatagcgagatgttatggtttcagatgatgcttgctacttcaatcacagtggttgccttaattccgatgtttaaaagatacatcggcattcgttttggaatacttctcgttggactctatatactgagcatagcgattcaattctttgcacccggggagatcaaacctcattaatttttctaaattaatttaactagatattattttcaataaatacaatttaatatcaaaattatggtaaaaaattaggtataattgaatgataatatacaaattagttatttttctataaaaatattatatgtaaattttaaaaacaaccctctactattactttataatgaattttgttaagtatgcagcagggatgttcgtttttgcaggaattatctctttattagccggaagcggtggaaattatttcacacaatctgtgaatgctcaatctttaggtgaacaaattggtgacagtataggtggagtactagatgaaaccggtgaaggacttggtaacgcaacagaaaccttgagtgaagttggtagtaatgcaacagaaggtttaagcggagcagcaaatgaaactggcgaagcagctggtaatgcaacagaaggtttaagcggagcagcaaatgaaactggcgaagcagctggtaatgcaacagaaggtttaagcggagcagcaaatgaaactggcgaagcagctggtaatgcaacagaaggtttaagcggagcagcaaatgaaactggcgaagcagctggtaatgcaacagaaggtgcaagtcaagccgcaaataatacagcaagtgaagctggacaagctgcagacaatgctacaacaagcggaaatgaaacaaatgcaacagactccaagaatccattggatatgctaatgaatttgttcaagggaaattagcaatttatccttaactcttttttacactttcaatttttgattataaaaatttcataaaatattgcaactttattatttagatctaaaaatgaggagacgttaggactgcaccaagcatgaactacttttatataacacaaataagaggtagttctagcattaacgcgcctttttcatataaatgtcttaaatactgatttagaatatgttttggataagcagaatctgtgatatgggaatatcaaaataacaaatctgaaaatttgatctaaacctttaatcgaacttaagttatttattgtggttcattgcatcttaactgatggaattagtttatgattatcctttatatcgaccaccttctgaatcacaatctttaatttttcaagtaacgttgggatgctctttcaataaatgttcattctgtaatatgtacagaacaaaggagtattccgaacgatctattgatgagattgaaaaggaaattgatttgatggctagttattatccagagaccaagcgggtcttcctggcagacggtgatgcactaaacttggaaactaccaaattgattcgtattctctctacgattcgaaaaaaatttaacaaattggaaaggatatcaagctactccatgcctaagaatttattggaaaaatcgcaagatgaattgacatcattaaaaagagccggtctagatatggtttatctaggtatcgagagcgggaataatgcagtccttaaaaaagtaacaaaaggtgcaacatctaaaatgattgtagatagctgtaaaaaagccaaggacactggatttattttatcatgtatgataatacttggtctaggaggaaaatcttattctaaggtgcatgcagaagatactgccaaaataataaacgaaatagagccagattatgtaggagctttaactctttatatggaacctgagatagaaaaggagttttatataaagttcaaagaaccattcatcccacttgatgataaggatgtattggatgaattgtacagtttaattaagggtataagtgtgagtgactctatgatttttagggcgaatcatgcttcgaatgtatactctattggtggtacactccctaaagacaagcaaaatattttagagaaaattggatatttaagggagcatcctgaattactcaagccaaagatgctgagaagattttaaacaaaagagtcactctgagtgactaatcacatgatatattttctctgattaaataggtagttccaaatcaaaattcaaatactaaattcatgaagaccactgcgatttttcaatcataaacactgaataataaaatactaaattaaccttgcaatgcaatcccacatattgattttttgtttagaaacctattcgactatttctaagcagaataagaaaaaggatgggcaaatctagatgtttgcatcaaagatagaccgttttaatctactgggtaggaactgtctatgatagcatattaagatagataacttgactccatttctaactattttttaccataaaactactgactgatgaactttgcatttacttcgtattgatccgatttattgggtcagttcgtcgcagggtcatcattgtgatactcagactggagcagctaattacttcatccccaattacatttttcttgatggtatttagacctctttatttgttttcgttacttccataacaggaattcagaggataatcaagtctttgttaaaggaatgaaaatttgtggcatcaaaattttgtctaatgtttccatccttccttctaactatacataaactgtcctctattcttaccccaaacttattttcaatgtatacgcctggttctatggttatcgtcatattttcttggatacgacttgttattttgggtcttatccaaggtaattcgtggacctctaagccaatcccgtgaccagttgagtgaataaaatattctccaaaaccttgcttttgaattgtatctctgcaggctgcatcaactaacgcgaaattatcagtttctgttaatcgtctaattcctttttcctgtgcaacttttacaatatcataaacgctcttcatcttgttagatattcttcctattccaaatgttcttgttgcatcagaaacataatgatcataacttaaagtaatatctaacactatgaattcatccttcttgatagttcttttggatgtctccgcatgtggaaacgaggattgcggtccgctagcgactattagtgggttagaggtaaactgataaaaaggaaatttcgcacccattttcatggcttcatacacaagtatagcctgaatttcttcctccgacctatttactttaatttctttgattgcaacttcaaaaagtttatcaattattttagaagctttcttaatattttcaatttcgtgcgtatcttttatctctctaagttcttctaccggattatagccaactacccggttccttctacctatttttttaaccagttctttaatgatattattatcattattactatagaagacaatgctattttcctttaattgattcgataaagaatctgttaaggttttgcctctgtctgatgatatcacatcgcattgcttggacattcttaaagctcgcatatactccagttttgggactattagctttgaacttaaagtatcaaatatcaccaagataccttctccccaaaaacctgtaaaatagaaaatgtcttcaggcttgtcgagaatcatggccatactttcagtagcctcttctttttgcctttgagcagtcatgagtttgattaatttctctcgcctagtcttatgttggttcaattacctctcctcctgtatgaccaaagcaaatgaattacttataaataacgggtaggcttcctgtaattttgaaagttgccatggaatatctagtaatgttgccaggaccgaccaatgttcccaatagagtcatgaatgctatgttagctcccataattaatcatagaagtgaagattttagaatattatatagatcgataatagaaaaaactcaaaagctatttcagacacaaagtgatatagttttattgtcttcctccggtactggggcagtagaggcatcggtagtaaatctcataaaaaaagatgataaggtggttattccagtaaacggtgaatttagtaccagattggcagatttaattgatagttgggggggaaaatctataaggatagaatcgccatttggtgagaaccctccattcgaaaaatttgaacaagtttttgatgaacacaaggatatcaaggcattatatgcagtttataatgaaacttccacagggacaacaattaggtatatggacaagttaggtgatctgtgctctagaaatgattgtttcttcattgctgattctgtgtctatattaggtggtgatgaattgccagtggataaatggaatatcgatttatgccttacagcatctcaaaaggccatagctgctcctcctggagtttctccaatctcagttagtccaaaggctaagaagtatatacaggaaaattctgcaccgattctctattttaatctcaagagatatttcaaatattatcaagaacattatgaaacaccttttactcctgcattaccattgtgttatgcatataatgaagcccttaatctgatatttgaagagggattagcaaacaggattgagcgacataaaagatgtgcggaagccttctacgagggtttgggagcgatggggttgactccctatgcaaaactagatgcacgcagtaacgtcgttattgctgttaattatttacccgggatagatgacaagaaattcagagatcttttatccaatgagtttaagattctaatcgcaggtgggtttggaaatctcaaaggtagagtttttagaatcggatcaatgggggaagttaataaatatcatgtggttaggacactgtctgccatagaatctgctttacgaatgatgaacatcgaagtcccgtcaggtgcaatcaacaaagcaattgcaaaattataaaatatcctttttgttttattgtcaaacttaatatagggaaaattaatagcgaattttatgacattggagaaaggttctcttattctacttgattatactgctaagattaaagatactaatgagatttttgagacaactagagcggatgatgttaaaaataatcccgattatgatccaaataaaaaatatgaaccacgattattaggtgtaggggaaggctgggtattaaaaggcttagatgaagcattactagaatccagtatcgatacaccattaaatattgaaattccacctgacaaggcttttggggaacgagatccttctaaagtccgaatgatcccgttacgtaaattgggtgaaaaagcaaacgaagtaagcatcggggatgtaatagaattagacgaccgaatcggaattatacgttttattggatctggacgagtacaggttgattttaaccataaatatgcaggtaggactcttgtctattccgcaaatattgtaaaaaaattggaagatgacaatgaaaaaatttcaaacctaattagacgacgtttgccaatagacttgacagaggttaaatatgaaaataaagaaaatgatttagaaatatctctacctgaaagtacgttcttgattgagggtattcaaattatcaaaaggggaatctcgacagatatttttaaatttatcccttccttgaaatctgtcatatttttggagaagtatcctaactctgctgcaagctctgagaagccctcagaagaagaaaatactgcttctattccagacaaagatgctattaatgatggagatgaaaaggataaaaaagatgatatcgagatcgaggataagaccactgatgtcagtcctaaaactaaaaaggaggaaccataactttatttttgtggttgctctgcaatacagatttgttttttcaatctaaaatccctaattcatgtagaatgtctttatagcttgacggactaatctcaagcctattcaagatggtatacctttcaggtcgaattttctttgcgagtagtaaagcttccactagttgatctttgtctacgtctatttccttcgaagttgtgggtgcaccaattcttttcaatgcttccctaatttccaaccagtctaaattgtgcaatttagccataatgatggttccaatccctaccctttcaccatgtaatccacatttattttcagctatgtattctagggcatggctaaagaggtgctctgaccctgaacacggtctgctacttccggctataccagcggctacacccgaacttattagtccttcaactatggtccttgtaacttcaatagtaatttggcttttcctaatcttctttgaaatatctataatcattcttgatcctaaataagctaactttgctgcatactcgccatagtactcgttcttgtagtctcttgctagctcccaatcctttatggcggttgtcttggcaattaaatctccgcatccactggcaattagcctgtagggggcacttgaaataatgtctaaatctcctattatctctactggggtatccgcctttatagaataaggtctgtcatttcccttaagcgaaacaaaaggacttgaaattccatcatgtgaggctgatgtaggaatactgatgaatgaaactttcaatctggtcgctatcatttttcctaggtctatgcatctacctcctcccaaacccatgatgatggagatgttcctatcttttagaatatttgtaagcgagtcgacttgttgaaacgatgcttctttcgcaattatccattcatactggagattgctttgagctaaactatcctctattattcctgctattttatttttgacatttataccagttatgatcgcgattttattaatattctggtcactatctttgatgaactctccagagttctttaatatgttatttcctattattaccttcctaggtaactgcattacatgagtcaaacggtaactcatttatttataaataattgagaaagtttgggaaaaaaactagaaaagtttttttgagattattcttctgctttagcttctaccaaatctgctgtggcataacctcttcctactcgggtaatcttaactttgactttgtctcctacttttgtattcggaacgaaaataactagtccctgaatccttcctacacctgcatctcctcttttactcatggattctatatcaatctcgtgttcttctcctgcatttactggggatggcttaaaaaatctgttgtagctaccgcctccattgccattaccgcctccattttcatttctcctattgggaaatcttctttgaccattgtcaccttgtgaaatttgttctattccggatggttgtgattcactgttttccaatctatatcagtacactactataatattattggatatttcaactttgatgttacgagatcgcgcaaacatgtaaattatgttaaaatactttattatatcaaaatatagtatgcaaacctcgttgcaaatcgatagtatgatcaaggagttcatggatgtgagaaatagaactttggaattattttctcctttggatattgaggatgcagtgatgcagtcgagcgatttcggaagcccgcctaattggcacatagcacacgtgacatggttttttcacaagattttggagaaatattctaaaagttatatcactaattatgaagattttaatctatcctatttgaattcttattatcaaaagtacggttctattctcaagaaaagtgatagagggaagtatcctaggcccaccgttatgcaaaccatcaagtataggaaggaaatcgagaaactatttatagactttataaaattgacgagtaataactcaaaagactattcagaccgattaactttagacatttataccgcaattaatcatgaaaggcaacatcaagagctaatgatttatgattttcagcactattataatcgattccttgatgactccgataactatgttccaataatatttaatccctatattgtcagggaacatgttccagaagaaatggtccgtattgaaggaggtttattctcactaggctataatggtgaagaattttgttatgataatgagttacctgaaaacaaagtatatttgaataattacaagatagataataaattagtcacaaaccgggaatttgttgagttcattgaagcaggcggatatcaaaattatcgatattggttggcggatggctgggaaatagtattatctgaaaattggaattcacctctatattgggtattcgacaaggatgaaaataagtggaccaaaaaggattttagaggcactcaggaaattctaatggatgaaccggttgtgaatttgagttattatgaggccgatgctttttgtaaatgggccagaaagaggttgccaactgaggccgaatgggaaaaagctgcatcatgggatagcaattctaactcaaaaactatttatccgtggggaaatgctcccataacaaatgagcacgccaatctgctagattcttatatttggcatcctacggaagcaggctgccacccaaaaggcaagagtcactatggatgctatcaaatgatgggtgatgtatgggaatggacctcttctgaatacatgttatatcctggctttcaatctaggttcgaagagtataccgataaatgggcaatcaatcaaaaggtacttcgtggcggaagctttgccactccaaaagaacaaatacataatagctacaggaactatttcaagcctcatgagcggatacttttttcaggttttagatgtgcggcagacgcttaaattattccatgatgaaattgggtaaggccatcaatctaatatttgtagttgtactttctttaagatagaaaaatcctgtccttcaagtcctatcatcaaggagtaatttcctggggatatgtattgagtttctctcagagtgatatctatttttcctaagttaattgttttattttcgattatttgctgagatttaatctcaaaaatttcaggatcaaaagttacatttagacccaataagtctcctttgggttcaaatgtccctgaaattattggcttgaaggagatggtgctattattagtaaacaattctttttgtttatagaaatctaaacttgagtcaatattattaaccgatagttctatcctttctgtactataattaccattgtggagactaattactttaggattaacggatagagatatgggaataactttatccaaatcaataaaaccaatcttgttttctgattgttcggtaaaccagacgcccgatccaatgcccgccgagaaattggagacatctgtagatacgtcaaactgtaacacgttagaataaccacattgtttgctactattgatcggatcgcatatagaataatgtatattttgacttggaatccaatattctattaaagtatcgttgtctgggacaaatctcccaattttgtttccaacgtgttcgttagtccaaatcgagttatcttcggtagtctttatccaataaggtaaggtactgttgtgaagatttaccgacttgtttgaaatatcgtaataatcaattcctattattcttgacgacagcggtgatgttacaacatgttctatattctgactggtaattttattagagttccctgggggagaaattttgtaaaatgaactagtggcatgatctgttatccagaccttaccctggggatctattgctataccagtaggagatttaatgtgcttcggtaattcatagatgtcaaatttattttccgttatatcgtacctgattaagacaccttttttttcaaacgctaaagctgtaatccaaatactattgttttccttatcgactgccaatgaccccaatcctgtttcataggatggaatattttgaaaaacatccttaagcggaattggtatctctttgagtccttctgaggttccatttatcattttatctatttgaccatgccacaaagagagcgatcttattccaataaaatacatgctgttattatcttcaaaacccattgatattggataagaggtagagaaaaactctgaatgaaaaggaatgggatagttatagaatttcttttctattttatcaaacttccatagtgaatttaatttttcatccgtgaaccagaggctattcattgtgttatctagttttatatcccaactccaagagtttcccgcaggaagatctcttgaataccagaaaggtaacatatacgattcaaatatctgcttcaatggatcaaatccaaataaagtaccatttctggtggaaataaaccatactttgttgtctgttttatcataagtaatagctatggggatactacatagctctgggatcttgaattctgttacgaaataattggagtttggtggactctcaacgccgcaattccacttttcaaattccaaaattggatttgtcatttgttgttccattgtaggttccactgcatatgaatagctgtaaaccattgaaaaacaaagaaatgaaattagcgttattgacacggataggagaatcatcattttagtcatactatcgtaccctaaacttaggatctgagacatgaaaattcgtcatatgtattttctatcgtgtttattaatttgtttgtatagtcctgtgtaactgcgcagttaggattcatcttaagttgatgagccaaatagataactaaggttattccaactagataaatagagtttatggtgcgatttaagtttgatattcgatttatacccgagtttgaaacatgttccaaactgaaatggattgcctaaaatttttagagttagtataacttatattttggattcaaggattgcctgcatatggcaaaaggttccagacgagggggcagggttcgtgataaatggagagataaacaatggattatagtgaatgctccgcccgcatttgacagagtccctctaaattatattccaatttccgatgttaacaatgcaaaaggaagggtaattgaaaatacattatatgatgtgcttaagcaagatccaacccaacatcaaactaagatttttgttcagattgataggataaattctggaatggcttctacgatatttaaaggacatgaatatgcaaaagagtttttgaggagtctcatccgacggggcagctctatgataaattttgttaatgaatatacaacatctgatggttatgtttttagggtatccgctacagcttttagtcagagaagaataaattcagcaaaaaaacatgaaatcagactatctatggccacattgttggctgaaaaaattcccatgctatctcttgatgaatttgtaaaagaggtgactatgggaaaaatgagttccgatatgatggacgtcgcaaagaagatagctctcatccgccatgcgggtgtaaaaaaaactaagcttctttcatctcctctaaaggtcgatggggataaaatagattcggaaggttccattgcagaagctaactctgaagtttctacagaagctaactctgaagtttctacagaagaggaggttgtaaatgttcacaaagaagaattaaacaaagaagaagatacttagtatatcttcattttttgaattgttttcattcgtagatatatctatattagttcatgcaacggaggatgaaaacaaaatattgaatcacactttggaaagttttaaactctctaccaatgtagttaccatcgattgggtgaaaactgaggggcattggaagaatccaataatgcgactaaatataactacatcattcgatatagatcgactatatgacgacctttgtaaccagctaagaattaactatggatccgaggattttgataattatttgaaaaacaaccatgatgaaaaaggctctgtatatgttcgactagataaacaaaacctttgtttaggaaatcttctcctttctgatacggatgccgtcagagtggtattcaaaaagaaaggaaaatttgaaaaataaactgattactgttgtccacaaatagaaacattattgacctctccgttggtttttcttttccggataagacagtatcgttcataaaaaaattcttttccatagatgtaataggaatttatgataatagattgctagctaatgagaaggactctctggtattgaggattcaaaatacgaaacaaggtctcattactaccaaaaataactatttctatttgtactaccaaaatttccaaggaaatcttgacaatacatatggtaatacagatatcttgacaatgagtgatttttttaattctaagaatcttttgaggaaattagcgggcaagaacattggatttgaatttatgctatcaaaattaagatatttaaatatctcagatctaggcagatggttttcatttgtgaaatatttttatggtctctgtaaaagatatggacatcagttaatactctccagcggtgcaaaaaatatctatgagctaatttctttgcgcataatcaattctctccttgataaattggaagtttcttctactgagtattggtctgacctaaaccaatggttgtctcgtaaaaaaaggggtttaatctatgaccctatctaaaaaaaaataccgttatattggcatttatctatctagtcgctcatcctcaaataaacctggtattctagaagaactatctactagatatttgggattatttggatcaattgattacagtaatgccaatatccgaattatcgagattagcgatattcctaattcaatcgtcatattaaaatgccgattggaatctttgactagcatgttgatatctcttagccttattgaattagaattgatgattgtgtctatatcaggtacgctaaaacagctcaaaaaaaaaattctaatgtttttgaattatgtttctgaaaatcaaaaagatctcacgtttaacttcaaagacagctaagtataaagatgccactaagcaactatatacaattcgagacataatgttcaaatcaaattcaatgaaatcaacatcggaggaaaataaagaactacttaaccataaaaccaaagatactgttgacaagaaaaaaactaaggcagtagcgttattatcgggtggtctagacagtcacttggcagttaggatggtgaaggaacaaggtattgaggtagaggcagttgcaattaagacaccgttctgcgattttgattgtgggaaagggtgtggacataaggttctagaagttgcctctgaactagacataaagttaaaaactgtttacttaggaaaggaatatcttaacatgttaaagaatcctaaacatggctatggttctgggatgaatccttgtatagactgtagaatgatgatgtacgatgaagcaaagaaacacatgcaagaaattggagcagactttatcattaccggtgaggtccttcatcagagacccatgagtcaaaattcaaatgctctgtctgtaattgaaaaaggaacacagatggagggaaaagtgctacgaccattgtctgcacggttgttgcccttaacaaaccctgaaaataatggattaataaatcgttcaatgcttggatccatacgaggacgttccagaaaagatcagctatatttagccgataaatatgaaatctcagatcctcctaactctgctggtggatgccttttaacggatcctcagttttcgaaaagagctagggatctgttcaaattttctgttccagagccaagtatcaacgatgtggaactcctgaaaataggcaggcatttcagattaagctccttctcaaaactgattgtaggacggaaccatactgagaatgaaatgataaaatcattaagcgatgatactgactatttaatacagccagtgatagttccaggtccctcctctatattgaggttaaatgtcgatccagatctgcgaaaacacaaatatctattgaatttatctattcaaattaccttgcgttactctgacacgaaagtagaagaaacgtacgaagtttcagtgattaatagaagaaaaaaattagttaggaccttatcgtctcgaccattgaataaaaatgaagtagatgatttcagaatttgaatatactcttatatattaactttaatatctttcaatatttatattaatcaagtagtttatacattaattatatatctgataaaatgcaaacaaaaaaaattggggaaagacctatttatttaaagacttttactcttcgtcattcaaaagatattgttgaaattaaaagggatatcaaaaaaaatatgataattattatcagaataacaccgctggcgcagagagatgtcggagagttaaaagtggtcgttgaagatctttataaatccgttaccatattaggtggagatatagcaaggttgggtgaagaacgtattataattacacctcctgaagtaaaaatatggcaaaacaacccggacgcactttgatgactagtataactgattactaaattacaataattttatggcttcttgattttgtaaatattgagttgaaatgttatggactttactagaataaccacaaaagttttgcacttttgatctttcaccgtgatttaccaatattttcctaagcttcggtcttaatcttgaaatatatgcatttagttgattaaaatcagaatgtgaattaaatgaatagattgtttcaatagggcatcttaattccaagtcttcttcgtctaaagatatcttcctttgtccatctatgatctctttccctaatgttacaccggatggtttcgatgtgaaaattatcagatttccgggatcatttgatattctttttaaatagtccttcgaggagctgcaatttaacattgaagaaggataaatgatgacgcctgagtccaatttttgagtatttatgtctgtaatcgatgctatatttttggaacggaagggattgtaatcatttgatataatagattgctgtaactctcgatttaagaattccaagttgaattcgtgtatagaattgatttcggttaccaacttttcaatatataatttgcatttcattatttttttttgtttaatcagcatatccagagtaatcagtaattcttgggagcttccaattaattgagcgggcatcaaagctaatttttgattgttgattaccttattgagcacttctattaatttttcttgcgcatcttcccgagacatataggagtcttctcttccaccatttgttccttcaattagtagtgtctctactctgggaaagttccatactgcattttccaaatacgaactttttccaaattttatatctccagtatacacaaaattatgatctccatttcctatatggagatgaaatgacgaagaaccaataatatgtcctgcattgtaaagtgtaactttaatatccggagcaacatctgtaacgatattataattcagatgaattagatgcgaaaaaaccttttcaaattccgtgtccgtatagtgtgcttcaggtccgtaatgttttatgtattctctatatagaatatacattaggtacgcagtaggctctgtacaatacactggaccattgtacccatacttgaataacataggcaaaaatccagtatggtcaaaatgagcatgcgttaacaaaacagcatcaatttcagaaagcttggtcccagttgaatcgaatcgtggaaacctagacagagggtctttagtatatatgttcataccacaatctagtaaaacattactttcattggtgctcaaaatcattgacgacctacctatttctgcaaatcctcccaaagtgttcaaattggcctcaatatttggatctaacttttcacgaaatattttctcacctactctcttataaaatcgaatgcgatagtcagaaacatttctaataattttgttaatattcttgattgtgaccatgtttttcggggtctttttaaatgatattttccaccctgattctaaggtgatattatttatgatcttttcatcttttattacttcggatattttttttacgaatattgtggcttctcccaacgcaggatcaaacaatatatctgttatgtttgattcctgagaaacatatttttcagctactttttgaacttcgccctcgtcaattcgaatatcttcatctatccttaatactattcgctttttaatctggccaactatattagacaatattttattattctcgagtaaaaattgaggtttgtttgtgtgaagagcgattctaggaccctcatattcaattttggtcaaagaacattctttaggaagattctgtaaaattgttgccattacagattgactttcaggcaagttctggctcgattcaaaggacctcgagtacatttgaatcacagtttttgattaaaatcaaatagtaaaacaattaacaaggaacttttgaatataaaaacctatttctttatttctcttttgttctttaacatatttataagctgattactaatatctattagtccaaaggatggctgattattttgacaatttaattttttcatcatcaataattatatttgttgtcgctttgatttgtatatttgcttatgagtttttctttaggggtcaaggcaatattgctgaacaatctcgagtagtagaaaaaattaatagaaagggttctaaatttaagcaaaagcaacagcctgataaagttgaaaagtagttacactcaattagaacgacatatattaaataaattttcaaaagaatctttttcaaagttaacttccatccagaatcaatcatttaaggttttagtacgtgggcgggattctttgctggtagcgccgacaggttctggaaaaactgaatctgctattattccagtaattaccatgttagcagatgacaaaggtatggaatccgctgatgacagaggtataagatgtttatatgttactcctcagcgttcattaaataatgatgtttttagaagaatcataaagtatgcaactaatgaaaatctaaaagtcgatataagacatggcgatacatcgtatactaaacgaaaaaaaatttatcaaaatccgccagacatattgataaccactccggaatccttggcaattatgctagttaatgaaaagatgggtcagttattgaaaacagtaagatgggttatcattgatgagattcacgagatcatatcttccaaacgaggatcttatctgtcgttgtgcttggaacgtctgacttttttttctactggcttttgtagaataggtgtttcagctactgttggaaaccttgctgaaacatctcgttttttggtaggaaaaaataggaaatgtgcaattttggtagataaaactctgagaaaatatgatatcgatcttaaacatatagaaggatcaattaaagaagtttctacctttattttagactatgtatctaaaaatcattcagactcttctgttttgttatttacaaatactcgcgatgaatctgaatttttgagtacggtactcaaaaatcagggtaatttgcaagttcaggtacatcacggttcactatcaagagatgctcgagaggaaactgaaaattatttgaggagtggttttatcggaattgtggtatgtacgtcttctcttgaattggggttggatatcggatcggttgatctcgtaatacattatggatcccctagacaggtatcaaaattaatacaaaggattggacgtagtaggcatacacggagatcatctgctaagggactgataattacaaataatcatgatgattttttagaatcattgggtataattcaaagagttagaaaaggatctattgaagatcaaattccacacgaatgtccacttgatgtgttggcgcataacatagtcggaatgacgttacaaactagagaaaagttgaatttggaaaaattatatggagtcttttcatctgctcacttattcagatcactgtcatattttgatttcattgattgcataaatatactcgctaatagttttctaatccgattagacgtggaaaaaaaacatgttacaaggactggaaagtcttataaatactattatgaaaatgtttccacaataccacacatcgtaaagttcgaagtaattgattcgatatcaaaaaagagaataggtaccttagatcaacagtttgtgggagattacggagaaaagggaaacgtcttcgtcctaaaaggttcacagtggagaatattggtaatagatgagggaaaacttcaagttcatgttgaaccgctaagcggtgctccgattaatgttccatattgggtaggagaaatgataccagtcgattatgaaactgcggtgatggtgggcaaattaagaaaaaaaattaggtcagaaaattcaagcaaaaaaattgatgttagtttctctgatacagatccgaagataattgctaatgtgtcaaggaatataaaatcgctggaaattattccagattcctcaaatttagtctttgagactatacctaacgaaagtattattgtaatccatagtactctaggttcaaaaatcaataataccttgggttcattactgtctacattcctctcatcaaagactggttatataattgagactcggtcagatccatataggatattattgagttctgtgagtatcagattaagacggaatcatattttttcattgtttgatgatgaatttgatgtagaatcagtattaatagcgtcttttagcggaacatataatatcaattggaaagtatggggtgttgcgaagcgatttggactcataaaaaaagagtccgtttacgataaaagggtggcccgcatgctttatgatagatactataagacctcgcttagtaaggaatcgattagagaattagtccacgataagtatgatgtaaaaaagacatctcaaataattaaggatataaaatctggagtcatcaatttgcattgggtagacacccgtcaattttccggacttgctcaacctatcttattacgttctaagaaatcaatttcggccccacttggtatagaaaatggaatattagaattggtaaaggaacgcttgaccaaaacaaagcataagttaatttgcatgagatgcggtaaatgggagagagtatttgaaactaaggatataccaagcaaattaggttgtccattctgcaaatccaagctagttgcggctactttttggaaggatggtgatttgggtaacatcattggtaggaaaattactggggcttcactctcaaaagatgaagaacataaatttgatagagcttggaaaatagcttctttgataaataattttggaaaaatggctatttttgtgttatcaggtcacggaatcggagctgatacttgtgctaggatcttacgtaattatactgatgatgagaacttgttgaaaacaatctatgaagctgaaaaacaatacgtaatgactagaggattttgggacaattgatgaaacttgtttattttaagatcattaattaatcatgatccatcataccaatcttaacttattttcataatatttgaataaggtttaagagataactcgatatttccttcctttccactcgatgcatttactgccaaaattcttaccctttcacctattttgagttcacttactaaactactactttctctccaacccactaatctgatttctccggtgtcatcgcctactattgtgtctgcaacagtcactatttctccactcttagtgttaacatccatcttatttggattctgaagaacaatgacctccactacatacggcttgttcatgctatctatgtctactattttactttcaaactgtccagccattggtatatctttgtcctccttcaaaatctgtatgtaggagtcttgagcagttatctcgattgtatttccaagaactctattaggataacattcaatcacgtcatccgtttcaatttgaatattaaatagtttactatctattaataataaatatgactttgtagccttatctattgccatacaatgcattttcctctctgactgatcgatccttgcggagataatcctcagtatgtagttctccacaggttctatttgctctacaaattcaaaccctgtaccctcatcaccatgtatttctaaatcgccattactaaaattaggattacctagtttcgtcttcacgccgatcaatttgatttttgagcctatagtcaaagactttgggactttttcttcattaatattccaaactatggatcgaattttcctcgtgtcgctatcatttgataactccatgtgtagggattttgcacgttctcctctactgttggtgaatgcagatatcctcggatccgaagtaattcttccagaaataaccatattttctttcggaacatctaggtcatcaatagtttttgtaatctcagagagtaaaggaatttgatatttttcgtattctgaaacaatttcaattgacccgtggccgctcaagttgataataggtttattatccatcccggctttgacctgaccctttgatactttaatcaaatctccaagctttaaatccatctgttcgggcagatctacaaaatcatcccagagctttactttgatatttgaatccttatcataaatatggatagttctgttctttgattcctgatttgaatcccttttcaaaaatatcttgattggattaatcgtcataattctaccgacagtagtcacatccctggcgccaacgaatatttctttgatactatattctgatttcgaggttttttccaaagaaatacctaaatctgcggccactaggaataatgccccttggtccgtcaaataccctgcacctacctttgtctttttttcttcaatcaattcctttaatttcgcaaaatttaggtcctgcttttcttccagaataatttcaatcattttattatagtcgagtgccaattatgatgatctaaatcacattagatattttaatttaaaaaaattttcgtagaatgttaagtgaaatataatttttatctcatgtataccttgcaattgattgagtatcgactcctattatagtacgtaaattgaaaagaattcgagtgtggatacataatgtcgattggttcattacagtaaatctctatctcgccttgacacgaatgagaagggtggtcatacctcaagtatcgggcatttatcttcgatttttcagttatctccaatcctaaactgattgatcaggatagacgtgggttataatattgaattctacctacatccaaagcatgtaaacagtcttatgttgcttattttctaatatgaaactttctctttctatacaggaaataaacaatagtaaaaattatcccgaggatgaatgaaaccacggatatcaagaaatatagattttggttaccatcatgaatatcattcggtttagaaatgcttaaaccagactgatcttgactagttatattactaagttctgtaccgatgattttgatcacttttgcatcttttccaaattctattaccagttttctagtttcattttcaacagtagaatcctcagatgatatatttgatttatttttgtttactatttcctgatatttagatggttgattatttattaacactgtaaagttcttatctgtttcatctatcctcgaatctattatcctccgaggcagatcaatggatagttccccattttcgttatatgatgttatatcgagggttagggttttattaattcctgattttgattgtagttggagatcacttaggctcccgccttttagttcgatgctggtgtaataaattttattattaactgtaatcgggataatttgttgcaatatattgtttaaaccagactgatcttgactagttatattactaagttctgtaccgatgattttgatcacttttgcatcttttccaaattctattaccagttttctagtttcattttcaacagtagaatcctcagatgatatatttgatttatttttgtttactatttcctgatatttagatggttgattatttattaacactgtaaagttcttatctgtttcatctatcctcgaatctattatcctccgaggcagatcaattactacactatctgatttactttgacctggggttattacaagagtaatactcttttgatcattatcataaagtatgttgctaattctaactcctacagttgatattgatactggattcaaaacattatctatattgacttgataataaatatcattttttatattcgggaaacccataggatttccatttgcggatgtgtttccaaaaattttgtcctgacttttaggggtatctatagtcgtgttatctgcattattcaaactagcaaatgcatctctaaatccaaaattactgcaacctaatattccgatgcatagtgacatcgcgagcaggcaaattccaatcaataccacaggtccatacttccacaataatttagtataggtctaatcatatgatataagaattctgcgctatcgatttgctttaacattcaatatgtctccttgcatgtcttgttattttcttacctgtaaagatctatgggttgtgatttcccaattatgcttttctgaaattacatttactttataatatcgaaatcttcattctagtattgataaataatataatttcggattattttacaggggtttatgccgtctgagggaatattatatatattcgattactgctttattcgatacttgacatttattttgttattatgtgatcaaataattagtatgggggaattgtatattgtcagctgagaagaaagagataagaatagttgatcatatttaccaacctaaacatgaaattctaacaaaagatgaggctgagcttgttttcaagaaattcaattctaaacccagccaatttccttatatgatgtcttctgataaaggcattcaaggattagaggctcaacctggagatgtaattaaaataaccaggaagagttctactgcgggtgaaagtgtatattaccgatatgtagtagaaggttgatctagttaatgacagtcagtatcagtaataattcattagatatgtggcctatcatcaacgatattttgcgacgagagggagtagcaaggcagcatctcaattcttacaacgagtttattgaacggggactccaaagcataattgacgaggtcaatgagatagaaatcgaaacggcagagtatccttataaaataaaattgggaaaaatcaaaatgcaacagcctaggatcatggaactagatggttcaattactcacgttgcacctgtcgaagctcgacttcgcaatttaacttacgcttctccaatcatgttggaatgcagcatagttgaagagggcaaaactttggaatcaagatttatccatattggtgatatgcctgtaatggtaaagtcaaacgcctgtatgcttcataattattctgaaacaaaattaatcgatgtgggggaagacccaaaggatcctggtggatatttcatcataaacggttcagaaagagtaatagttgggttggaggatctttcttataataagatcatcgttgatatcgaggaaacatcgggtaccatgttatacaaggcaaaagtatactcttcaattgttggatatcgtgcaaaattggagttgattatgaggcctgatggttccatagtttctaagattcccggttctccagttgatatcccccttatcatattagtgcgggctctaggtttggagtccgataaagatattgcaaatgcagtttctttgaatgatactatccaggatgaactggagccatcttttgaaaaatctggcgaagttgccactagtagggacgccataatttacataagtaaaagaattgcaccaggcatgttagaagagtttcaaataaaaagagccgaaacattattggactggggactattgcctcatcttggtaagaatcctgataaccgatacgaaaaggcattgtttttaggagaatccgcatgcaaattggttgagttaaatcttaattggattgaaccagacgataaggaccattatggcaataaagtcataaaatttgcaggtcagatgttggcagacctattcaggactgcatttaggaaccttattagagatatgaaatatcagttagaaagatctggtcagaagcgaggaatcaatgcagtagcagccgctgtcaggcccggaattatttctgacaaattaaacaacgcaatagctaccggaaattggggaaggggtagggtcggtgttacccaacttctagatagaacaaattatatgtctacagttagtcacctaaggagaatccagtctccactaagtcgaagtcaacccaattttgaagctagggatttacatgcaactcattttggacgtatctgtccagccgaaacaccagaaggttctaattgtggattagttaaaaacttggcactatctgcagtaatttcagtcagtgttttatcatccgatgtaattgaaaaattatacgaattgggtgttcaaaatgtgaacgaggcaaatgatgatttaaaacaaaaaggtgctagaatatttgtcgatggccgattaattggatacatagaagatggtcgtaatttatcaaacagattgcgtaccatgagacgatctggtagaatgcaccctcatatgggaatctatttttattcttctttgaatgacaacgcaacaaaaaggttgtatatcagctgtaactcaggcagggtattgcgtccgctagcaatagtaaaagatggaaatatactattgacaaaggaagtgatcgaaaagatttcaaagaaattcttatcatggactgatcttttatacatgggaattatagaacttgtagatgccaatgaggaagaaaattgttatattgcaagtgaacttaggaatataactaacgaccatactcatgttgagatcttcttatcttcgatattgggtgttggtgcctctattattccataccctgaacataatcaatcacctaggaatacctatgagagtgcaatggcaaaacaaagtttgggcttctctactccactaatgaatgcgagtacatatgtgaggcaacattttatgctttatccacagatgcctgttgtaagcactaaagcaatcaatttattgggattagatgaacgaccaaccggccaaaattgtgtggtagcggttttgccatttgaagggtataatattgaagatgctgtagtttttagtaaatcatcaatagatagaggactagcacgtacattcttttatcgtgtttatgaagctgaagctaaacaatatcctggaggaatgaaggatacttttgagatcccgtcttctgaagcaaacattcgtggttatcgtggagaaaaatcttatcgtttattggaacaagatggtgctataatgcatgaatcagttgttaatggtggtgatattttgattggccgaacttcaccgcccagattcatggaggaatacaaagagtttgaagttaagggtccatatcgacgtgacacatcaataggagttagaccatctgagaatggggtggtggatactgtcatcatgactcagtctgtagaaggtggcaaaatgtataagatcagagttagagatatgcgtattccggagataggtgataaatttgcctcccgtcatggtcaaaaaggagttgttggtatgcttgtaaaccaagaggatttgccttataccgaagatggtgtagtaccagatgtaatgatcaaccctcacgcatttccttctagaatgacagttgggatgttcatggagtcattgggtggtaaagctgcttctttgagaggtaaaatcgttgatggctctgcatttttgggggaaaaactgaatgatataaaggatacaatggagtcttatggattcaagcatagcggaaaagaggtaatgtacgatgggaggaccgggaagcgattcccggttgacgtttacgttggcgttgtatactatcaaaaacttcatcatatggttgctgacaaaatccatagtagagcaagaggtcaagttcaaatgttaacaaagcaacctacagaaggtagagctcgagggggcgggttgaggtttggagaaatggaaagagattgtctaattgcatatggtgcttcaatgatgctaaaggacagacttttagaagaatctgataaagcagagataaatgtatgcgagagatgcggattattatcatattttgacacaaaacagagaaaatatgtatgccgggtctgtggtgataaggcaaaaatttccagtgttattattgcatatgctttcaaattattattgcaagaaatgatgagtttaaatgtcgctccacgcttattggtaaaggagaaggtttaatcattttggttgcatataatggaggttttttaaatgaatgatgaatctgtcaagatattagatggtattagatttagcatttggtcgcctgtggaggtaagaaagtttagtgttactgaggtaacggcaccagaaacgtatgatgaggatggaatgcctgttcaaggagggttgatggacaacagactgggaacgttggagcctggtcaaaaatgtgcaacctgcggaaatacatctgcccgatgtccagggcattttggtcacatagaacttgcggaacccgttttacatattgcttttatcgacgatattcataaattgcttttgattacgtgcagatcttgtaatcgtatcaaacttagtaatgaagatttagaaaaatataaaaatttgcgagacagcaaggcagcatatgctgtaattactcttgaaaatgttaaggacgagattattgagaaggcaaagaaagttaaggtttgtccgcactgtcagaaagaacagtatgatctaatttttacaaaacctacaatttttgttgaaaaaactgatgtaggggaaaatagattgctaccaataacaattagggaaaggctgctaaatgtttccaatgaagacctaatattgctaggatatgatccaaagactgctcgaccagaatggttcattcttcaagtcttgcctgttccgccagtaactgtgaggccgtcgattattctagaaacaggtattcgatcagaggatgacttgacacataagttagttgatattataagagtaaatcagagactaaaagagagcaaagaagctggcacaccacctttgattgtccaggatttggtagatctattacagtatcacgttacaacttactttgacaatgaggtgtcaggtatccctcaggctcatcacaggtctggaagaccattaaagacaataacccagagactcaagggtaaagaaggtcgatttagaggatccctgtcaggcaaacgagttgatttttcaagtagaaccgtaatttcacctgatccaaatcttacaatatcagatgtaggtgtcccaagtgatgtcgcaaaaaagctcactataccagaaactgtttctacttggaacattgataaactgaaaaatcttgttttaaatggacccaacaattatcctggagccaattacattattcgacccgacggtgtaaaaataagactggactatgtaacagatcgagccgctattgctgattcattaatgaatggctatactgtagagcgtcatttaatgaatggggatgttgttatatttaatcgacagccgtcattgcatagaatgtctattatggctcataatgtaagagtactcccatatcgtacatttagactccatcctgctgtatgtccaccatacaacgctgactttgatggtgacgagatgaatctgcacgttcctcaaagccaggaggcaagggcagaagcagccttgttaatgagagtccaagatcagcttatatcgccgagatatggcggtcctattattggtgctatacgcgatttcataaccggggcattcttactaacaaaggatgaaacgatactaactgctgatgaaatcgctaattttgcgtatttgggtggatatagtggacctttacccaaacctcatttagagaaggatggaaaatcattttttaccggcaagcagttattttcacttttcttaccaaaggacttcaactttgtaattacttcaaagtggaataaggcttcaaagttgcagggtaaggatgtagtcatcaaaaacggacaattgatgtcaggtgtaattgataaagcttctataggtgcagaagaaccagatagtgtacttcacagaattacaaaggactacggtaacgatgaagcaaaaaaattcttggatgctatacttataatgttaaaaacttacattactcacaagggatttagctatgggtattccgatttatggctgagtgacgaaactcggaaagaaattcaagatgtaattcaaaaaacttatagtaaaatagatgaattgataaaacagtatcatgacggtacattgcctttaaccagaggtttgtctccggaggaagctttagagctatatgttgttaatgaactctcaagagcaagagacagagcaggaaaaattgccgaccgatcgtttcctgatgacaattctggtgtaatcatggcttcaactggggcaagaggttccactttgaatattggtcagatgaccgcagctttgggtcaacaatcaatacgaggaaaaaggattattaaggggtaccggaatagagcgttaccacattttaggcctggtgatcaaaaccctgattctaagggctttgtaaaatcaaactatagggacggactaaatccgatcgaatttttctttcatgcaatgggaggtagagaaggtttagttgatactgcagtacgtactcaacaatcaggatatatgcagcgcagactcataaatgcgttagaacatcttaaaattgaatatgatttaactgtccgtgacccacatggaaatattattcaatatatttatggggatgatggtattgatccagccaaaagcgatcatggggatgccgtaaatattcctaggctggtagagagtgaatccgttgttgatgatgggatcaaaactagtgaagctgaaatgaaggatttgttgctgaaattcaaggagaagatgaatcctaaactaacccaggaaattgaaaattcattggtgacctatcctcttagcaagacgggaattaagaaagtagtgcacaaaataatggatttgtttgaaaaagctttgatagagccaggagaagcagcaggagttgttacggctcaatctattggagaaccaggtacacagatgaccttgagaacttttcattttgcaggagtaaaagaaaggaatgtaacgctaggtctgcccagacttattgagctagtagacgcaagaaagaaaccggttacccctacgatggatatttatcttgataatgaacacaaattatccagagagaaagccttagatgttgcaaagagaattatttttacacggatatccgatctcgtagacaaagtggatactgattacagtggaaacttgtcgtttttcttctctgaaaagaagatcgctgaccgaggaacgtctttacaggaaatccacgaagttttaaaaagttctaagaagaggtacgaagttaccataaacgaagttagtcttgttataaaggtttccttgtctcaggaacctgatgctcaaactttactaacattacgaaataaattattaaacgcgcgtgtcaagggtgtccctgatatcgaaagagtaacgattgtaaaacaaaatgatgaatgggttattcaaacagccggctcaaatttggcaaaagttgtacttgtagagggaatagatgtatctagaataaccactaacaatgtatttgaaatatggcaaactcttgggattgaagctgcaagaaccgcattagtcaaagaagtcactaatacgttagaagagcagggtttggaagttgatattcgacatattatgctagtggcagatttgatgacttcaaaagggtacttgcaacaaatcggccgtcatggtatagctggaacaaagacttcagtattggcaagggcagcttttgagattactgtccccacaatcgctagggctgcactagagggacaagtggaaccattaaaaggagttactgaaaatgtaatagtcggggccacagtaccagttggtactggaatgattgatctatatatgagtgtaaaggaatagataattatatgaatgaaaagaaattagcaaaattcctgaaggagggtgtaaaaaataataaagtaaagacggggtataaagaagtattgcagtatattaaaggcacaaagttaattgtactttcaaagaccttgaccacggaaaaggaagagaaaataaaaaagtccgctgaacagagtgatatttctgtgatccactaccctgggaattctgtactcctcggaagactttgcagcttgtcatacggaaccagtgtagtttcattaaagaatgtctctgatgaagaaataaaagatctcattagtagttaattactacccatttttacggggaaaactgattaaatcaatatggcgatgtctctttttatcattatttacatatcttgaatttatttcttaaaatagacttaaattgggataactttgagagaattatttatacttggatgaattattcttctgttactgggtgcatatgaaatgagtgaaaaaattaaattatctcctgatgagtttcgattactatcgttatttcagacagtcacgaccgctgatgctcgagactgtataattgacgaaaagatggaacgcgtaatatttgtagtaaacagaggtcagatgggaatggcaattggcaaaggagggtccaatattaaacagttacaaaacgtgattaataagaaaatagaattggtcgaacattctgataatgcaaccgattttgtcaaaaatattttcaattcaaatattatacaagaaattcgaattaatgatcatttggatggaactaagatagccttagttgttgcagatgcaaagaaaaagggacttgttgtgggtaaagatggcaggaatgtcgacaaagcgcgactacttgcgaagagatacttcaatattacgaatgtattggttattagtccggaacaattaattaaaagtgaaaagatgtgatatttattgagtaaatcacccttaggattattctcgggtagagttttgaaaacaaaacgaaagcgatcccgatggtcaaataaatattataaacgtagaatgttgatgttggataagaaagctaatccattggagggtgctccacaggccagaggtattgtcttggaaaaggttggcattgaatcaaaacagcccaattctgcggtccgaaaatgtgtgcgtgtacaattaattaaaaatggaaagtcgattactgcatttttgccaagggacggtgcattaaactttgtggatgaacatgatgaagtggttttggaaggtattggaggctcaatgggtggtgcaatgggtgatatcccaggggttagatggcaagtattcaaagtaaatggtgtatcactaaatcaacttgtaagaggaaagaaagagaaaccaaggcgataataatgagtggaaaagaacaagtaaatatgctcctatttaacaaatgggatacaagacttatcgaaattgttgatgaagggttgaaaaatgtcatccatttacatccctcaatgaccatacctgtaacatttggacgtcatgagcatcaacgattgaaaaaagcagaagtcaatattattgagcgtttagccaacaaactgatgcactttggaaaaagatatgcgaaaaatactggaagaatgggtggtaaaaagacaaaggttatgaacgtagtgaaaactgcactcgaaataatttttatagaaacaggtaaaaatcctgtcgaattgctcatacgggccatagaaaatgcagcaccaaatgaggatactaccagaatagtatacggtggtgtcgtttatcatgtttcggtggatgtttcacctttaagaagggtggacctagcattacgattcattgcggagggagtacgcgagtccacctattcttcaccccaggctatggaagaagtacttgctaaagaaataatgttagcctctgagaacgacatgaacagttatgccataaaaaagaaaaatgaacaggaaaggattgcaatgtcatctagatgataataaactgtcagtttctatcattatttcgtgacattcaatgagtggcaaagatgattatatatttaataaaccgaatttattagtgaccggatccgggagaaaaatttttaagagtggtttgatcagggacaaaaaatacacttcattcaaattctatctgaataaatcaagaaaagagtatgatggttttgcccaaagatataaggacgggatttatgaattaataaagtctgatcctgatcctgtcaagacgcacagggacttcataaaggaaattggtgggaccactgaattagaacttactccggaagaaattgaatcgctaaagttaaaattgaaaaatccggctaatttgtttgacagaatcaataggattcttaattcaaatttcataaaaatgacttttcccgtattttatgctctttttgatggctacgctgatagtagggatttacgagatgataaaatgagaaataatgtgatagacggacatttgatcgcaatcgatttgagcgagccgatggatagaattttagataaagatgaagaccttgattatcttgaagattacaaatttattaatccatacatcctcctattggcaaagcaaaagataaatgaaacagcacctggagtactagaagaatttcaatctggcttcgctgacgcccttttaggtcaacaaatcgattatgaattgaaaatcaaaaaacttgaacttacttacgagaatttggaacaaagttacaagaaatatcggtcggtgctaggaacagctggtagaaacatgagtctaaatcaacgacctttgtcagaaatttattacataggtatggcaaaagctgcagaatgtgttgggtgtggaaatgagatccaagatgcaattgttactaagggaatcaagtctccgtcatggccacttttttattcaaacctaactcatgatgtaaaaacaggatttagattaaccttagaaaagagtaaaatatatttatctgaggcatacttggcattggagatgctagataacgatgttaagataaaaccatttcttgaatttctgttcctaacagtgagccattataatgaattttggtatagagagcttgtaaccaaaagagcagatcttctacatagatttcagaacgatttagataaaaaatagtttttgatttgatgtggcggttttaagttattatgtggattgaaaaataccgagtgacagaatttgacagtttttttggtaatgaaaaaccaaggctcataattgtaaactggttaaaaaaatggattaaaggcacaaaaccacttataattataggccctcctggaactggaaagacatcgtttgttaaatcattggctaaattgctggattttgatttagttgaactaaatgcgagtgacctcagaaataaaattaatttggagggcatcatcaatccgatgctactaaacaatagtgtctttggaaagcaaatgctgttgtttttagacgaagtagatggtatctccggtagagatgattatggcggattaccctttttgtctaatatattaaagaatgccgatgttccgataataatggcctcaaatactaagatctataaaatgaaagatataatcaaaaatagcaagcttgttgaatttagaccgttgtcatcatttgcgagttatatgttgctccaaaatgtaatgaggatggagaaaagacatttagaagacatggagcagtttaatatcattaatcaaagtcgtggtgatgctcggacccttttgaatactttgcaagcgcggctggagggagaggttcattcagatagtaacaccggtactgaattagctattgaagaatgtattaacaaattttttactctaactgacatttcccaagcaaaacaaatattgataacatcatccatccgttattcaactccgaaatacggctttacctcggaggaacgtagcaaagatttcctgaatgctttgtataccagcattgttagcaacgagagaaatatacgatcagatgatttggcaaacatattaggtaagctttctgagattgacttatttgtaaaccggatatacgaaaaaaggaattggaacttactaagatatgctaacgacatcttgcttcagaaattatttaggattactagagataaggctatagaatataaccaatattccgttccattctcttcgatgggtccaatatttatgagggggcagtcattaagacctgttagaacagaactatcaaagatttttcacacaagcatatccaaagttggccttttttattattccaatttcattatgattttgaaaaatctggctattcgagatattgattttgaaaatcctgaaaacttaaagttaaatgaaatcatagccaaggaaattgaaaaacagtcaagtaaaacaaaactttaaacagtggttataatttttatacgtagatagattgtacgatgaacaaggatcctttactcgcccgtgattggataaagatgagtataaaatttgcaggtttttgtataatttgcaaacgaaaaatcaatccagcagaagtgggttattggtctagggaggctaaatcaatcctccaccaagattgttataatttgtccagtcttcatactaaaaagattaaaaattcattgaacagcaaaacagatctaactcaaaaaaatggggacatcttgctggaagaatttatcacacatcgagaaaataaggaaaaatgttttatatgcggtaatcgggtaaactttcatgataatttgataatgacactattaaaacttgaaagaaatatcagtactctagacacaattttttgttcgacttgcttaacttgcttcgatcttcttatatatgaagaatacaaacgtgccttttcaaataagctaaaatccctatagaatcatctgtttgacgctttaaaaagattaaaatgtatatatccacaagatatgatttgatatacattgtcaagtgagtatgaatataatgtcagtaagctcttggcagaaaaagtaaaaagattacaggaattgcaaaattcagataaatcttctaattatgaaaaggatttcttaaggatggaaattgaaacccttgaatccttatatgaaaattacaacctgggattaaattattttagacgggctaaggggggtaggaatggattgcgtgaacttcgagaaaaggactaaataaagacatattattcaaaatgaatcagcaattattcatagcaaaatctatatttaatactgatagggattaaaaacataatatatgcgtgaggaaaaactaaaacaatattacgaccaaaaacacagtgctgaagcaggtggaggtccagataaagttgaatctcagcattccaaggggaagctaactgcaagagagcgcataaatcttttattagatccaaatacatttactgaaattgacaaatttgtaactcatcgaagtgatgaccctgaaatgaaaaaatattatggtgatggattgataactggttttggaaccattaacggtagacaagtgttcatctacgtttatgattttactgttctgggtggatcgctaggagaaatggctggaaaaaaagtttctaaagttatggcacatgcactaaaggtaggatgtccaattattggtatacttgattcaggcggggcaaggatccaggaaggtgtatccagcctagacggttatggtgatatttttctaaagaatgctcttgcatctggtgttatacctcaaataactgcgagtattggaccatgtgctggtggagctgtatactctccagcgatgacagattttgttataatggtcgaaaatgtgggccagatgtttgtcacaggaccagaagttgtaaaagaagtcctgagtcaggaggttacatttgaggaattgggaggcgctagaactcatgctacaaaatcaggagttgcacatttcgtagctaaggacgaggttgattgcatggataaaatcaaaacattactctcctaccttccgcagaataacaaagaagaagccgaaatattagaagaagaggttgatgaccctaaccgaatggatagtaatttgataaaggtattgcctgataatccatatcaatcttatgatatgaaggaaatcatagtttctcttgttgacagtgggagtttctttgaagttcatgaactctttgcagaaaacatagttgtaggatttgcaaggatgggtgggaggtctataggtattattgcaaatcagcctttgtttttagctggcgcattagatatacactcttctaataaggctgcgagatttgttagattttgtgactcatttaatattcctataattacgcttgtggatacaccaggatatttaccgggagctgatcaagaacataatggaattattagacatggtagcaagcttttgttcgcatattgcgaggcaaccgtcccaaaaattacgtgtatcataggcaaagcatatggcggagcatatattgccatggggagcaagaatcttggtaccgatttaaacattgcatggcccacagccgaaattgcagtactagggcccgaagcagccataactatcatgcatagaaaaagtcttaaggattctcctgatgcagcgagtaaaaagaaaagtttggcaaaagagtatcgaaacaagtttgcaaacccttacatagctgcggaaaggggaacgatcgactctgtcattgatcctatggaaaccaggcccttaataataagcgcactaaatgccctttctaataagaaagagagtagaccatggaaaaagcatgggaatatcaatttataggtaggtgattggatgtcaaaacaaatttctagtatattgattgcaaaccgtggagagattgccctaagaatcattagggcctgcaaggaactagaactaaagtcggtatccgtatattcggatgaagataagagttcaattcatgttaaacgagctgatgaggcgtattatatcggagcggcggctcctgctcaaagttatttaaacatgaaccggataatggaagttgctttaaaagcaggtgtggatgcgattcatcctggatatggatttctttcagaaaatgaaacttttgctgaactatgtgagaagaacaatataatttttattgggcctaaaagtctagcgatggaattaacaggagataaaatgaagtgcaagcgcataatgaaacaagctaaagttcccacagttccgggtagtgaaggagtaattgatgacgttgataaagccgtagagattgctcacgaagctggataccccgtattactaaaatcagcatacggcggggggggacgcggtatcagacttgcaaaggacgaaaatgagttaagacaggaatttgaaatggcctccgcagagtcaaaagctgcgtttggaaaggctgctttatttgtggaaaagtttttggaaaaaattcgacatattgaatttcaattgattagggattcgcatggcgatacaagacatttgtttgaacgagaatgttcaattcaaagaaggcatcaaaaattaattgaaatgtctccatctccagtaatgacgcctgaaaagagaaacgaaattggagaaattgcaaagagagccgctgatgccgttgactatcttaatgcaggaacagctgaatttctgtgcgatccacaaggtaatttttactttattgaaattaattctagattgcaagttgaacatcccgtaactgagcttgttacaggcctggatttagtcaaattgcaaatatcgattgcaaatggcgaaccaattccctttaagcaacaggatctcacattaagcggtgccgcaatggaatgtcgtattaatgccgaagatcccttctatgactttgctccttcagtaggtaaagtaccttattgcaatttaccgtacggcccaggcatacgtgtggatacttatctatatcctggatgcacggtctcaggcttttatgattccttgaccgcaaagctaatatcttggggatcaacatttgatgaatcgcgtcgaagaatgcgaaatgctttggatgaattcactattgagggaataaatactactataccactgtacaaaactataatgaatgatgaacactttatcaatggtgatttgtccacagattaccttgataggtattctatcatagagaaaatgaggaaagaattaaaggcaaagaattctgataaattcaaaagacttttaccggcggtctcatctgcgatcatccaaacagaatatgtcaaacgaccatcaaagagagatcattctgtccataatacctggaaatttggaggagttgcgtgaaaaagaatggaaataaaggttgatgatatacaggaagaattcagcggtaaaattataggttttgataaaggaggcaatttagttatccaaattaatggatctaatcacctcataaatgtaatagatataaaatcagacaaatttgaatatttgtttgataatacctttcatgaaattaagattctggatgtcacgagtacagaattaaagatattattagatggtcaattaatgttgctcaagaaacatgctaaattgactgaaataattgaaaaatcaagtgccgcttcaggaggtaatacttctcagaatacaatctcaagtcagatacctggcagggtaatatcaatagctgtaacaaaaggcgatgctgtcaagcagggggataacatagtggttttggaatcaatgaaaatgcaagttgctatcaaatcaccaagagatggaacggtaagagatctcaaggttaaagaaggtcaaagtatctcaagaaatgatgttgtagcaattcttgattaaagttacaattatttgtatacagatactgcggttagtcgttcaatttggatcaaaaaaatgaaaatttgagcaatcgattctcttcaaaaggatttaaatttttatgagattttggttctaatttcttcataatcgggttcaataagtggattgtctgttacccatttatatactatcttctggttactattatccacaacaaatatggatcttttagccactttgaaatcttttaatttgcctaaactaggcatcacaacattgtattgttctatcacttctctgttatagtcacttaaaatgggaaagtttaagttatggtgttcagcgaaaactttatttgcaaaaggactatcaacagatattcctaggatatgtatgttgtctcttttcaagctactaagcgtatctctgaaattacacatttcgacagtacaaactggagagcctgcagctgggaagaacgccaaaatagtcattccttctttattatctgataaactatgaacttcctgattcgtatctaagagcccaaaatctggtgccttatcaccaatatttatatctttataagctgacttgctattcaaattgttgttctgattcgaagacatctatgataatatgtgattagcattaaaaagaacctttctgtatagatacccgtaatattcttaaggtatgatacagattagattactagactgatggtgtaataatccaacgtttctttcatacaaagtcaaatccgtttatttttctaaattctataattagtttttttaaagtatctatagcaattttcaattcctcttgtgtgttttgatgtccgatggaaaaccttatggaaccacttatttgatcataattcaatcccagagctttcagaacatgagatgctttttgtttcttattagaagaacaagcagaaccggtagaagcctcaataccatattcatctaatttaattaatagatcctctccatttatgccagagaaagaaaagttaacattattagaaattcgattctccattgatccatttaatacagatcctggtatttctctgattatcctgtttatcatgtatctttgtagtttcttaatgttggcttggacggattcaaatttatccttccaaatttcgcaggctttgccaaagccaacgatggcacttacattctctgttcctgatcttacattcatttcctgtccaccgccaaatattatcggcttaatgtgtattccttgccttatgaataacgctcctattccttttggcccatttatcttgtgagacgaaatcgtcatcatatctatttttaagtcattaacatctattggaattttagcaagagcttggactgcatctgaatgaaaaataacattcttattttttgctttcgcagtttcaaccaaagctctgattggttgaatagttcctatttcgttattaactaacataatactaatcaaactagtatttggagatatcatgtcactaaaaatatctaaatcaatcaatccatccttctttatgggcaaatggtctacctcaaattttagatctttctctatgaagttgatagtctctaatatggagtcatgttctattttggatatcaatattctattgcaagctggatttatactgtttatcagcctagcatatccaattagggctagattgttggattcagtcccaccagaggtaaaataaatttcattagatttagatccgattaaattggatatctgtttccgcgccttggaaacggcgatagttgactttctacctaaatcatgaagtgatgaagggtttccataattggcagttaaaaatggtaacatctcattcattacattcctatcaatcggagaggaagatgcgttatctaagtaaatgggttctttgattttagtatggttattttctgacatgtttatcgattgttattatctccttctggtacagttttccaatatccttttccctgtaaccttctaaatctaaagtgacatgcttaaagcctaactctttgagcgcaaatactatctcattcattgcatcaaggttgcatagtttcgtaatttcactcttctccacttcaattctcgctatcgttccatgatcccttactcttacttgcttcacgtcagatattttttttactattatctcgcatctttcaatacgtcttaatttgactgaatcaatttccgttccgtgaggaactcgtgacgctaagcatgaattcgaaggtttatcataaacagacaaatttttcattttggcaaagtggcggacttcattctttttaaatccaatttctaatagaggactctttattcccttcgaatgtagcgcgacaattcctggcctttcatcatctaggtcatcaacgttcgtcccatctacaataagcgtgatatttttcttctttgctacgtttaacaaattggcggccaattcatttcggcagtgaaagcaacgaagcttatcgttccttgtgaaacttggattttctaattcgttgtattctactaatagatgatttacatcaatttctctggccacttttttagctgtttctaattcttcgtttgccaatgtctgatagtttgctgttactgccaggaccatatctttccctagtgcgtgcctcgctgcgaaggccactaatgcactatctactccgccggaaagggctactagaacattacactttctggatctaaaccaattaagcagtagattatatctactatgatttgaatcctctctactcttgatggtattatttgacatctgttatcagctataagtcatatagattcctttgaaatattaaattattgactgtctccattgtcttcttcaagggaaaaccaagtttgttggcaatttccctaacattttcgaactctggttttatgttaattatttttccttgttgatcttttgatatctttacacttatgacatattcatgattttcaattgtaataggaagcaggacactaaaccgctccaatctgtatctttcatttatagtttttcttatccctaatgttcctgtttcattaaaaatcaattctatgatcctcttttcaatgtctcctgaacaaataactttgagaatatgtactggcctattcttcttagttatcccgctaacaactgtaacatccttaactccttcatctagtcttgatattttttccaccaagtcgccaatcatttcaccggccatatcgtcaatatttgtctcaagaaccgatatcgtatctgattgtatcgagtcataaatattagactctcctatagatattcttaacacgttaggaatgccgtcaaattttttaattccagtaccatatcctattttatgagggattaattcgggatatgtactaataattctaggattcaatcccgctaatattgctgctcctgtaggggtggtaatttcagtgtgcactggacctcctgctatgggtagctctaaaatcctaaaaatttctagcactgcgttagtgggatttgggatcgttccatgagagaattgagttgttccaccgcccacagcgaccttggtagaataaaaagtcgtatcactaaacagatccaaatcatcaagagcagttgcactgccaattatatctgcggccgtatcaatgcttgaagactcgtggagatgcaagtctttaacttctttattatgaatttttgactctactctgattatagtcttcatcgtttccattacaaatttttttgcctcttcagaaatatttgtaacctcacagcaattggccaaaattcttagcatctcagaggcattccgcgctcgtaatctctcttcaatttcaagaagtaattttgtcgcccttattccatttgattcagaatttatgaattctatcttttttatgatggtatcggaaaataatttttctatcatctttatattatttatgattttatttttgtcggccccgcaatctaccaaagcagataagaacatgtcccctgaaattcctgcaacctgcggatcaattacaactatctttctcaaatgtattttattatgagactcttctataatgggctttatagtccagaccttaaattgcgtattaaatgcttaatttagatattgccaatggaactttagagttgataaaaatttaaaactataaataaaaaaaataatgtcacatttgtatgacaatatctattattggttctggaagagtaggtgcttcagttgctctaaattgcggaatgagggaattagatccccaaataaatctaattgatattatcgagggcttgccacaaggggaggcaatggatattaatcatcaattatctgaacaaggtctagacagttttgttcagggcaccaatgactttagtgttttgagtgactcagagataatcgttttagttgctggaatcggccgaaaacctgggatgacaaggatggacctcctcaaaacaaatgcttctattgttaaggatgtttcatcaaaaatcgctcaacatcgtgatttatgtaacctaataatagtaactaatcctttggatccaatgacttaccttgctctaaaatccaccaaattgcctaagaataacgtaatgggtatggggggaatgctggacttgtcccgattctcgagctttattaatgagtatacccgcttatccagaaattctatttcagcaatggtgattagtgaacatggtgaaaaaatgttaccattaattcgattttcctcgatttctggaataccgttaagccatttcatagatgaaaagcaatcaaaggaaatatatgaaaaaactaagcaagttgctgctgaagtcataaagtacaaaggagctacagtatatgcaccaggcaatgcagtcgcaaccatggttgaatcgatagtaaaagacaaaaaaactgtaattccattatctacgtatcttgatggtgaatatggagtaaaggatgtttgtatcggggtccctgcaatactcgggaggaacggaatagaaaaaattatagagttgcccctaaacgaatttgaacaacaagagttctcagacggagttaaaaatgtgaaggaagcaatctctcttctccaataatagttttcttgaaagttttatggatttaaggaatatcttattggattattacaataacaggagaacccttgatgatgtgatcaaatccatatctcttttttctgtagaatacatagagaacgatatagctcaaatcgacattaacagagattttagaaaatcgattccagagattgttcttgcaacccgaaaaaagactagcgaattagtacctgatagctaatcgagttcttgagaaaaaaggttatgtccttatgagcaaaatcaaaccgttgatagtaagcaaattaataaggtactatagtaaaaaaggttttattgtagacagaagccgtaacggaacttctatactagtgtacgacaccatctcttctctccctgtaaacagagggggtaaagtgggaataatttgtgcagggacttctgatgtggggattgccgaagaggcacgcttggcaacattagtaatgggctgcacacctcatcttgcatatgatgttggtatagctgggattcaaagattgctcggctcattgaagcaaatggtgtcgggtggtattgacgtgatagtagtagttgccgggatggaaggggcacttccggctgtggtgacctctttggtaaccgtaccaataattggtgtgccttgttctgtaggatatggctatggtaacaatggcaaaggtgctttggcgtctatgctccaaacctgttcatttggcctttcagtagtaaatatcgacaacggaatagggggaggcatttttgcaagtctaatcgcgaacaaaggtcgataaagaggtcaaatacatttatgattttaaaataaaaaacctcagctaagatcattttatttaagccatccgcgaaatttttgatcacccctgcgcccaaattcctaagaaacatgtctatcttttcggtaaagaatagatgatagttctactgttgctaaatcaattgactagagtttagatgtacataggtttattgaatccgacttgtaactgcgtcactagccttgcattactcttgggggggggactttcgacaattagggtaaaacggggtatgtacaatacctcttgcagaccataatttcatacccagtagtctagtccacagtaaagggcggatttaatatctgtaacagttctttaacccacgctaaattctagactgcaaaacaaaattaagctataaaattttaattgatttagcagttttaaaataaatcttttgcgatgtttgtattaggttggatagcattcttattccatatttgattagtcgatttttaaaacgtttataagagatttaagagagtttttttgattgttagaataaaggaaagaagtaatgaatgtcttacattaaaacgcttaaaagaataagaaataataaaacaaattatagaaaaagaaaggccgtgctaatcagcaagaggaatttcataacagtaaaaataagcaatcaaaatattcactgccaactaatcaaaccagcgattaaaggtgatattgtcctctcgttttccaatagtaaagaactagctaaatttgagtggaaaggttctacaaacaacttatctgcttgctacttggtaggcttgatgcttggaaaaaaaatgcttgccaaaaaaattgattctgcaatcttatatactggtcaaacctctttcacaagcaaagtagcagcctgtcttaaaggtattgcagcttcgggagttaacattccgttatctgaagaatctttaccgaatgaaaatcgaataaatggttcacatatatctgaatatgccacgattcttaaggatgacaaaaataaatatgaaaaacaattttctaaactggttagtaaaaaaattaatcccgaagaatatccaaagcattttgaagaagtgaagacgcggatttctgccggcaatttcgaataggtggaaacttggtcgcactaatattcaccgaaagaataataaacaaaaaaataactgattttgataaggtactgatgtgttgagaatgaaagttatgatgattaatgaattaataatgctttatggcttaggtgtaaagaatgagtagaatgtctaggcccaatgaacctgaagccgaatggaaaccccgaactacactaggcatcttggtagcgagtggtaagatcaactctatggagcaaatattcgaaaatggaatgaggattcaagaatctgagattgtgaagcacctgttgcctgatatcaaaactcaggtagttagtgttgaaatagtgcaaaaacaaaccgatgctggcgaacttactagatttaatgcacttgtagcaattggcaatgagtctggttggtttggaataggaaagggtaaagcctcacaaatgagaaatgctatagacaaggccactaacgcttcgtacttaaacgtcatcccagtaaaactgggatgtggaagttgggaatgtcgatgtcaacaagctcattcagtgccatttaaggtgcagggtagaggtggcagtgtaacaattgaattgattcctggaccgcgtggattaggtatagtagctggtgagaatattagaaacttgttaaaattggcggggctaaaagattgttggagcaaatcctttggatctactaatactatgtcatctactgcaaaagcaatatttagtgctttaagaagtacgtttatcacaggatagtgtttgaaatggtgtatttagtagttagaatgaaaggtactgttaatatcccaaattgggcgaatgtaacactacagagtttacatcttaacaagaaatttcgagcaacactaattccagaaaatgatcaaacattagggatgctccggaaaataaaggaaatagttgcttggacgtcggttgaggaaaacttcatcagagaatttatcgagcaaaaaggccgtgcatctgcctccaaattgctatccaatcaaaaccaagcagaatctgaaaaggtatctaatacggatattaacaaggtcgtctctgaagtctccaaaaatgagatatacttgtctaaattagatggaataaaaccatggttcgcattgaatcctccaagaggtggttttaagaaaaaatcaaaggttttacattctcaaaacggcatcttgggagagaataaagatttgttagaaatcgtaaagaggatgatgtagtctatgagtaaaaatagtttgacgtttagtaaagcattgcaaactttaatatttatacccaaagttgcttatcccctaaggaaaaattggtgataatggatggctactcgattaagaaaaagtagaaaacagcgtggaagtcgcttctgtggatggggccaaattggtcaacatagggcttcaggaagtcgaggcggtgtaggtaatgctggaaagcacaagcacttcttcattagaaccattaaggaggaaccaaatcattttgggcatgaacaatttcatgcattaaggcctagtgactccgtaaaatggatcaatattaaagatttaaatgaattggtaaaatattcagaaacaagtgaagatggtaaggttatacttgatttagaaaagttaggatatgacaaagtcttgggaagtggagccataaactctgcccttacagttagagtgaaaagaatctcagactctgccaaaaacaaaatcacagcagctggaggagaggtgctaattttagatgagctcaatacagaatgatggcttatttagaacaattgtaaagactctttctccatttattccacaagttgagaaacccaaaaagaaaattactttaactaataaattaatatggaccggtattgccatgttaatatatctagtaatgggacaggtcccattatttggagtaaatgttgatccagctactgatccattggcttttgcccgagtaatctttgctgctcaacagagaactttactggagctagggattggtcctattgttactgctggtttgttaatgcaattattgaaaggttctgatatattaaaactaaactttaaggatcctaatgatagatcactttttacatctgctacaaagatagtaacaataattgtaatagttgcagagaccctgctatatggagtgagcgtatatggtggcgctactccgtcgggttatcatttgaccgtactaatagcgcagttgacggcggcgtgtatcgtagtaatgtacctagatgaattggttcagaagggttggggactaggctcaggaattagtatatttattatggccggggttgcgcaagcgattttgtggagtctctttaatccaataccgataccaaacggcactgaacttagtggcttgataccattcatggttacgagtggaatggaaggtcatatagcggactcggtattgcgttcagccccacctgctccagttccaaatatgcctagtctctttgcatttggtattaccgcggggatattgctgctattggtatacgttcaggggatacacgtggatataccaatagtatcgacccgctacaggggatttactgcaacatatccaatcaaattactttatacgtctaatatcccagtgattttggcgtcggcgcttatggcgaatgcgcttttcatagggcaaatggtctggataaattacaatccaaataacgataatcctggctttaacttaatagcgcagtatgatgcagagtctcagaatcctacgggcggtctcttttattatataaccgcacctcgatcctttgaggctaccgtagctgatcccgtaagagcggttgtatacgtactgttcttgactactattgttaccatctttggtcggttgtgggtcgagcttggtggactctcagcgaagtcggcggctaagaatctattggatgctgatgtccaagtacctggttttagacggtcggaaagttcggtagaatcgttgctgaatagatatatcccatctgtgactataataggaggagtaataatcggattactggcttccgtttcagatttgttcagtgtgtttggaactggaataggattgttactgatggtggatatactcgtgaactactataacttgctggttagagaacaagtcgatgttcatatgccaaaattagcttccttattaggacgctcttagaaaatttggtcatatgatgatgattgtagggctaaaatcatcatcatacactatattttcaaataatagtactttccaatttattcagaccaaaattctcaattataaagctaaaaataaaggatttcttttttaaatagaattgtatgactaaacgcgttatgatagttggtattccaggtgtaggaaaatctactgttataacaaatgtattcaatttactctctcaggagggcatcgatactaaaatcgcagaatttggtaagataatgttcgaacaagcaaaactcttatcgataaacaatcgcgaccagctccgaaaattatctatagaacagcagaggtcactacaagaattgactgcaaatcatattaattcactcggtaacgacgtcgtaataatcgacacgcacttatttataagaaccgaccacgggtattaccccggtatgccattaaaattattgaatataataaatccttctcacttgatactcataacagcaaaatccgaagaaatttacaagcgtagggcgaatgataatagcagacaaagggatttaatttcaattgaccgcattagccatgatttaaggctatctgaaagtatgatatcttcgagctccataatatcgggttgccctttttatatcatacaaaacaatacagatgagattggaaaggctagcgataatatctgtaaggtcatattaggcaaatgacggtgaaaaactcattgatagctttatatatacataggtcactattgaccaaaatctagttttagtgttaaaaatgggatcgagtcaaattaaggatattaaaaaaaatgaagaccatacggatcgcaagatgagtattgtgatatctggatggcctgctgtaggaaagactacaattgctgaaaatctagcaaaggattttaatctaaaactgtggaacgggggggatatcttaaagatgatggcgtatgaacgaggttattcatcatcgctcaatcatgattggtgggatacagaagaggcggccaaatttatgaaagagcgtaacgataatccaaactttgatagagaggtagataatcggttgatagaactagtcaaagaggggaatgtcgtaattacgagttatacgttaccatggatctcagacgcaacgataaatttttggttgcaaggctctgttgataacagatcaaaacgtatgtcaatgcgagacaagattgatatcaatactgccaagaaaatagtacaaagacgcgatgttgaaaataaactgatttatcaaaaactatatcaattcgaatttggagaaaagttagatgtatttgactttgccatgaatactgatatattgtcattagaatctttaatcattatttcaaaaaatatagtagagaatgtaataagttcatcttgagtagtatggaatcaaaaggtaacgaacattaatggaatttaatctcccacaattagacaatttagttaagataaatgatggaacatccgatgagaaatttggatattatcctaataatagacctatagcgcaattattaagttatggactgatcttgttggataaaccccctggcaccacaagccatgaaattgtttcttacgttaagaaaatacttgggttggaaaaagctggacatagtgggaccttagatccaggaacaactggattgttgcccattgggttagatgaaggaacaaaaatagtgcctgtactgctcatgtgcccaaaggaatacgttgccctagccagacttcatagccacgtttccaatgaaaatcttcatcaagtacttaaagaattcacaggtcccatatatcaaaagccacctcaaagatcatcggtaaaacgtcagacacgtattaggacaatttatgaactagaactacaagaccaattcgatcgattattattattaagaacattatgtgagtcaggaacatatattcgtaaactgatatatgatataggagaagtccttgaaggtggtgcttcaatgatagagctacggaggaccaaagtttgtaattttgtagatgaatccgactttattagactacatgatctggtagatgcatttcagttgtataaagaaagcggcaacgaagagaaacttcgaagaattatacttccaattgaaatggccatgaatcacattcctgcaataaccattagggatactgcaattgatgcactttgtcatggcgcacagttggcactgcctggcatagtatccattcctaaaaacctaaaaaaaggcgatttagtaggaatttattcactaaaaggcgaaatcgttggactgggtatatctgtattagattttaatgaatttcttagtaaaaagaagggaattggctttcaaataaaaagaatcgttatgaaaccaaatacatatcctaaattttggtccacatctgaggataatgccaagccgaccaactctgaaattaacagtgatgaatcgatctttacatgattttgaacttctgatccagccacaactggtaattgtgaggcaactagattcgatctagatttttagtaatttagatagttaaatagtctctccaaatcctggacttgttttatctagcattgatattttccttgctaggttttccatagtaccgggcaaatgacaattacacatgcagtcatcacattctgcgtgttttaaattcttacaagagattgaaagttgtaatttttccatatacctatcttttgaaaacatgttctaaatttaattgtttaatccatagaaaattttatttaattttgatgtgttatgtaaccaagtacaatttggtagtgagatttggtaataaggatttagctaaatatcctttcttaaaagaagcattttcgtatattactaaatatgattttaaactcgaagatcttgacagcaaagattatcttcatcttatagatagggctagcgaaaaaatagaccattatctattttttggaagctatgattaccaaattaattatggcaaaacacacgaaacgatagtgcaagaagaggttatcgtattcttgatctcattattattagtcaaatctatctcaatcgaagcagtgactaaaaaatttgcattattagaatcaatgaggtttgaaaaatatcttatttctgatttgaacacagctaatcaagacgataaaacaattaaactgatattatacaagatttttgaggatttatttaatactaaaatcttgttagaggtagatatttacaatttctataaaatccgaatcaatgattatttggaccaccctattgcatttcaagagaaacaatggaatttagttaatagaactcttcacaatggatttgtgtatttggatgggatagaaatagtaaggttattcagaaatgaactctatttactaataattgataggataaagaaaatgagcattgatcgtattccagatactataacggcgatttcaaaatctatcaaaagtcgatgggagcaattgcatccttctatcaacacgtatgcttacaatgcagttacaccaccatgcattcaacacatctatgatcaaattagcaaaggtgagaatcttccccatccagccaggttgcttttgggcaccttcttgatttattctaataagaccttggaggaaatgttagaactcttcaagagattaccggattttgatgaaaaaattactcgctatcagttggaacatcttgccggaaagagaggtaattctaaaagatattttgttccttcttgtgaaaaaatcaaattagaaaatttatgctttgagacaaaaatatgtcagggaattagcaatcctactcaactcatcaggaagaaaccagatatctaatatgtctgatacatcttcttttgatttagacaattccataaaaaacggaatacatacgtctaggtaccaaaattctgagccaaatgataagaataagaattggcttgaaggggtctttaggaaatactatttttatcattactctctccttgaacttggcgaattaattaatgaacatgaatttggatttagactgttcgatggcaaaatccgtagacacttggcctttaacaataaaaaagaactatatgcatatattataaaattttctccttctgatatattttattcctcgtcccggtatcagaatccgaaggcagaaatggatcaaaaaggctggattggctctgatcttatatttgatattgatggaaaggatcttcatttagagtgtgctcaaaatcataatctaattttatgtaaggattgtaactctatttcaaaaggtatagtctccaaatgtgtagtgtgtaatggtagtcgattacaaattattgacttaccgtgtactaaatgtttcaaatccttaaacgtggaagtcaaaaagttgatagaaatacttaatgatgatttcggtattgatagtgaatgtatatttaaatatttttctggcaataacggctatcaccttcatgtcattgataagaatttttttcatgcatctgccaaaaaaagaaatgcctttgcacaatatttaatgggtaaaggatacttgattgagaatttaggtattcgaagaaataaagaaggtgctcttatgccgatatccaataagattctctataatcggggatggagaagaagaatttttaattccatacgcatgccaattcagaatcataaaattgatgacaaatttgtcaagaaatataataagatgcaggatacaaaaaataacaatatagaggacattattaataagcatatttttgacctctctgcacaaatcgacccaaacgtcactatggatattcacagaatattccgacttgctggttctcttaatagcaagagtggattaatcaaagctttttgtaaagacttggattctttcaacccatttgtggatgcctgctttatcggagattctaatgttgaaatagaatccaagttaaatgttaaaatatctttgaaaggaaaacaatttagcataaaaaccggaaacaatacagttcccgagtatatggctgcctatatgatttgtaagggtattggagatatccactaacaagtataatattaaattatgaaaccccgatattgagtgatggatcatgaatcagatggtgaaccaattgcagaatactgggtcatggcattttttaaatcagattcaaaaaatagaacatattataggcaatttaccgctgccggattttatgaagcctttgatatcgtaatgaccttctctgaaaaaacatcttgtcaaattctttggtacaaagagaaacgaaaatgtgattcaaaattcacagcattaggaatacctttattggaaaacatttgcactttttgtaataaagagtttaataatattgagccaataaagtgtaattatgaaaaaaataattccaattgcagttctgaattttgctctttagaatgtaaacaggatcatttttactttaaacacgttcgataactatatggatttttataattagattgccttttttatcaattttaagtattcactgaccatttgaggatcaattacaccttgaaccactgaggagaagccagattccaaaacgatatccattgctacggcactgtagggaatctcaaactgttcaatctcttgttgatcttcagtttcgtaaatttgtttatcgctatttccaaatatcttgaatccgaagatcctgtcaatctttcgcatacctgatccccctcccctacctccagccgatccactagattctttgaccatcagaacaaatattgtattttctttcacgcgaccgtctgctacttttaagttaatttcctgcgatgaaactatcaatttccgcattggaagattcagtatctctgatactcttaagaccattagactaagagaatatctatatgctgacaaaaatatatttattgtatttgatctgttgttagaattaaataatgaactaataataatttatcaataatggctaagcctaacaatgggggttatctaactacaatagcttgggaaaatgatggcgtgaaattgattgatcaaacgaaattgccagaatcactcgaatatataatttgtaaaaaccatttggaagtagcagatgcaataagaaagttggcaattcgaggagcacccgcaattggtgttgctgcagcgatgggacttgccctttgtgctaataacagcaccagtaataacaagaaaagggtgatggaggaattaggacttgcatacgacattttgctcaagactagacctacagccatcaacctcaaatggggtttagatagagtacttgaggaagcaaagaaatacgatggggtagacgatatcaagaaacatacaatcctacaggcaattagaatgtctcatgatgatgttgctatcaacaagatgctgggaaaacttggctctgatttaataaatgatggggaggtagtaatgacccattgtaatgctggagcattggctacagtttcttatggaacagcgttgggtgtaatcaggtcagtgatggagtcagggaagaaggttagcgttattgcaacagagactagacccgtcatgcagggatcaaggcttactgcatttgagttaatgcatgatggtattgacgttagtttgattccagatacggcagtcggttatttaatgtctaacaaaatgattgataaagtagttgtaggagctgataggatactaaaatcaggccatgtttttaacaaaataggtacttatcaggtggctctacttgcgaaagttcataatattccattttacgttgctgcaccattgtcaacttttgatatgaataataatgaagaagatatcgttattgaagagcgttccgtggatgaagtggtaaaaattggagagaaaagaatagcaccagtaggggtaagaatttttaatcctgcttttgatgtgacctcgccagatttaattactgggataataacggagaaaggggtaatatatccgccatacgatctaaacctgaggccactatttcagtctgactgagaactaggctgctgcgacagttagggaccaagcaaaaaaatttaaaaagaggttggattcacattgaatagtgtctacagagcaaataaccagggaaagagtcttttctgaattgcgaaaatgtatggatccagaaattccagttaatgtagttgatcttggtttgatttataacgtggatgtttcagaaaaaaataatattgatattaaaatgaccatgactactcgcggttgtccattacatgataccttagtaagtgacgtaaaaaaatatgtcaataccatagagggagtgggtgatatcaatgtacaaatagtatgggatcccatgaaaaaaatccggcagtcagggataaactaggatttggcaaaccgactttgagatttcagatcgactatgaaaaatatatgccaatgaagactggcaaagtaactaagcaggaggacgggtccttagttctagttaatgaaaaaggacaaggatttatggtaaatgagaacattatcgagttttgggaaaattgtactggggatcataccataaatcagttagcagacaatttctcagaaaaactaggtctcccacgacaacagatagaacaggaggtagttcagttgattcagcaactactagaagctgagttgttaatgcctccaaaagagaattagtcaggtatagacaatccagtcggtcatgtcctgttatgtccggttagtttgctgagaacacaagaccttaatttgatatcaattagtttctctactattagtttctttcattttagatgagattagatttcttaattcatcatctaccatatcatcagaatttatgttcaaggatttagcaattatatctagtttttcacgttccgacgatatgggtctttgaatttccggtcctttgtaaatatggttattggcagtagtcacagatgtggctggaacgaacatgtttttttgttccattattttccccttagccttttcatattcccctacaaatttaccaatggttttagaaatactgccaattttcttcggaaatatgaaaataataataacaataaatatgataaaccattcagaacctgcgatatttagctcatagatagggaaaaacattgcctatttattaatgaataaatgcagtaatatttttcttttactagtactacaatttccaaagattaacctttcgttgaatgtttaatccgaggagatttgatcatctttgtgaaaatataataacaagttgataaaatattcaatttgtgaaatcaggtggaaacaaggacatgtctaatgtgctcgtagaaaacgacgtaaccttggagcctttcgactctataattagaaaatttaagtcaggtgaatacatcatatcagtgtatgggttaggtcatgtgggagctcccatagcctctgcctggttgagatcaggtataactgtaataggcattgataaatctgcaaaagttttagaaaatactcgaaaaggggtgacacatatcccagaaccgatggttaatgaaacttttaccagtagtttaaacaataacaaattattggtatacgatgacccaatccaagcctcccgcgactcaaaattgaagatgatatgcgttcctgtcctgataagaaaaaacaaagccgatttaagtgctgtaaaagaggtggctttagccattggaaacggtttaaagagaaatgacatcgtttctgtacatccgtcagtacctcctggaactacagaaaagtttttggtacctcttctagagaaatcaagcggcttgaaagctacatcggatttttttgtgatttataacccggaaaggatttatgaaggtcgtgccatttttgacatcgaagagggtcatcctgggattgtatcatctaacgatatttacagtttagatctcgccgaaaaattatttggtcttatttataggaaaggaatagtacgaatcttgggaattaaaacggccgaagctgaaaagttatttgaaggtgtttatagggatgtaaacatagctcttgcaaacgagcttgccaagttaagtgatagattaaatatcgatttttgggaagccaaaaaggctgccaactcacaaaatttctgtcatatccatgatccaggaattggagtaggtggtgcatgtatcccaatttatcctcaattcatccttgatgttgcggcaagaaacaagataaattgtagaattactaaaactgctagaacaataaacaatgatatgcctacctactcgttaaacaatgcattaaaaatgcttcctagaaagggtattactcaatccaaaataactatcctcgggcttgcttttcgtggtggagtgtctgataccagactctcacctacttatgaactagtaaaagaattgacaaagttgaaaattaaagatgttatagtacatgatccgttggtaagagaagaccgtcttatttcaaaacatagaaatgttgaactagtgaataatttagattatgctgttactaatcgcgatcttataatcttggccaccaatcatcaagaatatttaatgctcaacgcctccctcatcggccaaactcctatctatgacgggagagggtttcttaatcctgacaatttcgaaaaaaatctttatagagggataggtaggccagtttagccctgatttcctgactagatattaatttaatactaataacatttttatttattttcaaaactcactatttaatggtcaagacgcaatctacacaaaaattgatatccggatctgatgcgcctaatttttcattaaaaggtgttgacaataaaaattactctttgatggatattaattcacgtactcttttgatcgtgtttatctgcaatcactgtccttacgttaaagctaaaataaatgatttaatctccatgcaatccaaatttgaaagctcagatttacaaattatagcaataaatagtaacgaccctggttatgaaggagagggatttgataatatggtaaaatttgctcaggaattttctctcaatttcccatatcttatagatgaaactcaaagtgtagctaggaaatacggagccgtgtgtactccagatccatttctatttgatgaatctaaaaaacttgcttttcatggcaaaattaacgatgctttagaacctacctctagacccacagttaacactatggaaaataatattcaaaaaatactggacgggaaaaaatctactattgaaaaggattttgatccatcgattggttgttcaatcaagtggattaattaaagtacaataatcaaggaatcaaataggaaaaggctaaatttatttaattattgtcagtgaagtaattataaatatatatatacattcaatagatttatggtagaaatatcaataaagaatattgatgacttagatatattcgaaggattatttgtcatcgggttagatgagaacaatagagatcttaattatttaaggaaaaataccaaattaatgggtattttgaatactcacaaagtcattcaagaggaacacttggaaaatatgaggaagtttggaaaaagtatgattctttacttgaatgatggtgacaagatattaaagattatgttattagggattggagacagtaaaaaactcaatgaggataaatttagacaacttggggggataatatccctcaaagcaagggagttcaattttcctaatgtcataatatctaatttctattcaagttcctctcatatcgaatcaataatcgaaggtttgctcttgtctttgtacgagtttaataaatttaaggacgataaagtaaacgatctatcgcctaccttttatgaaaattactcggtagtattaaccgctgcggacgacgattttattgatagaaataaaattaatattggtaaggtagtgaatatatgcgaagcagttttttattccagagatcttgcaaattctccaccaaatgtaattaatccaaatgctttagccgattctgctaaaacactagaaaaaatgaaaaacattcatgttgatatattaaatcagaaccaaattaaggacctaggcatgaatggcattatatcggttggtaaaggcagcgaaaatgaacccaagttaatcgtcgtggaatacaataatgcaactacttctacagacaaaccgatagtccttgtcgggaaagcagtaacgtttgatactggtggtatatcgattaaacccagcgataagatggacgaaatgaaatttgataagagtggtggatgtacggtcttaggtataatgaaggcattggggaatttagatcttccaatcaaagttgtagcaattatcccagcagtagaaaatatgccttcgggatcttcatataggccgggagatattattcgaatgtataacggcaaaaccgtcgaagttctgaacactgatgctgagggtagattgatcttggctgatgcgttggcatatggtatttcacaatattctccaaaatacattcttgattttgctaccttaacaggtgcttgcataattgctctgggaacaaacatagcaggagtaataggtaatgacaacaaattgattaataaattggtatcaatatcggatgttacaggggagaaaatttggcagttaccactgtcagaagagtttttagatctcataaagagtaatgttgccactattaagaatattggcggcaggaccggtggaacaatcacggccgcagcatttctgtcacattttgtaaataatgtatcatgggcacattttgatatcgccggtacagcctggactcaagatggaactgcagacaaaagttacaatcctaaaggctccacaggatttggagttcgcaccatcataaaattcctagaggagcatcaaactgagtagtatatcttattttttcttttatcttagttttttaatatgtatgaataaattgaggtaaaagtgccagcactgctgtttcccaacggctcacgcacgtcagtatcaagcagcgacattaggtttgacttccgggttcggaatgggaccgggtcgggccctaacgctatggccggctacattttattataattccgtcaatttaatccttcctatatttgctagccgttaaatccactttacatatcctaggttgggaaatgaattagtaggatttttttggattctgttttagttttagttttttttagctctagacaacttcccaaaattttttgttaaagacattagctttcagggttcctcatttttttaaatattctcttatttctgttttgcttcatttgattcaggatttatataaaagatttgcgcatattatagtatacaattggataaacatggaaatttgactcatagagttgctgttttagaccaggaattgtgccaacccagaaagtgtggtctagaatgcataatctattgccctgtaaataagactggtggagaatgtattattcaaaggcccgatgatgggaaggctgttatttctgaggatttatgtacgggatgtactatttgtattaaaaagtgtccttttgatgctattgtaatagttaatctagcccatgaaataggtgtagataaaatacatcaatatggaattaatagcttcaggttatataagattcctattccaaaagaagggaccgtaacaggtatcgttgggagaaacggtatggggaagtctacaataataaacttgctttcaggaaatataaaacctaattttggtaactttgataaagaattagattgggatgaaattttgacaaagttatcaaacattgagcttcgaaaacactttgaaaagattcaaaccaagtcgttgcgtacttctataaagcctcagcttgtatatctcatcccaaaggttttcaagggtactgtctctgaattaatgaaaaaatacgatgaacggaaagtttctgatgttttagtagaagaattaggtctaaaaaattcactcgaaagggacctttctactctaagtgggggtgaattgcaaagggtggccgttgcagttgctgcggcaaaggatgcggaatattactttttcgacgaaccttcttcttttaatgatatataccaacgtttagccgtcgcgcgggtaataaataatttagctaatgagggtaaaagtgtaatgattgtagaacatgatatgtctttgctcgattatttatcggataatatctatatcacttatggagagcctggtgcctatggtatagtatcgtctcttcaaagtactaaagttggtataaataatttcttggaaggctatattcctaccgaaaatgttcggtttagggataaagcttataaatttgatatatccagtaataccgagactattctctcatcttctcctgtagtggaatatactgcccttatgaagacacttggtcggttctcccttactgttgaaaagggcgaaatccatcaaggtgaggtagtcggaattgttggggctaacgctttgggtaagactacctttatgcgaatgctggccggtatagaaaaaatcgatcaaggtagcctggacactaccttgcgaatatcatacaagcctcaatatctcaaccaagatatagatggtgatgttcgctctttgatctattctgcaaatggcggacccttcgaaggcactaatgtagaagaacatatcttttctcctttaggaatcaagaagctatatgacaaatccttaaaagggcttagcggcggtgaattgcaaaaagtagcaatatcgttatcattaataagaccagctgatgtatatgccctggatgaaccatctgcatttctagatatagaagacagaattacgtttgcaaaattcatacagagatttacaaagtcaaacggaaagtctgcattagttatagatcatgatatccaattgatagacttggtttccgatcgattgattatgtttgaaggtattcctggtataaaaggaacaggtagcactcctatcaccaaggagatcggtatgaatgactttcttaaatctttgtccatatcatttagaagagatgagacaactggcagacccagagtcaacaaagatagcagcaggctagacagacagcaaaaaaccgagggaaattactactacttgaagaataaataaattgcaagtcgtattagcaaatgagtaaatttttaaagaaactcctcaaaggtgtattggaagatgaggaacttgaaaaagtttattcttcatttgatataataggcgatatagccattatcaagatatctgattctctcttgacaaaaaaaaatattattggagaggtcatacttcaaagcataaaaaatctgaaatctgtttttttacaaaggtcttcagtttctggagaatataggttaagagatctagaagttattgctggagatgagagatacgttacttattatcgggaatatgattgcaagtttttagttaacgtggccacatcgtatttttcacctagattgtctacagagcgacttcgaatttctaatttggtttctcccggagaaatagtggtaaatatgtttgcaggtgtaggaacattttcagtaataatggcaaaaaggcatcctataaaggtgtataatattgattcaaacttggatgcgtatatcttgagtattctaaattcaaaaataaaccgattaaaggatcgcatcttctccatacatggggattcgcaggaaatactccgttcaaacagctttaaggatcacatcgacagagtattacttccattgcccgaaagggcccatgaatttgtagatgtttccataaattgcttaaagccctctggagggcatttacattttttttctcacataaaaagtgaaactaaatctcaggttgtctctaattctgaggcccatattcgcaacttattctcaaagtacaactatgaaataaaacatacccaaatagttagagatgtagcaccgcgaatttatcaaactgttacagatctctttattttcaagtgatcatgttttactagcaagggatcctatttctcgtcggtatttttttcattaactgtaagtgtgattccaatccagcctactataaaaaatattacacctacgattattgctacggtcagctttagcaacagaattccatattctgtagcaaaaagagtataggcataagcaggaaaaacagacacagctataaacaataataagattcccttgattttttcaattccattcatagttttttcattctaaaattcttgtatttaaactatcgaattgttctttaataagtgtataagtgattaagtgtattatctattttttgtcaatactaatctgggttcttcaatcgttttggtatagttttcctctatcttgtgtaaaaattgttctttagttaaatgatcgttatttagaaaggcggcaatagaactaccacctgcacctgcaccttcttttacaaagccttcagaataggattctcagtccctttttggatgagttttctaaaaggagatcaatatagaaaataggtacctcatgagaaattttattcatcagtccaacaatatctgattttttatctttgattatataagaggttgttccgatgcagacattatctcttaactttatatctaatgatcttaataaagccaagatacaacacatttgagttcctccagctaatataattttcttctctcttgaaataatttcttctgccaatcctacgactgtgggcattagtgggtctcccaaattggatatggccttaaaagggtcgtttgaacaatctccagctctcatattggatcttgatagagctttctctattaccttgttcttcaattcattagggttgtccggcatactactacttaccatgtcatacccatcaataccaagggcttgtaggacacccaatgcagttgtagtacctcctggaatactttctcctataatcacagcttcatttactttggctaattctttaccaagtgttttgcccatttcatagttattcattacattgtctagccctaagccaggctcttgaattatgttctttccaaattctgaattaatactaacgtagggtgagatgggttttatcttggatccagagtcgactattgatattggaatatttgataaatccaatgcagtttttgaaattattgccggcgttggttttccatctggggtagcaggtattgtatcaatacatttacatttaccataatagatgtattcggcatcggcggcgggtgtgtattttaacaattctgtatttgctccagcgaccgtcagacccgggatggtggatgtttctgtataggatattgccaaaataaaagatgatttatgtgatttgaacgataacaaatcattattgcctgttttagaaggaacagttttgataacgtcggtaatcaacaaaattctctcaaagtctatttataataacctttacttatcgatggcatgtgttctgtgatttgaagacttttttttgttatggcctaatatcatttgtatgcacatcttaaaaacacaggggaaggaaatgaaggaaggaaatgaaggagggacaggagtctataacagcaacaaccacaacaacaacgacatttatttgtattgtcttcctcatgaagtcatgtactcatgaacctaaggaaatcatctttattcttgaacttgaaaacaaaattggattcaaattctttttgtagcgttgacgtcttacttgaaccataatgatggccagggaggattgtcaaatttccatccaagttaactagtttactatatatagaatcaaacatttcttctggatttcctccaggcaaatctagtcttccgcaactacctacaaatacggtatctccggtaaccataaccttgtcatcaattattaaacaaatactatctctggagtggcccggcgtgtgaattatcttaatctttatatcataaaattcaataaactgtccatcctctacggcgatgtctttctctagcggagataacttatgttgtataacttttgctcctgtagtgctttttacttgttcattaccgaatatatgatcaaaatgtgaatgtgtgtttataatgtacctattactaagcgaatttttttttaggtattcatagataatttctaggttccaagagggatccacgattattgagtccttatttttttcatctacaattacgtatgtgaaatttgccatttctcctaccagaaattgttcaactctcatgctcttttcactccacccctttttccgattcaaatggtattccaatctttctaactattaattttcctgcattttcaaaattcttcagtattccatgttttggtcgatgaaatgttatcgtagcgtctgcataaattgctttgtcaataatttttccgctgtccggatctaaccctgaaggaatatccaccgcgagtataaaactagtttccttgcaataatttattgcgtcaataacttttgaaaatggttcctttatctctcccttaattcctgtcccaaatatcccgtctataatgatatttgattttttaatttcatattcaatttcagtaatatcgtttgattctaatgtaatttttctaaccgattccattttgtttataatttgccaatttaaactggattctggagtttttaattcttcagggcgacataatagtatcacagataagttgcttttattattagatttatttcttgcaagaatgtatcctgataggtggcggattgcaactaatgcatcaccaccattatttcccttaccacaaacagcaacaatagatttattcaggatattttctttgaaatcgtctatcaagaaatctgcaactctagatcctgcattctccatcatcaatattttcttcatcgaatagattgaatcaccgttattctcaatctcgtacatttgactcgatgatatcggctcaaaccctttctcgactgcataattatcatttaaattcataaatttacttacctttcagactgtattaataaatttttcccaaaaaattgctgacagttttattactggtatgaatgcagtctcttttcttcatgtgattttactttctgatcaagaggttctttatgatcttttgtaatgtgaggtttataacattcatcgtgaaggattcctatgtcacagaattcacatgatgttacaaattctaattccttgaaattttgtttacaaaaactgcatttctcattgggcaatgactcggttaataacggttttagccatccttctctccataaaacattgggcaataaataaacagtaatctgatcccttaaatatctgttatatattaaaaggcatcagataattttttaatttaactttcttgattttagaatcataaattgcataggtatctccattgtaattacatttaatgatcggaaatttttttggttttttcttaaatcttactattttgtagtactcttttgtttttcttggcaggtattttatttcccccttaactattagcctttgttttctcataaatttaaatgccaaaattatatatctgtcttgataagcttcaaacatttgtgtaatgagataacatctatcaatttgatcttggggtacatatatgctattactagtagccgtctttgcctctattgatagtaatatagagtctgtgttgtttactgctacaatatcaggtaagcctgtgctcgaccctcccaatcttcgcgcaatccattctccacaatttagttgcttaaccaaacgatactcaaaattataccctctgcttctgcgaatactggtcatctatttcaacgtttgatttagatgccataaatttttttttatacgttcgtagcaactatttataacgagctatgaaactctaattatgacttttgatattgattctaccaaattacataattccttgaatgaattttcatcctatctgaaacaagtggaatcaagtagggagaaattaattaaagaaaatagggaaattattgctttaagtagcaaagctattatcttgttacacagtggaaagacagttgaagcaaatgaattaattaataatgcgttttctttgctatcagaacttaaaaaatatgtgatttctgatttagaacgctatctgtggcctgcagaacaagaatatgttgaagctgttattctaaaagagattgtagaaaggaaagaccattttagcggacatgccgagctgcaggtttcattcaatgcatatattacaggactgcttgattgcatcggtgaaatcaagagaatgatttatgataatcttagaagggacgactttgaatcgtcattgtctttatttactatcatgcaatccttatatgattcaatctacccattttcgttctatgacaatattatttctggggttagaaagaaactagatgttggtaaacgcataatcgatgatgttcgtatttctataacagaggaatacaggcgaaaaagctttctagacaggatcgacaattcgaccatcgtaaaaggatagatagtattagatccctaaagcagggaaacctttcttaatgtcctaaaaaaataaaggctaagcaaatttggcaaaagcttcagaaagatatttgtttagcttattggaccaatccgggaatccttctgatgtatcgggataatttctataatgtttgactaattcttcattcatttgagaggtaaatttcaagtcatctgcaagtttcttatttaatgctcctcttatcatcatacctagcttgctaacagtgctaaattctggatgttcgccgttagtaattttatcaacatccattttcgacagaaagtgcttcatgccatagttaatctgttcgttggtgagttgttggagcattcttctgaaaacttccaagccagccgtcttgtagccatattcgttaatgaaattcttattatacttccaaagcccgttctctgaaacatctcctgattctattgcttcaactaggtcttttccagctattgtggctgcaattattgcaggacctattccgccagcatccagtggctttggcatccatgccgagtctccaaccatcatatagccattggcaaccatgcagtcgttctgcctccttactgaaacctgccatgtaccccattcgttgcctaggtcctcctcaccttttgataaccttggatttgatataaccggattgacacctacataatcgtcaattaaccttttcaaatccctctttcttccactctccttgtttgctttatcaaacagcttttgttgaacacccaaaccaatattcactttattttctccttttggaaagacccatccataaccacctggagccaaattttgatctaagtgaattatacaatattcagggtcaaaaaacgtcttgtcttcggtaccctttttatcaaaatcgtaaatatacctgccagtagattctagatcattcctatctatccttctttgtatgtaagttttaatcggtagatttgtgcgtagtaccgaagtaacaccagtgcaatcgactaccactttagcagtttttttaaatatttccttagtctttgtattttccccttcaacaccgacgataaaattattctcagatgttagttgtctaatcatgatattgctagctatttcaactcccaatttgctcgcctccgtaacttgcttttggggtaactgttttctatttaatatatacccctcaccatcaaatgagactcgggtttcgtgatccggtgaaaaggctactactccctttactggatgttcaatttctgggtaaccccatgatattttgattctatctgtcatgtaatcaacagtgtttttccctaccgcatctccacaaatccaaccagaaatggtctttcttccttgaatgtcgatagagttcctatctagtactagaatcttcattctttgtttagaatagtaagctgcagatgaggctactattagtccagctaaccctccacctgctactatgatgtcataatctgtttttgacaggctcatcttttcctgataataggtataagaaaggataattaaagctatgttgtcagtatcttcaatcaagaattattctcaattataaataataaaacaaaaggacaaaattgggactaaatactgggattgatattaaaaacagcaatttaggtcgtgaatatattaatattaataatctaataatacatcaataataaacttataatacagtagatgaaaatcacgatgcaatcgatctcattgcaattcgcaaaaagattgacgttgatgacgaaaaggcgtatctagtttcctatttatcctgaggccatgacatctgtgactgaatttgacttattgaaaaccttgggtttgatatagactctccaaatgtttttagaatgtcttttgtatcatcatcaaggaaaacagattgattttagaaaatagatatcaattgcagccctgaccttaacatggaattgatgctatcttccactgcactttcagcagattcaaggatagtatttgccgatttcaaatctcctgcgaatgaaaactggtatgcctgagttaagtttgactgtacattttcaaatccaaactgttccttgattttattccagattatttctccttgtttctttagatcattttctatatcatcctcagcctgaataatttggttacttattggctctgtctcctaatcggcctctgcctcgactgatacggtccagattaacaaaccattccaagttacaaatgttacaagaaatactctaacaagtagaccaaaaatacagggaaaataatgattcaatattctgttactcaaaaaacaagtatagagtttcaaaatttatatttaaagatatttactgctttttatatcgtctgccatatcctttttttgccgattttaagaatctgtaaaatgccttctcttatatatgaggaggaaccacaagtagggactaattcaacgattatctgcaactagagatatagatcttgttgaatggaccgtcaaattgttttgacgaaaatcaatttgaacatctaaaagctcaagtatcatgaattgcttactaatatcgtgacaacagaaatcgatcaattttttcgtaatatcaagtgtgatcactgcaataaaataatagaaaaaaaggtaaagtattactttgatcaacctaatgttgttttgttatcagctgacgtgtgtacagattgtagctaccgcataagtttaaaataattctcgatgaacaaacctgcacataagcaaataatctaaaatatgcaatggatgtatctcatttctatttgttagggattttagatcgaggtttttttattcttttctaccctgtctattttcatccattttgtgcatttcttagctaaagatgtattatcgatagattagcatcagaatctaactctaattacagttaattttacaagccaaaacgctgctaaatacatacagctttattgtctctacctcgattgggataaataacgagtcctgaatcacatttgagcaaaattattaatatatagttccgcacgattattctgtaactcaaacaaaatttttggtgaagttgacacaaaatattaatcaagttagtccttttactatagcatagcaaattggagcgagagatagacacagcaaaccctgaacagaaaaagacaaaaattgagtgtattagatgtggttcgataatgggggaaattactgtatgtcaccttaaatgccttaactgtggagcggaattgacttgttctgataaaggaaatttctggtaagcacagtttggcgcgatagggttatctgatgagacaatactataattagcataactaatcatttatccggtacttaattcaataaatcaatctcttgttctcaaatatttttctttgagtctgcgattaataactacttcaacccttttcaaaaagaatgatcatacgttacatttccaaaatttttacatatagataattttcaagctcctattaggctaattacgtaatcacttatcttgattgtagatgataaaatccaactgattgtatataccagttagaataaattctggatttcttaagaatgaatgtgattagacaaaatctttactattcaaatgaaaaaaaagttaatccttattattttgatggtgacgtaataattagagaaatttataacgaatctaatagtaatgatcaggaagtctattttgtagaatttgctagaggggcattgactactattcattatcatgaaactgagcaattcttagttcctctatatgggaatggtataataggcgaaattggtattaacaaatctaatccattgctggactttacttttgagagtctgactataaaatcgctaagtgttggagaaattgtttctattaaaccagatattctgcattttcatggtgcatcacctgatcaaaatttttcgcatgtggcatttcgaaacatgtttgaagctaaatcagtttctcaaaagaatgaatcaattcgtacgcaaacaatatggggctatgagatgatcgccaaagcactagaatccgaagaccaatctagaatattaaatgaattgaataagatttctgaaaaaattcgggacgccgtttctacatgggcgaaagataaaaaggcttaaaacttattaggattagaaatttatgataaacttgtcaaaaaaaaataaaggttagttactttgattttcgttagttgctagactattctcaaggttatttgctggattactgatgtttgtatcatttgcgaaaattgcattgttacttccttctattgcttccagatcttggattgtttcggtattgttaggatacatggatgttgtattttgtgctaatgcattaccaaaactaaaactcattagtattgctgcaaaagtaaaagctgccacaatgattgttttattttccattggataaaaaagtaataatgtattataaaaatatattgaaatgttattatagtacttttcgaaaagtcgaaaaggagatgttgctaaaagagtcaagatatgccgtgattactatatattactttgtaagattagtgagccatccgagctttctaaaatagtatagcattatgattaccgatccgactgaaaaacttaatgtgatgattaaaggtataaaatccattaaattatagctataatttgtacttcctggaattatgatattcattccataaaaggttccaattactgtgacgggaattgataaagtaaaaagtattgtcaggaaactcagtattttgttagttttctcgctgctaagcatatggtccgtatccttgtaaatttcaattgtttccttggactcatcaagggcttcaagtaccttagaaacgtggtcattgatatcattaaaataagaaattaaatcatcttcttctaaatcggtagagaattttcttacatctcttgaaatgatttccaacatgattctttttagcggtccaactattcgacgaagagttgttatttctcgtctcaacattgagatttcttttgctatagctaccttgtcatcaaaaactgcatcctcaatatcatccaggttgccgatcactttcatcaatatatgtagcaaatcatccactaaagcatctaatattgaatgtaataggtgtcctggagaatttcccatcatgtttaatttgttctttccgctatccattttacaggcctgaaatagctcagagagtggtttcaagtctccatgatgaatggatattaagaaattttttccaatgaaaagtgaaagctggctaaatcgtggagacgtcttttccttctgggtcgtcggaaattgtaatattataaaaacatgatcatcgtatctgtctatttttggcaattgatttttggacaaacaatcttcaatgttcaattcatggagtgaatatttttttgagaccagatccattttttccctggtcggctgctcaatgtatacccattctagtcctctacttaccagtgactccaacccttgaaatcgattagacaatgtcatcttgcataacctttgttagtttcatttaatttcaagaactccttactaattaagctactacgttccgaatctatacaaaaccaagatacataccttactattttttagagggaaaatccttcaagttatgggacttacatctatgacaattcggtgattccgatgaggctagataattaacataaaagcaatttgtgcattgcttacgttcaaaccttgattttaagatgactgctccattatcctctttaacaatcaaaacattcctattattaagatcagatataacgctactaaataactcggttatttctttcatattccagtttctatatttgaggtagttttctttcatgatacgacagatctcctcactgtcaaacatccgattaaattctccaccattattattgtttatacgaaagaagtaatctcgcagataccattcaaattcgaatgataaaatttccgtattcacgtactttttttaataaatattattattttttaactctttcggtttagtgatatgaagcatcccatggatctcttaggtaatcagtgaacggaaatggatagggtattatattggaggagatgcctgatttactaactgcttggaaattaacttcttcaaccccggaagattgtaacccatttgagctgaaatgggtattatttgatccatgctttcatttacatttagctcaattatcttgtcattgatttcattgttttttaccatatctattttgtttaatactaaaatacacttttgaaaaggaatctgcaattttgacaaaatttcaagggaactttttaattttttctttataacaggaacttcatcgctaaaatctactattaataagatgatattcgcgtaattcagctcggatagggtagacttgaacgcctcgatcatgtaaggtggtaacttactaatgaacccaatcgtatctgaaactagaacttttctaccctcaatctcagaagcacgggtaaaagtcgtcaatgtagtaaacaatttggtactagtctccttattctcgcttgacaatatgttaaacaatgatgtcttgcctgccgaagtatagcctgtcaaagatatcaagggtaggttgtctgagagtctttggatcctatggagagctctttttttctcctctgcttgtagttttttctttaataatgcggttcttttctttatatccagaatgtgtacgtctgcatcatattttcctagaccaaaaaatccgggctgttcacctaacttcgcgagccgtgacttttcttttactcttacaatatcgtattttagttgtgcaagctttacttgaatctttgattcattagttatcgctctatttaggaaaatctctaaaatcaatttctctctatctaatacgtctattttgcataatcttgcaagattatactgttgacttggttttagaacttcatcaaatattattacatcaggttttaatgccgcaactctttctttgatttcttctgcctttccctttcctacaccaaatcttgaacgggtcaagtttttctggctaattatctctatgacggagtatccaattgattcagcaaggcttttcgcctcggatagtgtaaattggtttggatacgtgattaatagtgctttcctatcctctgaatacattaattttgatttttctaatcttaacatccaatttaaactatcagcttatttaggaggattctctttgagttttgataaaaaatatttggtaaagttaaataatttgttttaaatatgatatattgtttgcaagtagcattaaggagagttaacggctatacaatacgaagatgtgcttacgaggatttgaatccagtaattagcattaatttgaaaactcttcccgaacattataccgagtatttttttgagtcactcttacgcgaaattccagaagcattcattatagcagaaatagataatgtagtggtaggctatataatgtgcaaattagaatttggtttctccaattttaggaaacttggctttgtaaaaaagggacacgttgtatctatagcattgttgcaagaacatagaggcaaaaatattggggaagcactgatgatagagggtataaatgggatttcaacaaggaagggtgacgagatttacttagaagtccgtacgagtaatggtcctgctatttcattatatcataaacttggatttcaaatcaaatcagtactaaaatcctattatagagacggggaagatgccaacctgatggctctagaaatatcttaaactatagtaaagtaaataaaataatttacctaattacaaaaaaatgaattaaatagatgatattttactaaactagtatgaatatatttgaaccctctacgtttttggccattttcccatatgttttcatctcctcttttccaatctttggaataatattggtcacatattggttggtaaaggataagagatcgataattaggaaaaagtgatttatttacatccaccttgattttatctctattctcgacatagctccgacaattggtaattatttttgaatgtttgtctttttcaatgctgctcgtgtcctagtgatttacgatccttatacaataaacgagaatgtatcgtctattcatcagtagtctattgtataatagtcagatatcttggttggtttaggattaaacaaattatgcataaatcggatcattataattttgaagttgggagaggaggacagtgaggatgggaggacagtgaggatgggaggacagtgaggatgggaggacagtgaggatgggaggacagtgaggatgggaggacagtgaggatgggaggacagtgaggatgggaggacagtgaggatgggagaccgagaggcataggctggagtgatcctatccttcttttcagggtatgctattggaaatgataaaccaagcaaaatgattctaactaagactttaatggataagggatgatcataatttgaccaatgagtacatttttttttatcctgtatttaatttaaccaaacatttacagtcattgaattcgtttgttaataaagggaagagaaagagggaagacaaagtatcgggacaagtgtcaaatcttctacctaattgtaaagagttgtataggtaaataccaaaccaaaaataaacttagttattacagctcgtataaaagattgaatgaatatctggcagacttgatgcggttgaatttactattatttgatgaaaaaaaacaaagattcatagcaactccgaaaggaaatgactttgtaagaaaatacgataacatcatagagtttatccccacttttaaaagagactatgaaatatagtgtaacttttttaagatattctagactaattccatcatctctacacatctgctgaggacttttcttaataacaattcaataacttttctctttttggtcacattgcggtctaaaatgtcattattaaaaaattcattttgtgaattaaattcatattattttgttatctgctcattttaaaaaagtttagatggcttaatttatcgtgcaataggattgtcttaaatttgactctctcatatctatagtgattttgactgaccagtcagtaatatttatatgctctaaatttgtactacttatatggaaccaaaacttggcctgtctaccagtgcttttaaatttcccatgattatattgatatttgcatccattggttccctcctgcaaataggtggcggtaattgggatgttacttcacatttattacttattcctgaatcgttttttactccttctcatgccttgctttacgctggtataggtatcttgtctctttctgctatcatggggggtgccatattgatgaaatatggtgaattaaagaaaaccggtatgactctatcctttaaattactcataataggatctgctttatcaattatatccggaccgagtgattttatctggcacgaaacctttggagtggatggatttctcagtccgacccatctgatgttaattacaggaatgctaatcaatacctttgctgttgcaattggactctttcgattaaattctgttgtcaagaccggtactttatatcaacttgggagaatgttctttgttgcagctatgatagccttatggttaaatttgatatcttatgtttacatttttgctttgcccatttctaatggcgaactatttaattttaatttgaatccactagcggaatcattaatagcgttagtactattgccctcaattaattcagctttgttcctgtttgttctaagaagtacgcatactgtcgggattgctagtgttatagcagccggagtcatcttgttaacagcgtttactaatatattaccatcccaagcgctttcgaatttacttcctttttaccttctaacgattattccattcatcttgattgacttgctgattcatgacaaacttccattagggaatagaataattggtaataaactcaaagctgtaatttctggggctatttcaggttctctattttatattatgggatatccattgcttcctttgacgctttctaattacctgacgcccattgatttggaacaggtgggatttataacaattgttgacattcttccaagttttatcaattctttacctgtggtattgcccataaccatttttataggtgctatctttgggattttatctatctggatttatgacagaatcgagggctacaaggaaagaaattccaaatctaatcgagtgatcgttgaataatgtgtgcaaaggttactttagaacacaagttagaaatacgagatagaattgttgcaggtgcgctcatttccttttctaaaaacgggtttgataaaactagaatggatgacatagccgctaagtcgggagtgagcaagggaactatttatatttattttaaaagtaaagaggaacttttctatgaactgtgtgaaaagaacttggttgcacttagagaacagttattttcattactcgttatcaattatgaaggtaacaatgcaaagaatgataaattaatttctaatgcgaaaggattctttaatagttttagtcaagttgaaaatagttatataatttttctagaaattttgtcaaaatctacacgaaataaaaaactaaaatcaatactatattctcaacatgaaaagatcgttacaagtatgaaggaacatatcttggactctattaagaatgaaaaaacaagaaattttccggaagagaaagaaattgatagtatggttatgagcctaatgacagtttacaatggactaatgatgaacagacttctagggataaaagaagaaacaaacaagaagacatgggatgacagcgtgagcaggattattgggactatgcgaaagtaattaccaaactagaatgtatgaaatagtatttgtaataaaaaaatcaaaaaattttatagttttaatatgttgttattgaaaattatactaaaaatagtaatccgaataaaaaaccccttgatagggaatgattgtttgctagcttgcaaagtccatgattattaaatatatttaattatcgacgattccccatgtcgctgtgctcgcctccaccgccactctgtggtgaaaagcctccaccgccactctgtggtgaaaagcctccaccgccactctgtggtgaaaagcctccaccgccactctgtggtgaaaagcctccggcactgtgctgatgtgaaacgccactgtgatgagcatatgtcccactgccgctttgttctacatgattacccgtactgtagttggtattgtgtgcatgagtaccacttgaatgattatcgtaggcggttctgctgtctccacggtcatcatggttcactttgttaccattatcgtcataatggaatttctggttatgattgttgtttgtataatagtacttgtgaccgtcattgtcgtaccaatagttttgaccttgagcatttgtataataattattaccactttcatccttgtagtaagaattaccactttcatccttgtagtaagaattaccactttcatccttgtagtaagaattaccactttcatccttgtagtaatagttgttacctccatcggagtcgtcatcgctgtcttcatcgtagtaaattggttgaccataatagtcataatcatccacaacagtctcattaactacgtttggtaccgttgcattttgtcccaaaacacttgtttctgttgcattttgtcccaaaacacttgtttctgttgcattttgtcccaaaacacttgttgatgatcctaacaaagttactgttacaagaaaaattgcaacaatacaagtaaatatgaaccggttacctaaaatcgatcttttatcacccattaccgtcatatgttataaattgtatataaagatattgagaataacttcctaaagtccaaaaaatggacaaaagatttatcaagtaacaaggaatttttattagctttaattattatttctaattcctagtagtattttcactttttagaaatctttgtttgatctttccaagacacataaagtaagtcaactaaatgcacatgtcttgtgctactaaaagagaacggatataacaaaaggacataggcgtaaaacatttctatgttgtcattttaaacttccataaactattctagcgtaagctatctaaaattatatctggctaaaagtcatgcacaaagattttctttcttttatataatatgtgacaaatacatttgttttactaaataagatatctagatggatgcagaactatatactcaatttaaaaagtttttcataatcatttccttaataaaatataactgacgtcggctgataaaataagccatagttcataactaaatttaaaaatactatttatgatgagtgcttttacgccaagtacattgtcaagattaggggataagatatactgatccaaggcggtttgttatgaaaattgagagccactatttgggattatcgatgggaaatgataacgtagagcgtatcaaattaacaatcgggatatatatacattgattattgttaccaatggcatctgtaaatttaaaatcagctgtcagtttgtttaattctataaattttctgaaaggtttttcggttagaacatgataatgggcaacaacaccaccaaccatgccagtatgaacaaatagtatttctttatctttgaacgtaatatgataaagcattggtgtaatggccatgaatgactgtgacatgtacaatatgacatttaacaaatccttcatattttcatattgaagataagtggtaaaccattctccttgcgacatgcattaccttacaagtcatacgattatatatgttacctatatttattaatagtgagaaaaatccatattattgatggctaaaaattatgtaatagttagtagcatttaatcaaaagttttagcaaagacaatccatactaccaaattcttcatatgagcatatattccaataacaacctgaatagcctaattagcactgaatttaataatgaccaaataatcatagaattaaatggctagtttcttaagacctccattagactttacagtttcaagggaagattggtgtagatataatttatcggacgactccattctaaagattaagttaatagccactaaaatccgaaaaaaaaataatgattataatattgatatccaaaatgtaattgtggtgttatcaaatgagcgaggtcaagcagattctaaatcctatactccaccccaattacaacaatcgataacacatgatgttaattatacaactataactcaagattggaatgaatatatcgttgatgatggggcgattataaaggttcagcccatggtaacgaaagtatcaaaaacatcaaaatttgatcttaatggtgatcctgtatacttagttaatgtacaaggtaatgtagtagttgagctaccaaaaccaaaaagtcaataatatttatttgtctgactaatctttacactttcaatttagacgctgatgtggagaaaacaactgatggagcaatcattcttattgatattattttaaataaattaaactctggtcaccttttccaatgatttcggtaacctctggataattcctagttaatgattgtttaggttattgagttctaacgcaaaaaattactaatatatccatggattttaagattttaagattgatattaataggctgtttccgagagtaaagctccgggagagggatttgaattccgcagcaatacttgacaagacagaatacaaataaatttccaaaccattttgaaaaaatactattctaaagggtcatagaaatacagagagggctatcagaaccaagtttttttaggatgaaatctatttgtagtttctcaacacgtgagatatgggacagatacgacatgaaccaatggtgggttcatcaattgtattctatttaagttttaagtcgttttctaatagtacaatgttcaataagaatatatagtaagacttctctatttatattgattgcaaactcatacaaaaacaggaatgttaggacaaacccgtgctaatggagagaaagaggacttggaatgcagtactcgacagcagatgatggattactattatctcaaattccaacatgatcatggttttgtaatcggagataataagttaaagcgtaatgttgaagttatgataggtaagcaaactctatattgttgttttcatgatactcgcaatgctttacacgaatgtgaacatattaaatttatcaaaacgttagacgaaatacaaaattagtctgctagtttttttattataaccttcattcttttgaaccctcgcacccttttaatttattcataaaaagaattttccgaattattagatttacaggatttctccatgtcaactaggcattggaaaagaagttatttgtagaattggtatagaaatgtatccatgggctatatttaatttttaattagatgatacttaaaaatattggtaaaactgacaaagatcaaatgcccttactctctattagtaatgcaattataaattttacttacactgaatttggcaaatatagtcatgattattaacaatgcattggcgagatgaaaatttctttatctaggagaatcagagtgaagattttcaaatattgtatactaaatgtatttccgttatttagaaatgaaaattaattatagaatcgttgtaatgtcgtttttcaagaaataagaagtacgtataaaaactcatatcagattatcgatttatttatctattttcaaagtttaaagctaatcgagtcttcggatactactctgtccgattatccagcatattagattcataatacccacaggcttgaaggtacagaacttaacaatctgcaaatttggagtgcagttggtgatagggcatacgtattaacttatggcgctattcccaaagaatttgatgattcattgcctgtcattcagaatatgattgactcattcgaaatacaagaaatactataattccttatttctttgctattgttataaggtatcctaatctcaatgcattatctgaaatatatggcaccaaagttttgatataatcctttttgaaggattcaattttatctttatccaaggaatttattacctgaatcataaaacccgctttagtgattgtatcctgccagtagtgcttcggactcagaaggggaatactaattgtttctctttcaaagaaaatgtcctcaatacctggcaaaagttgtttcactctttctggcattccccagttataaggcgaaaatgcttcagaagataatgtattatatttggaaacaacttcggatagttttccgacagccaattctggtggccaacttgtgaatcctaagcgtccacctttctttaaaactcgtaccatttctttacctgctaacccttgattagctgcaaaaatgtgaccaaaggttgacaaaacaacatcaaaagattcatcttcaaacggtaggtcctctgcatcacattctttccagtctatcccgctaatacccgcaattttttcttcttgttttgccaatgctaaaagcttgggagtaatatcaattccagtaacttttgctcccatccttcgagcagttatcgctgtattaccatatccgcatgctatatccaaaactgaatcgtctgcttgcaactttacaaattttgtcaatcgagcagataccggaggaaaaaattggcctctacttctataatctcctaaactccatatttctttgggactatacaattataaattctacattatgaagttaaataaatatgaatactataataaattcgataagttactacatagtaaatacaacttcaccgacagagtataatgtagagtagtttgaaaagcgtcaaaaacagagccatgtcaatttgtttttaatgtcgtaaataaggaacctgtaacatattacaaacatttagattcgtataagaggatgaaaggaagagatgatcaaagatattgatattagcagggatgaactagtgaaatattttgattcaaacattctcaatatcttgatggaccatgaacagcgaacattgaaaaacaaatatctttctgttgtattttgggatatcagtggatttgctaatttgtgcaacaagttagttgatgaaccgttcgcaataagtgaacttttaaaattatattttcaagaagcaaatgatattattcataggtatgacggaataatcgataaattcatcggagatggggtaatggcgtactttggatatccatcggatgaaaaacgcgaaattgcgtcagccgcaattaatgcagctttagatttgagagaaaaatttgaagatatcaaagtatactggttaactaaatttgttgataaatcaattagtttagaagatgtatttgtgaaatgtggcattcatagaggaaacgttttgtttggactattagaaactaaatctaggaatcaaataactcttgtaggcactaatgttaatttcgcaagtagattggaaggaatagcagaaaaaaatcaaatagttgtttcaaaagagataattaatctgataggaaataattattatttcgataccattactcatgacattcatgcatacggaaaaaccgaagtatttgatattaaaggaaaaagagagtagaaagatgcatctttgttctgaatcttttagccaactagttgtttatactcgtagtgttataccagggagctagaaaccggtaactcagcaaagcaaatttgattcaaaataaagaaaatacagaaatttttctcttagggttttagcacaattttagtagtattatctttgtcattgtaaaccgatcataaattgctaaataattcttaattcaggatttaaaaatggactatttttctcggttaatggaattcctacgacccatccattttgtattctcgagtaaggcgccgggagagggatttgaaccctcgaggccctcacgggccacaagctattcagtttcctaatttccaggcttgcgcccttccaggctaggcgaccccggcttttgattaaatgataattgtcctctttttatgtatatctaatattaatttatattctaaaattaactcatctctatcctgtcaatcatccggcctgataacaaatcaaatttataaatctttgaatggccggtgctagctttatgatcttggacatctgaataaaatagaaaattttgattacattgagtacaaacccaaacaatatttagatctttatcattcatctctttgtctaagcatacgattcaaacatacgatataagcagtttgaaaacaaataatattaatttattttgattattcttaagtaaaaatatctccaattattataacgataaagtgtaaatgactattttaatacagtgctgtttagagtgtttattacaggatattgctatgtattaatcaatctcgtttcacattatatataaaaggtttccataaattatatagtatattcttattttgttgctttaattatttcaaacagtatatatattcagatgatcgggtgtcaacatagcagaacagaatgagtagattcaaagaacgttgattttttggatatcaaactcatttaagttgattccacacagagcaatacattataaaagaaaattctttttaaacttattaaaaaaaataaggttgctcaattggagttataatttccattgttaccttttaacctttaacaaaaaatcctaaaccttagaagttccaattactaggagatatttggaatattttttccgtataattatcaacgctcgagggcacagggcccaaataactcaatatatcagacttttgaatttaatcttgctaaaatagtcctttagagagtcccagatcatgccgaattcaatagagataaattcagagaaactatcttgtagattcttttagcagtttaaagaataataactgctaaattatatgcggattaacttatttcgctagaaatagcatacttttagatgaacgtatttcatcggacattgtaagagtatgaatagggttaaggaactagttgtggtacctgcttcctcctttgttcttacccctaggattatgtccgctcgcaaccaaatgatctgccttgtttttcagtagtttaataacatgaacaactatcacatgcataatgttattttgctagaattgagaatacacctattatccattgccactatatttgcatttattaccctttgtttgcataagataaattctccggagatttatttctaaataattaacttataaatttctgacatataattttgtttatagtggttctcagattaggtgtccacgtatcaattggtggtggtattgcgaattcggttgataacgcattaaggattggctgttcggcctttcagatattcactagaagtccaagacaatggaataccaaggaattgacgccgcaggaagcggatattttcaaagaaaaattaacaaagagtccaataaattccgaatccgttgtagtgcatatgccatatttgcctaatctatctggaccgaaaagtgaaatgtatgaaaaatccatattagtattaaaagacgaaataacacgatgtaatatgcttgggataccttatcttgttatacatctgggtagtcatctaggtcagggaccaaaaaatggaataaatcaacttgtaaatgcatgtagaaaatcattgcattcgtacagcgaccttggtctatcaagaaataaagtaaagatccttttggaaaatagtgccggacaaaaaaatagcattggaagccggattgaagaaatccagagtatatttgatatccttgggaagaatgactttggtttgtgcctcgatacctgtcacttatttgctgcaggatatgatttatctaataaaagtgatgcttccagtctcattgataatgtagataggattattggtctagaaaatttgaaaataatccatttgaatgattcaaaaggcgacttggggtctaaccttgatagacatcatcatgttggtttgggaaaaattggcgaaagtggattaagatgcctaataaataacaagaaattaagtcaagttccatttataatggaaacacctgttgactctacaagaaatgatgctgataatatagattttgttagaaatgtgttaagtgatagtcattgataattgtgattgcataaattttttgctttcacttttccttgaaaaagtactggctgaaagagtatatctcatatttgattaaccaattctgtgtgttgcttgttttggatgaaataaaccaatgagcaaaagataatgaatacgcgttaatcaacgagtattgttcggtgtaatttagcttttgacaatagtgcaattataggaatcgattatagcattttgtttgaaccaggtgttaatgctgttcaatattgtaaacgccagcaaaattctggatttcaaagatcgaatattccaagtccgagtttttttagaaaccatagatattttaaatgccatcttataattgatatttatcccaaatccgtcgataggctcaatgaaaagaagatagtaaaggcgtcttttggaacttatgctctgtaaaccctaattaattgaaatgtcatggcttgtaagaatgactgaccaaattaaggagcgttaccctttgcagagcctttattaccttcctaaaataaaatttaatgttaacaattatcatggatgacgggggagaatattttaatgaaaataatactgtgttctttgtttcacttttgtctatcactatctctatcaagatttttatcaattgatacacacacaacgagcctggtttagctgatttctgtttttgaatcaatagtcaactgggatttcaaagaagcaagtaattcaggctggctgagatatcgtcaaaaatctgtttagtctagttgttgaggatttagtagggttcatttttttaaacttattagtcgagacaatcaagtagtcttatgattaggataaaggaggagaagcttcatgctagacaatcggagagagttattcttgtacttgataatcatagcgaaataatttttgattcttatcctgtagttattaaaccaagtcacatgaaacatactatttatcagggatcagttttggaaaaaaaaacaaaatgaatcgctgatatttttttcttatactctttctaatagatgtatataacatttatatcataataccataggttagatagatggtctctcaaactgatgaaaataaattcgatatgaaattatctggcgatcaaaaaatcaacaattttgaaggccaagataatcccgaaagtgatgggcttatcaaaaccgaagaactggtgagaaaaattccattgttcaacgaaaaacttgacgttactaaaaaaacagaaaaaggaaagttggtaattgaaaagaaatggattacggttaagaagaaaattgagataccattaaaatatgaagagatattcataaatggtaaggtattcgattcttttaatgataaagagctaagcgaaatattctcccgaattaaaagtaaaatttctgatgtgtttttacatgaaagaacagatcttgaaaacaacaaacaagctgaaccagcagggagtgaaatagaaattgtttgcttagaaccaggaggaaaagattctgataaaaatatatcaagtgagaaaccattagcgctttcagatggaacgaaggcagaccataataataaccaacagatactagagttatggggagaggaaatcgttataaataagaagatggtaaaactagccgagattgtactaaagaaatatcaggtggaagaaaaacgaaaaatcgatgttgaagttagtcgagaaaaacttactctaaaatttccgggtaatataaaggaagagatattttaatctgggatataataaattattgctgttaaaatcacaatccatattattttatatatcttattataactatagaatgtgcatgttagtaacaataacgataatatagattggacaaatgttgttaaaaaggaagtaattggcaccgacggtttggatcttggagaagttgtagagattggtgataattttattgtagtacaaaagggattattgaacaagaaaaggtacataataccgatttcaaccgccgagagtttcgatggtgatatactacgagttaaagttaacgaaaacgaattatctggatatgaggaaacaactgaaccgaagttcaaagattattctacatttaaatcatcggatatgtccaaggaaatggaaactaaaattcctctaataggagagaatctagtggtgtcaaaaaaggtcgtcgaggataatgtcgatattattaaagagccaattaaagaaacaagaactgttgagatagatttgacttatgaaaaagttaacattgaacgtataccttttaacaatgaagaaaaaggtacgaaagattctcctaatcaaaacctaggggaaggacgaactgaaattgaaaaaccagtatcttcgagaacgcaaatttctattccgctgaaaagagaggtcccagtcataattaagaatccatatattcgcgaggaggtagttataaaaaagaagccagtaaaggagaccaaaataattactgctgacgtgacaaatgaggaggttactttcgaagacaaagatcccaatcaaaatataacataaaatttgattaaatttaatcatctgaatatttagcttcaagaatagtctagcaatctgacaaagattaaacttaatttgttaacaagagaggccacgttttctgtggcaattatttaataataatgtgagagaccatacctagtattgcttatgagattcccctctaccattgtctttgatatctttgtttttgatctgattttgtaatattcagaactactcaatatcatcaaaatctcgatatagagtaatttttattaaaatcggttctgtttttttttatttttttcataaaaaagataccaatacaatatttttttcccacaaatagatttaaggatctgaattttcatatatgaatattatcgatgaatacatatgatgaaataatacagttagcgctagagcgaggattttattttccaagtagtgaattatattctgatgcaaatgcaggattttgggaatatggacccaatggtgtaagaatgaaaaataagttcttggagctatggagaagagaattagttcgaagagacaacatgcttgaaattgatggatctcaaataatgagcaaaaatgtattcatggcttcaggtcacttaacaaattttaccgatccagttgttaaatgtaaaaaatgttctagctcctttagggcagataagctgatacaagaagtggccaacatagatgttccggaaagattggaaaatgaaaatgttgataatttgataatacagaacaatattaaatgtcctctatgtaaaggtgaaatttctaaatctgaaagatttaacatgatgtttaaggtagagattggaccaaatcgagacgaggcttacttacgacctgagacatgccagtccatttttgttgatttctctagaatatttaaagttagtaggggtaaattacctttaggtatagctcaggtaggtaagagttttagaaatgaaatatcgccaagacagggacttttacgccttagggagttttatcaggcggagatcgaagtgttttgtaacgctgcaaaattagatgattttagcaaatatgatgaaataaagaataccactttgagattttttgatactcgtatagtggaactttccgttgaacaagcattagaacaaaagatattgccaaataagttagtagcttattatttagcattactcgttgagttctttgataagaccgggatagacaagaaaagaactagactcagacgtttgtcagatcaagaaaaggctttttattctacagttgcatttgacttcgaggttgatacgtccataggatggttagaattagttgcttgcaactaccgctcagattacgacctaaagtctcactcagtaactagtaagactaatcttgaagtaatggatgacgatactaaagtattgccacacgtatttgaactctctctgggggtagatcggtgtatttactctatactagaacattcgtattttgtagatagggagaacgatgatcgagttgtcttgaaattaagaccatatctttcacctattcacgcaggtatacttccactagtaaagaaacaagagtttaaggataaagcatctaggattctatccaatattcaaagagattttgatattttctatgatgaatctggctcaatcggacgtcgttatcgtcgtcttgaagaaatcggaacaccttttgcctttactattgatcatcaaacacttgaggatgactccgtaacagtcaggtttcgcgattctatgaaacaggagcggattaagatagatgctgcgcactcatttctgaccaaacacatattttcgtttgacgtgatctgagatatttgaaatctgactaccaataagcgctatctgtttcatctatttgatttttttgtgtgtttttatttttactatctcctctatcttccttctcttttttttgttttacatgttcaatataattcataattagcgattcttccttgaagatcccttcggctgcaataacagaaggggctttcgtagttggtaactctccgcaacagctttcttcaaatttctttatgtgatattttacgaattctatcttattatttttgaacagttctagtatcttttgtgactggggtgaatcatccaccaatattatcggctttctggctctcaatttgatccctggtatcaatattacaaggggacaattgcaataatattttatcgattgtatcatgatcaaatatgtaactctctattttgagtttgattcataggttaatagcaaactaaaaataatttcgatttatataataagtctaaacacacttgaaaacacttttgataaacaacttttcaccgtacatttgtgatattgtagaattattaaatgaacttgaaaatgattttgaatgctatgattgtaatcaaatccatgcacttgacgcccatttagagttgctacagcgatttgatagcgtcatattgtcaggacgacaacgaaactcctcccttatcaacaagattaattctcgtattgtgaagggttgtctagtattagacaaaccattgttgggaatttgttatggcgggcagattctaggattgactctaggttgtacattaaagaaaattcaaaagattagagatacaattaaaattgatctgttagaaccgacgccaatacttgaaggttataaatcggttaagatgtatgagagtcataatttttgtatttcaaccctgtctgatgattttaagttacttggaacatcttctcactgtgataacgaattattctgtcttaataaaaaaccactatttggtacacagtttcatcctgaaaaaagcggcaaacctggaaagcaccttttggagaatttcctcaatatacattaagatgtacacaagcattttctaaccattcatatgaattaacattatgatttttatttactatctagtatagttacggtgtgtacaagaatgaaaaagataataatatacagataacacttccccttgttagcaaaaatgaagataatgtagtttttccacttgtattaaatgtattaacgaaattctggggcgaaatgacaccagatgaagatattttacagagatctacacaatatacgagtcataagggtaccatttttatagaagggttagaaataattgaagaaagattcaatttattatccaaagtatatcagggctctttagatgatttgaagaaacgacttggtcaaggaatcccattaatcgttatcttacctggtataaatgagacgattcaatttgctaccatcgtgactggttatgatcctgaggaaaaaagattactaacttatgtccctgaacccgattcatttggagccataccggaagaaagattttttagcgaatgggcacaggaggattatttaaccatgatgatatatccagaggatgccaaagatatactcaaaaatagctcttttaagtttgaaaaaacgaatcgaatttctttagaagtcgaaagactaaaaatcaaaggtaaaactaaagaagctctagaattgcttacaaatacatttaacaattttgtagatgagaaggataatccacaattattgttaatgatggccggaattcttaatgagcaagacgatgaaaaatgtgttgaactttatcaaaaaattataaaaataaatccaaaattttatttggcccatagaggattgggaaactattacctaaagaggaaaaactatctgcaatcgagacaacattatttggacgccataaatattagtccatcacgctacggaccgatttataagaatctgggtattgcatacttaaacctcggtaatgaaacttctgcaaaagaatcgtttagggaatatcttcaacgtgtacctaatgcccccgatagcaagaatattcttgatttcataaattcataactgtttctcttatagatgaatgttcttgtaatccatctggtttgtatgattctaaaatgagtaacaccaactttacattatccgcagacaatagaaaagctatcgtgatagagtccacatttaaatctatttcatttataaatttattaaaaaaatcagccactgccttgctcagttcttataaatacaaaataaagtccatcaaaaaggagggatattacataatcatattcttagataacgattcacaactagttcaagctactgagatattagggaagttggcgggaatatcttatatttttataggtataacgaaaaaacttcagtatgatactttatctagtagcgccttatcaattgcaaataagttcttaatggacggtgaaaaatatctggtcaagatagaaagttcaaagttgaccaagcccagagatggtgacttcatatataataaatatgatcttgatttctttcttcaaagtgaattatccagcaaagcaaagggccttgtttctgtaaaagatgagtctcaagcagacaaaatattgtacatccttattggaaacaaaattgcattcgtgagcttattggtgcttaagggctctgatcgtactccttttaattatgtacaggaaatggtggtatgtcctctttatgacgattgctccatgttgtcgctagtgcaagttttagattcagggtatatgcctataccgatatttttcttttcagatcggcttcaactaataaaacaattgagaaaatttgatgtaataattaggaattaccccatcgactcaattactttctatttattctctatgacggtaattgttgaatcagcatctttagaaactgccaacatcgtatcaaaggagcgtggtctgtccaagtacaaggacaggtacaagtacaaggacaaggacaaggacaaatggaatcaaattcagcacttaatttatgagcaagttattatcaagattttagttgattcaaattttgaatcctttcttgttagttttccatttgttccctacattcatcctaactggtttattcagaaaaacattagattgttccatcaatcagaaaaaatgcttctcacaccccttctttttaggtttcctcctgggctgttagaaagagaattaacaaaattaatagacccaaattatactaggaattccgccacctcttctatacaaaattatttaattgacagcgagccaaaggattttgataagattgtgaccgagtatgcaaaccccaatagagacttaattcgtaagaagaaattttcattagatgtaagaaagaacgatatccttgatgttttgaataccatctagtttattactaattttcattaaattcagtattctgtcttcataggagctattacaaatcaattcgtttaatacattgacaagggtggtttgattcattgtttttgaatcaatcgtcttgcctatcccgagtctctcaatcttggatgaatttgacagttgctctccgtgactctcaataggaatagataaaattggctttccatattgaatggcttgcgatatagcagtgtgtccaccacgcataataatgacatccgaaagataaaatatttcgtctttgtatggacaccattcaaaataccacatattgctagaaatttttcttggtactatactgccgctagactttccttcagagaaaacaaattgaattgaaggctgcttcttaaaaagatcaatgagcttcattattatcggtatccttgtacccgtaggtccactaatgtggacaaaaacaagcggttttccattttcaaactgtagatctgccttagctttggaaatactatcttcagtaatttttgccctaggggttacaaaccctacataatctaattttgatttgattgattttacggaatttattgtactttctgaaatggtgtatggtggaggcaaatctggtatcaggattctgtctgacattttccacattcctcccataagctcaccattacaagtctcgaaaaatcttccagccttgaactctcgcaatctgggagttagtagaagtttaatctgattaattattaagatctttggtatgtttaatattttagcggctataagcggggataatcgagaatcagatatcgctatctggggaccaaagttcttcatatattttatttccttattcacttggacaggtaaattgacaagccattgtggtattttatttatattatttttgactgagaattgcccatcctttccccacataaattccactgggggaacttttttacactcaaagccttgtctctgtatatagttgcgcgcctcaccaaatgatgagaagagcatttcaatgccgggtctttttatattctctgctaatattaagagtctgctggcgtggcctaagccaacgccatatggtgccagataaaccctttgcatcataaagacgatttttgaagagactaaaaagtgttcagataaacaattaaacaggtccctcactggtgcaaccatgagtaagggcgaaatcgataaaaagtctagtttggaacactaaggctttggtttcttagttatattaacaagatactatcacgggcttttacagacataaatatacaccttattcgttaatttttttaccatttgttttgattttggaaatttcagggatcatccagataaattttgtgtgaatacaattatttgattgatctgtttcacattgcaattcaccatttacatagaacacatcaactagaattttctttttgacatcctttaaggttattctatttccttgatacgaatcgactgataaggagggcgcaacccgtgatagaaattcctctttctctaaatatacttgtaaaaaatcgtttacatattccttaatattaatacgcttttggattgctctttgtttcatcttttcataattctcaacaaagatctcaaccgtaactacgcttcttcctcccctcttgacgggcataaatatgacagcatgtgcttccgtttaataatttctattaacatatgaaaatatattattcgatatagttatatattataacatgtttatacatgttataatatgttaattaaacggatatttttgtttcagctgactctgtctcttaagcaaataaaaataaaggaaataaacccaatcaggaaattagcccgcaacaatcggaagaaaatacgacgtggattagaagaatttagtgggaataatatcgtcatgaatcaatggttaagattaaaaaggttatgtgagctccttcattgcatcgtcaatttccatggaaataaaacctatgatccattgactgtgtttacactatccctattgcttttgaaaaagttgttgctaatattagtatttgtcatctgtaaactaatgaacgaccttttagacgaattaattaaaggaaattgaaacctgacattttgatgaagaagatgaatggattgacatttgctggccgaccaagttatatgacgaagcctgttagggcaatgagatgattaacggacttatccttctgagggcaaataccctacactaaaaatataatctgcttgatgaagcaaataacccaaactatgctcaaccctacagttttgagggagaggggtggcgtcagcggcttgggctagagtataatcgctacaggtgttttcaattaaatcatttaagacaatggcagtcgacgatgttaaaaagtcatatgacagattatacccgcaaattggattgaacgagcaagaaaatgactatttgatatattagggggttattcttttatccataaggaatctttctgctgagtctttgagcattatatacattatttatatactaaacatttaataaaatttttatcagatagcatttaatatatgaaaatacttagaacgtaaaggacattttctataagtaatagcccaaggttttaatttttaaagtttatctgaaattatatttaagcgatctatatacattataatttggataattgattatgctttggtgtcgtctagtgtctctagatgtctctaagtgtcagcaatttaaacaaccaagtccaaaacgggaataaaagtctcaatatattatataatcaagtcgttaaagggatctccggggtcgtcctaatattagtacattgtttgatcataaaaggtcaattgctataggcgtagagtcttgtaataattgcgctcacgatgtcattcatagtcaaggttcatagactttttgttttaagcgttaaatcgtgtttttaagatatttaaaattaattgatttatctaccttggttatcttttgtaaatttattgcatctctatctatttcaaaatatcattgtatctatcccgatgatttcattctaaagtttgattcgctagttatttgattatttaatagtattatatttattctattgccgtacttgttgaaaatctggaatcaatatggaatatcatgatttctcttattattttcattatgctaggtagtaagccttctgccgatcgcaggacgctattatatgaatcatcaagtcccatattaaggagcattgaaatttggttagcaatatttttaaaaaaatatagataagaattaaactagtatatgcttaaaataacgtcttcagctttcaaagcatacaattagcatagtcgtaaaaaattaataaatgatttaccctaactattcattattagtcagattcttctgcataaatcaatttcatttcatcgaaggtaagtttttctccgctcgacattttcttcatggcaacttcttttaacgaattccacaagtcttgattttctctgttcttgcgcatcttgtcttgaggtatttcatgcctggtctttctttctgggctataacgtctttgtctttctgaagaatgctgtaacctgtttctcttaaattcaatagcattcagttgggtatctaccatttcgatttttgccccggcttctctaaccctatgaattacacctcgtctttgctcgtaaagttcttcccttgtattcagcaattcatctaaatttgactttattttgccaattatctttcctacatcagctttttgatcaaatatatcattcatttttccctttatgtcctcaaactttgttgccattgacttgtaggtgtcttccttcttgtgaataacacgtaatgcatgtaacctagtagctatttcctttgattttaagaccaacctcctttcttcgtcctttgataatttctttgtttgaatgtctctctctatttgctctagtgcctttgttaaattggatatattgtacttgtctcgtcttgctcttggacctccgctagaagctttggtatccagagatctcattcttttcctttcttcaatcagattgttttttagctctgtaaattttgcataatctgcatcctttacttcattaatttgtttaagttttagcctttcagcttctaactttactctttcttcgtcaataaccttctttgtctcttcaatcctttcgttaattttctcaatttgggtttcccctactttttgctcttctattaacgactttttgaaatctaatagagttttttgatttgaatctattgcattttctgatctattgtctttttttgtcgtagaagctgaagctgcagcagaaggagctgtagccgtatttccactgttctgttcttgaaccacgccgcttataacctgttaaaatatgcaaagatatattttttttcatttcattttagtaaccttttttgctattgaatgatgaaacatgatttatggctcactgtcaacattattgattaataggtctgtgcaaaggcgataatatttctaatagaatgatggttaataattgacttcattaactgaccatcaaggcagatagaatagaagagaaaaacccagttccaagtctatcctcatttctttttttagtaccgagaagcagcatattctcgaagagcgtgaataaggtatatacatatatttatattctatcttgtggattaatatatgagttagaatggatgattttgataaagattttccagggtttgattggaaaaatactccagcttataaacatccaggaggaaaagactgtccttgtccaaagcatgagtatattagagagcaaattaatgttgccaagactttaaatacaaatagtaaaaacgtagataccgataaaaaacctacttcaaatgttacccttaaattttgccctgatcattataatgtttatttcaaagaggtgattcctgcaatgcctttaaaatatagaataattaccaaaatcgcattgaaattgggagccgttgtaatacagcaaattccttatatgatgtctgataagtgcttttattgcaaatttggttcgggcggcttcgataagaaagtagaactgccaccaatttaatcttaaccttattttatgtctgatttttttaataaattttttgccaggttagtatgatcagctactaaaacgagggcagctatgtttctgacgattactgataggtacggtaatttatcgtttggattgtttttatatccctctaaaaatgattgttctacaattttatatttttcattctccagatccagtagactagccaagaaaataccgatatcaaggctctttgtatactctgtagcatgattctgtatcaaccctaggtcggtacgaattatttctaaatccttcactaaatagttctgagctttgttgtcaatgaaacaagatccactattgtgtaaactcctggtgattgtgccaaccttagaaacaatttctaagttgttgctcttttttagaaatccgtaaagatttccaccatctatatattcctcaataatgacatccttgtttatttctattaatttaggagtgcgaattcctatatcctttaatttctgtctattaaatgagccttcatttagtataatggattttccgattcgaagtggaggcgtgggatgcattagtataaatgaaataaacgtaaagatgaaaactaaaagatattcattaatgctcttaactgccttatttctcttgattacaaccattttaccatcaatttttgaaattgcaatatcccgctgccaattcacaaaatgcaaaataatttaatctctttactaaaagtaatctattttaaaaacttttaaacatagggttcgaaatcgtcaaattaacgcttgacaaatttttttatttttttaaagtcgcaaattaatgtgtatataggattagtggctatcgaagaaaatttactatataaaacttaatagaaggtgtactataaaatattcctgtgtttacgtacacaaacttttttagaattttaagcacttttgtaattgctggagctttgttatctctaacaggcacaaatgcacaagcattatcgggatctttaactgattataaatttggatatggtcctatagcaagcataaataatgactggatattagctggtcattggatgggttatcatcacctttcaaacttaaccgattcaggctttcattcaacatttgatatggtaatggaaaatggatcagctcctcatatgcatcaaatatctaacggtactattagcgacgtaagaatggatggaaataatactgctatccagggatccgtaacaataacaatgaaagatggacctgtgtcagatgtaccgactaattggacaatttataataacaataccctcgccattgatttggaaccttcaaagattaacaatcactttggtgaatcctcaatctatgggctcgtattaacgccggagaaggagatgaatataatgaataaaatgatggaggatacaaaattcatggatcaatggattccattgatgatgcaaaatatgatgagtaaaatggatttaaatggtaaaaatatttcatcgatgcctcaaatgatgaatcattcaatttcaaatagcagtatggcaatgaatatggaaaataacacggtgataccatagacagattaaccgtcttccaaacaaatattctttattttatttaaaataagatttataagaattttttgatgcatacaatataaaccacttgaagtgttacttactatcataatatctttaatacctgcctacctgcctatgcataaacccgatggaagacttgttatacaattgttgttagcataatgattattgttgatgtttatcggaagattatttgcattgttgatatcaagtacattattaaatacattgttaaagtccacataatttaaggagctttgtgtatctaagaaaattccatttgttgtgttcaatatgttgttaccattgatcagtgtgttttcagtattgattaaagtgactccggacaatctatttttgcttaattgattatatttgatgtcggcaccatcggatgaatgcaaagctacaccgatggtgttgttatttatcatgttatttgatatttcagagttttgagcaccagttacataaaaggcaactctattgttgttaaggtttatctcatgagcgaaaacattattacttccagataaataaatcccagattggaaacccgatatgatgccgtttccagatatcgtcacattatgctgtcctgctatcattattcccaccttattgctgtttactccgggaccttttagagaatacccattcatatctataatagtatcatttgctccaacgattattccatcgctcttgcaaatcaaattcgaatttaactttactttgccttggacaatttgaccgcaagcaggatgtatttctgcgatacgctgttgtgatacttcggacacttgatttactccttctcgattttcttccggagtttccgatacttcttcatttgtttgatcatcttctactgatatatcactggtttggggttgttctatttcgttttgactttcatcattagtattcctattagaattccctgtattttgactggtaatgatatccctgtcagggtcaagttgagacgtctggatgtccgcagagttatccgtcgtagaactgaatgctatattatttgctgataatggaaattgaaacaaaaaaatagagaagaaaagaattgcaaatgacgaatttaataataaattcttaaagcttgggattactactctcatcaccgataaaattctacacgatgtatattatatcaatattacctttgtactgctctctttatactctgcaatcgcaatcgaacctatgaccgcactattatagacaaagactacactatactctattattctgagaaattctatcttgattatttgtatctcgctctccttgggccacttcttctgatgcatacgttaaaccaaacattgtgatattactaatagactaaaataacttgaagaggtatagacgttgaatccattggtctatcgtatactttacaatagtcccaaaagaatgttagtttggataagtttcataaaattttgttttcgattgagcaatttgtttgccatttctttgaatgttccctggttacgcaagaggaataaaaaatggacatttatttggcacctattttgatatctgaaacggggcggagtagtaattattcaaatcatgaatgagtgtgaattttcgattttactttagaaattttgttcctttttggatcggaaatcttcatgataatccactctaagattggaatttaaatgaaggtggtaaaagtggtggaatagcctagcaatttcttattttgatttatactctttctttttggtacaagtttgacaacattcttaccaaaatgcctacttgtttagataattttcttctagctgcagatacttttttttcaaattctcataatcagatggctgtatgtcaggagcattcaggtacaagtaatttttcataggctgattgtttttgatatttttccagtttgataggaatttctttatgaaatcatcgataacttccttattcgttattccggttgaatcaattttgagactctcattaatgatgcatatctcctctttgttgtcgccgctgatatactcgattggaattggtttaaattttttacgttcgaccttgttaggaattattacagcaatgtagggtttttcttcaatctctaatcttttcttttctcccattacttatattagaacataaaaattaaaaattaattggatcaaaataaattcgaataataaatgcaatttttgccgtatgatttcaattgtttttcaataggtaaggggattccttcgacaatttttctatgaaatactagtaactcaacaaatattaatgcgtcacaaaaattaatgttaacagacgggccgatcgtctagcctggtaggatacggcattggcattgccgaggtcgtgggttcgaatcccactcggtccatatcgtttctgtattctttttaggttccacaactaataataaatcatagaaattgaaccttaattcacaccgacaaattagccaaaatccatattctcatttttgtactttataaagtctccacaaaccaggaggcgatacccagatcggtttaaaacttttctggacttccttgaaattacaggaaagggaatcaaggaaagactgaaataatttttaatttcaacctactgagattagaacagcgcagagaaaaaaaaagagatagttctccattttcgctatattatatgctttttttatctatatgtatttttttctctgattttaatatcaaaagaataaaagtgttacttgcgttataccttaatttatcaatggcagactgaaactaaatgtggcaccaggttcatctttgttgttctctgcccaaatctttccaccatgtatttctataatgcgttttgagatatatagtcccaatcccgttccagattcgtgtttactatctgtaacaaatttttcaaacaaatgcggaaatatttttttatctattcctttacctttatctttgactcttattactattgttcttttcgttttcttttttagagagggggatatcttattgcgtgctttctcctcatcatctttattaactaaataacgtgttgaagctttattgtcacatttattgttaaaatcgataactggaccttctttctcgtttgatgtttcactgtctataattttcatgcttatcgtaatatcctgatttgattctgaaaattttaaagcattacttagaaggtttgtcaatacttgataaatcatcattttatctacatttacgatcggcttagcctcaaaatgctgttcttccaagtgtatactgatattttttctcctcttctcttctatacgatctgctctagccggcatttcttgtaaatcatgtacgatatcttttacaaggtcatagatgttgatattttctttttcaaatgctaacaaattgttttctattctggtgacatttagaaaattttccagcaatccatttaatcggtacgcatttttgataattgtttcaaataatttagtatgatgagtttcgctgctgctggctccttcttttttggtttccaatccgatctcagaaaaccccataatggcctgaataggcgtccgtaactcatgagcagtaatgtcaataaactctttataccgtctctcgttatttgatatctttttatttacctttttaagatctttatatagttgtattccactccataggctctcaaatatcgaactataggacgaaacaaggggtctgctgttagaatagatcgcaagttttgtgggctcggagtttttataatatagtttattcaattcccaacacaaaacctcattgcgatcaactactaaaattgacataccctctgcttcattattgtagtttttcttgtcaatcagatcaaactgtacaggagacattgaattttgaatataattcttaattttgctaatgtatttgacttctttttgattttgttcgttatcgagctgaatttcagaacgtggtgataaaggtgtggaaagtagtattcttactctaactgacttttctttaacaagcctattgaaggcctcaaatgtttggttatttaataattgattaaaagcattgcttgatgctagaatcaacgtaacatcctgtctggttttttctatcatttgtaagattattttagaaaactcttctgaattacgaattagctctgtcctctgctccttttgtccagattttaccaattctaactcccgtagtctaatatacgattctgttccagatttccacaatctttcaaacacaacgttgaaatggtttacgtacactttgtcattgctaatcaagacctttggctgatgagctacattttgtatattgctgtcctccaacccctcaatcgtgaaattgaaatatttatctgtgacactaaaattgacaggaatgtcgtcaagatgtctgaattgcacacctttattcgaaaaggattttatcgtttcaatatcttttatgtggattggacatagccaccttatgcctttgtgttttccattcttcattttttctagaatacgcataaaggacttgcctatttctttattcaaagagtcaatccattcagctgtcgagcatactgagagccacatagaagactctgttaccgttgtagctctattgattatttctcgaggatcgtctattatggtggtaactatcgaaccataatctccttctatttctctaattttttgctctgcaggtgtagcaatgttccaaaagctattgaagataagcagttgctgttgtagtaaggcgactgaattagaatatagtagttttagatcagtttcttgctctcgtgagagcatggaagcaatatattctcctgcatcgttaatactaaagtttcctttaatatcattaatgtgccttacttctccaaaagtcataagcaccttacaattgttgatgttattcgcatttatgtccgtgatgactctaattctaccttttctttccttaaatttttcaaaaccattcctatatttaggagaactcaatgctgtcaatggccatgtattgagctgtccgcaaatgtcgattcgttttacagaactttgaataaatcttaccaaaatgttattggtatcatcgattgcagaaattattgtgattttgtcatcgaacgtggctttatcttgattagattctatattatttgtgttggaatttaaatattttttttcgctaaagcccacgttgttatgtctttattctactgtagagcatttgtatatatagacaatcttaatgcggggaaattatcttatatgctattgctatcgtatagaattgcttaaaaagtcaaagtcattcttaaaaatgtatataatcttggtacgattgattatcaaataccataaaagatatcattgattaagttccatgtcatttatgccccgaatcccttttgatttccaatcaaatttggtcaaccccatttgtctcttggcggattatttaggctattcaaaggacaagataaattatttaaaaattaaataaaactagatatcgtatcaaagactgataaaatatgctttcttctgatctgctacttttgaaatacgttaggaatagttgttaacatatgatcaggagcagtgaggtttggttaccctacgggctctgcttgtgtaagtacaaagtttgtattagaggagtaaagcgaatcaatgtcatatgaacttaaaccattggtattagaactgtgataatagaatcagatgtaattgatactgactttcatcatacttctctgattacaaagaaatccaaggatcctaattcgccttagctccattaatgaaggccatgcggtctaacatgaacaagatgattggcagtggttcaacaccacgatatattgctatagtcatactcaaaacaattaccggtcaaagcgcaaaattacgatacctagcagttaaagatgttgaacaatggatgaaataagacaaaaatgtcttatgaagaatttataaagatgatgaaacggtcttttttagaactatggtctaggtgtatacttcctagcttatgataaatttatgtctattgatagcattgtttcaagtgttagcccaacttgttgccacagaagggacaaaaattaaaaatatactcatcaatgcgtttagggtaaccgtcgtcattcatacagaatatctctactttgtttttttcaataacgttgaccccaaaacctctttgccaggagtcatcctccaattcgtgtaattctctacaacaatactttttcattttaattaatcatttagtacttgtcgctgatgtaaaaaatttgggttaataattagcatgattacgcctagaaaaccccgtaaccaaggatcaaatttagtctgtttattaaaaactcaaaaaatatattcaatggttttcgaataaatcatttatacactttcctagtaacttcattaatgaactatgggtgaaagagaattaagaaaatttgtgttctttaatgaaagttaatttgaattcattattttaaagattgatctaataaatacagtcctatttttatcaaaaataaccgtgtcgatgaaataaattttctaaagaatcttttactgatatgattttaatgtgcaccaaataacctccttatttagatgcaataaatgactttgggttacggcatgacgagtattgcgatgattaacgggatgatattaatggagtagatattactaggaccttcttacatgaatgtgtaatatagaagtcttatataccctgaagactatgttaatagagacatgaaactaagaacaaataaaccctttttaataactagtgtattcctcttcgccgccgcaatagtattagccagcgcaatgaatagcaacaatgtggtagcacaatcaacaggaggagttaatacctttagtgctgaaggaaatataggaaccctagcactctctccggaaagtttgcaatctttgaatgcatcccaagatacgaatttaaattttgtacttggtggagactggagctttgatgtatcaaatggtcaactacaagactttaaagtcgaactaaacaggcattcattaggaggccatgaagctgaaactcacgtgatagacggactagacaacgctactgctgtaacaaatacaacaggaaatgatcaaatcaccttaactggtaataatacacaatttcaaggtctagcaaatattgagactgtagagacaggtaaggtatgggaagatgttccagtattagcatatttgatcaatgggcatatacttaacctatctttcgacgtatcaaaaactgatggacatttcttaaatcttccgttgataggtgtagtaacatcattaacagagggcagtagtaatggtcaggcaaactcaacagcaattcaatagacatttaatctctcattttttttgatctgtatattttgattataattctcaagttatgaatatttgagtcgtaatatttggtattttacactaaattatataatttaaatatatatcaaaaactggaaaacttgaacataaaatcacattccttttttttaaaattgtttagtctatattttaaatttattttacgttttttctgagggcgccgaataagcaagctttctgttttttttaaatattcatatttttatgaatatgtgataaatcgtctctgttcttttgaagacaagtctataacatgaagatgtcttatttcatctttgagcaccaaaaatagaacctctcttgaagaatcatcattctgggtctgtattataatattctaggtgtgtcactagctagtgttcatgtcatttttgccgcgaatcctacatgttactaattaggaacaaaaataaattgacttgaaagaaaatacccatttcttttgaactaaagaaaagtatcaactcaagcattggaatttgtcaaatttttgtaaggcttcaccttgatacattatcttttgatttagtcaaatagttgtgtcaaacatggatttcataaattataactcaattaacaactgcctgttcaatatattttgactatttcttgagccttgaatttatgttaagtaatgagcataattataaaaattgtgctttttagatatatttaaaattgtttattaagatcgtcaagaaagctagggtactaaaaaaccgatgaaatattccttattctattccattatgtttgattaaatcgaggcagaaatcatcctgtattttcaatgtgatatcttccttcaatctcatttaatttaattgaatcaatatgcaaatttgagattcagataatttcacaaagggtaataaaatttgcaacagtagtgttgcaaaattagaaagttaatctcactttactgctcaaagaacttctgaaatcttgcttttttgtagtttggaaagttgctttgtcagaagtctcttatcttatttatagtaaaaatatggtaatcaaatacctctttaaagtaatttttctttcgattatacttcacaggttgtttaggtgccatattcaattcttcaaccatacgaccaatacttaagatttcaaaaacaatgtgaattgaggtaatttttgaacttggttgactaatactgaaagcgatttggggctaagtcaactccttttcttcttcagaaagtttaaactgttctgttatttctccaataggttctatgatcacaggagcatagtatattttgtaatattgattttatctattatttaagacgaatctactccaatgccactactaaaaattgatcgtattcttctatctaagtgtcgtgtgacaaagtcattctaatctgaatcgtaagaatagattctattctatgtttgagttctttatgggcttttccataagtctaattaatcttataaccgcagaaagacacatattaaaaaagtaattaccaacgtgttttagtatttaatttagattagttgcagtttctcgtatatgatgactaaaaaaggtttaagccagaacgagaacaaaagaaaaaacgacaggttactaaaatagatttgatttaaagataaaaaacgaagaaaatgggggaattagattcagaggcaatctgtttgtgtactaagtaaccgtttgtaaagtaaactcatccactattggcgtttcaggttgtacagaattaacggctgtcacctctgctcttatggtatagttgctgtctccttctaagaacggtgcatcaatatgatatgctcctgtgctgctaaagtctggaccatatacgttagtctgatttccatggctttgtattaattccaagggtaacgactcaccactagtgacaaatgtatcagtgaagactgtattattattgtcctttgatatagtgatattgtatgcgataggggttgttctatctagaggcactgttaacggtgcaaagtcaacaagtgttctaaagttctctgtgaggttgaatagggtgccaacacctgatgacattttaaaataatggccattttcatatgaatcacttgctgatactattgcctgtctccagggatgaattatacagtgataaatataatctccaggattttcaaatgtgtattgaaagaatgcgtttgcagttggtggcattattccagaattaaaaattgaaccagcatcagatgcgttgggggcaccacttgtaactgtgtgaggctgaccataatcattgttaaaccatgctacggtagtcccaacaggaacactaattgcaggtgggtaatagtgattcggactatctctttgagcagctccagggattatactaacagcataagttgaaggggtattttgaagtgtagccatacttccaaattgagcatgggcactgggtattattgtcattgatggcgtcaatgtactcgtagtgataattataaacagcgatgctactaatatcatcgacaaacaacggttctttgaatttcgtataaaattcattatcatcataacagcttgaatgcttataacgtttattatgtagggagggctaacatactatgactgtagtctatataatttataaaaatgaattcaaatttgcagggtgtgaatctccactgtccatcaaggtgactaattcagctacaattttaactcttcaaataaaatgctcttctttttgatttagcaaattaaatattaattacttgataataaagacaaagtgtaaaaaaagagtaaagtggatctgttagcttgtagttgagttagtttggctgctctggtctgtcagtgatgttactataccaaaaaaagctaaatctacgaaatgcccttctgtttttgcaaaactcgatttaatgattctgttcagcatataataagtcttcaggtatcatagaaatacacagatgcctttcttaaatgaatatctaattactttttttaatgatatttgtcaaaagaacggctaccaaaaatctcagaataagataaatagttaaatttagccatacgttttcaaatggttggtaactaaaatactcgacggttgatgatagtaaaaaattaatctactaaattttataattaattaagttccatgtcatttatgccgcgaatcccactcggtccatatcatttctgtattctttttaggttccacaactaataataaatcatagaaattgaaccttaattcacaccgacaaattagccgaaatccatattctcatttttgtactttataaagtctccacaaaccaggaggcgatacccagatcggtttaaaacttttctggacttccttgaaattacagaaaagggaatcaaggaaagactgaaataatttttatgaattggccaaagaaaatccccaattgctacaagattctctgctaaacttcttcatctatcagaagcaacgagtatcaaaaggtgagatggttgcatctactatttctaattattacaaacctgtcaaattattttgtgaggtaaacgacatcctgataaactagaaattcatttcaaggggaatcccgagagggaaacatgcatctgatgatagagctcctactttggaagaaatagatcaattattaaaatatcctgatctacgaataaaacccatagttttgtttatgatctcattaggagttagaataggagcctgggattatctaaaatggaagtagattgtcccgtatgaagatcaagaacaaaatatcattgcagccaaggtaatcgtttatgccggtgagctatagcagtattattggccggacttggcaaattactattatggtaagttgaaccttgacaaaatctctttctataaagcggatggtgtccagaaccacacaaagaggtttattgatatgttcttagagttgttcaaggacagagcccgaatggttggaagtggccgctactctaatagatgtcacaaactataccgataatgagcaagaatgtttgatcagggtgtacgccatgaagtcaaaataaaatgcaagcttcattgataatacttggaatgagttaaaagataaaaatttagtgaattataaacatggtctcaaattgaacaactttttgtcaatgttttagaagttcaaatagtataattaattaaagtgaaaacgagatagggcttttcataacaaaaagacaaaataatgtttatatttatccttgttagaatactagttatagaatctcattaacagagcctttatcattattaatcgtcgcggatgagaactgttattaattaacgatattgagttataacatggtttataaaaaaaagatgaatcatttaatgaactataagtaccgggcaatcagctaattctgatacttttcttgtaacactgcctaatgcacctatcttggaaatgccttttagccgtttgccggtacccataacaaccatgtctatcttattgtcttgcacaaacttcaaaatttcttctgaagcaacaccccaaagacagtaagtgctgatagatatgatgttcttttccttctttaacttatcaattatggaatcagccctttgattccaccctttctctattgatttacctatggttaccctagctacttcgattgcaggtctgtcgtttcctagaattagtgatgcaggtattcctatatcgttaacaacatgaagaataattaaagggacattcatttgttctgctaactcagaggccttttctattgccatgtcagaagcttcagttccatcatctgttactactattttatttatcatattatctgtatagttattggatataataatacctatttatagaactcatttaaaatgagttcatatagtcgcatgaatcagtcatggtaaatactgacacagaataatattacaagacaaatggatgaaacctgttaatagagaatatgactttgagtatgatgtttaattaatatttaagtatgtgaattaaaggaaagtccaaactaataatatttggcattatatatttttggaatgatgaaaaatatcaaaatctaaaattgtctaagtataccgaattggtaggtagatacaagtcgtttcatcttggaggatttgaattgatctagcataaggcacactttttttcagatttatttgttaaagtttgtcttaaaatattattttaagaaacacagttaattatacatattaaaggtcttcgatcgtaaaaggaaccaaagaagtgatacagtaaataaaagaaaatctacaaagtggaagaataaaaggaagatacttaatataatcctaagtgaaaattgaactgtattcttttaaaactaggtaattaatcatatttaatagtgaatctttatgttggatgctctggatggacgtattctggatggaggggcacattttatcccaggaaccttgagaattggcagagactatcgtattattcaaggttttttaattttatagaagttgattcaactttttattatgttccatcaagatatgtcatccaagggtggaaaaacaaaactccagatgattttaaattcacctttaaaattccacaggtgataacacatgtaaacaagcttgaaagagtttccaaataccttgcatactttttttatgtaatggaaccaatattagataaaacgctgatgcttctcattcagcttccgtcatatatgtcggcaaaggtaggtttggaatcactagctcactttttagataaactagataagagacacagatacgctttggaggtacgagaatcatcatggtttaatgccagtgtatacgattttctgagcgataatgatattacattagtctggcgagtgagggaggatttaaaaactccaacctttgtaaccactgatactatttatctaagattcattggtgatagaattgctgaccagagaaactttggattgaacataaaagacaaggaagatgaactaaaagagtatgtcacacacataaaggatacagtaaaaggccatagcattcatgacgtcattgctactttcaataacaattacgcaggatttagtcctcagttagccaatgattttctgagactaatttatgaaccttaggaaatggttggttgatgtataaaacaaaaaagctcaactatactctccagatattaagaattatactaataagaataattctagcatttgtatgtattaactcgactcagtttttcatttgtttatttttaaactactcattttgcttgaggcatctctcgaacacacatttcatcgcagaaatttaatttatcatctagaagaaaattcccttattatcttggtaaattattatatggtagatttttcttaataacccgaagtaaaatgctaaaacataatagcttcaaaacagtctcggtacttgctgtagtattttttgcagtatttatgataacaggtcctgccgcatataattttcaaagtgtattaggacactatggagtcaaactggacaaatgtgaagatgatgacgattactatgacgataacaagaaagattgtgataggaactttaagaagcatgacaaagaggatgactactgcgatgataaagaacatgaccacaacggacatgataacggagacgagtggtgcgatgatcatggagaaggtaagggaaacgatgacgactgtgatgataatggcaaagatgaagaccgtggtgatgatgactgtgatgataatggacatgaccatgataacgacaacggccatgatgacagacatgatgaaaatggaaataaccaagcatctcaagccataggtcagtcacaatcatcaagtcaaaacagccaagtagcttcaggcgctgatacaacagccgcgggaaataacataaacctacaaaaccaagaaaatactggtaacaatgcaatagcacaacaataacatttccttttttttatcaaaataaactgattttatttctgatttagaatataatagtcacaaatgcaatcttgcgtatttcatcctttcttgtaggattacaatttataaaattgattcctgatatattcgacattagacctcgaccagttcgatttatttttctcttttgccaaggagatcaatagaattagtaaatgttaatcgcttattttgttattgagcaactctgtttattatactcaaacttcttggctttacgccgctaaaaatgacgtttttaataacaaaataatttattcagaatcttttcaattctaaaaccgaagatggacggttgacgtaaaaagatacagatgaaaagtgtcagttaggaaaatattccccatctaaatatgtgcttcttggtcatgtatttatttggattaaaagaaccattggaaaaaattcctcttgcgctggacgcatttcagttgatcaaaatagtcactgtcacagtcacagttactaaatttcatatgttataattgggtttataactaaattctggtaattctctgctaaactgtttgtaagaataatatccgaaaagttgaaaactctaatccatctaaagagaaattaaaaaagaaaattacgcaccgaaagtttggatagatattccatctttaatctatttttcaatattaaagcaacaagttagagagaaggttgtttctggttgtggaggcactacaaaatctatttaggtgttatcaaagtatcgtgttacttaacacatattaatattataatctattctgaatgcaatattaaattaggaagagtttgattatattgaatgaatttgatgaattatcatgtctggaaattgtaataaaaatagattagagttggcttttccaaaagtatttgattggataaaggctgcgaaaataattgatgaaagtaacatccagaatgcaagtgttgccttggacatgtcactggaaaatacatacccaattttgaaaaatggaaatccgctaaaaagtgaaggcaacgtactagagtatcaggttgacaagccagtgttaatagatgacaatactggccaaataataaattgtttttctgatgttgatagcgaaagtaggcataaaaagtcatctatgccaacttcaaatgaagatcggataccattacgatgaccaaagaaagcaattgatattcttacaaattaattttgctataaaggtatattttaaataataaataccacatatagatagaaaaaaaaattaagatcctgacaaataaagaaaaaaaataattatttaaaaaatgagttgctaaaccaatgatgtgaaaattcttggtacatatccttttgtgggattggaaaattactatccatgacggtggtaatcaagttcttattcttcattagagtattaaataaatcgtgttctgtgacaatacctacaaagctgtttccctcaagtacaataattcttcgaatctttctttcatacatcagtttcattgcatccaaaacagatgaccttgatgataatgtgattataggatgactcataagctccttgataggcacctgcatattgactagctgtgttgaacttagaattctgattatatctttttcagtaattattccaaccggatttttactttcattactatcaatgacaacaactgatcctattttattatcaaacataatcttggatatttcgaaaatattttgattctgttctgcggttttgacatccttatttaatatgtccattatactaattgattctagactcatttaatatggttgacactttgggtatttagattttctgaaaaaattaaattaagttttggaaaacagccatctatagtatataatgaacggtattcttctcatatagatgagttttgcagagtaaatttatgtccattcctattaggagaaaagtccaaacataaataacaatccgaatcctaactatatataaagcagcataatgtagtaattcatccaatcattcaacttaaaaatcaatattggaatatggcttgaatggattaaaaaataggttagacgaatagcacaatttcaaatagatatataaaccctacttaatgtaatgaaaatattattactaaataatttaaactagattatatagtacacgaaaagggttttttcaagttttagaagaagtagatcggttagaaagttcaaaaataatccaacagatgaaacgatattaaaaaatccttgatatatgtaattcttctccctctgtttgaaattttgttttaatccgacgtacctgttgcatcaactgattgcatcaacaggacaacaaaagtattatgaaatacctggaccggataatacgttactgaaatgtccttattctctattgtgtctaaagtcaaacccgattgtccgtttatggcattcctaaaactagtgagattggcaaaagactcggcaatcgtgcttttgttcgcatcagaatctgcaattttcagtccattgtgtcctacatagacgacacgcgtgtacccatctgaagatgtaagattaatcgattgaaggtcttcattcaaagtctcaaagtcaagacctcctgcccaaatgccaaccatagtagaattgtcttctaacgaaaatactggaactgctattatagattgcaattgacctgaagataccgattgggtgggatctcctaaataaatctcatttgtgtcaattactcctttgaagtaatcgcgaaatcccagattgtttaccgtggacattatctgtctggagtacggttcgtcaagatatatatctccatttggcattataaaaataattatctgaaaatcctcataacttgacaaaatattttgagccaccagtctcttttcaatatctgcatatggaggtattccgtgtaaagtggttagtgtttgattaagcaagtgactaagcggaacttctcttatctgtggtagttgactggtcaggttaagtactgcacctgcattttgaatatagttttcaaggctttttgccaagatttttgttataactgtgctattctgtacactttctggatcaataatagggctgacctgaccttgattcatgttgttgatcgtatctgtaaatgtttgctgaacttgattctctattgttctctgcaaatcctgttggttctgttggattgattcaccaagtgaaggatcagaaccagaagaagtagttgtcgcgttgacataaggaatagcatcaaaattttgaatatatgttatagaatataacgaggacaaaaggaacgaaatcataaaaatagctctaaccttattttgtgccatcgctgatgaatgtgtgactgctaataacaaattcaaacgcattgaaaggcttgatgatctttctttatttttcatacaaccactgcttttataccgaggcaatagatatatctatttcgcagtaaagaaaatctgacacagctcctgggctcgtaatacgcctattaatagactcgttggactaggttaataactaaatccttttttagcctcaataacatgagatatagagataaatagttgcgatggcctgacaatcagaccgatcgctaatgacataccacaatactttaggtcatctatgtcttaatagattatgagacaaaaagaccatactcaaaccgattgggtttggtgaattacttaaaagccaattggaaaacactaattattacagtcattatgggtatgaataaagactcagttgtattatcttgtttcttatgggttctttgaccgatatctcatctgccggaaggttcagaaaagtggtaaaacaaataattggtttcaatctgtcaatactttctgaaaatgcctcatatagtgaatttaccagttcatttctctcttgaggatgtaaaacggtaattttagggtaaactttaagggtattaatatcaagatcaagatgccttcctaaatgttttctatacgaatttattccttcaaaaagatattttaatattttaacttcatcatctttttgttcatacaaacttttccttaccattacttttgcataatgatatcggaaatgttttactgctattaaagaaactagatgcagataaccttcaaaaaagattatgaataacagtatagatcgtatggagaaattaaatggatccgaggataagaattcagtgaatgaacctaacaatcgatacctataaagtcaatgatcccaaaaagtattgcgagtggaattgcgatatacacgatttttaagctaagatctcttgtaaagaaccgatatcggcacacatcccaggagatgagaattgctattaacagactgttaatagatttgtccatgttactgtgttgcagataatcgaaaaatcacctttcacttcatagcaaactctataattggagttaatgttgttactatattgtgatacaactggattaagcttgataaagtctatttttaaccacaatttgaaaagagaaagaaaaaaatgatatgatctaaaagttttcaatttcacgtagtagtttattagcatcgacagctatttagtaggtatgaagtgtcgtatttgtaatatgccaattgtagttgtacccttaaagacagttacacttgataaacagaaggagatttactatgatttaattttagacatatgtgattattgtaatgggcctgtgataggagttcgtaaacgcaataggcaagatcccacgtcacttagcaataatgagaatgagcataaggaattagaagataaaatggacttttatacaaagagtaatgataataatgggatttactgaatccttatcttgataaatctgcatctatatatggaatcagtttgtttatactgagacatgattgcacttggggatcctctacaaatctatttgatttgtttctttgaacagaatttgtcctgtatacctctttaagaacaatattgtaagaccgaaatttaaaaacacaaatcatttttgataatttgttcattgtcttgtaaatcatcttttttgccacaaaattactagaatgttaataattaacaagatgtgttacaaactagcgagtttaatacgaaatgattcgcctgctccaacaaaaaaatcgttcacagatgatcaaattggaatcaatataattatcattgatcataatgaatttttataatcattagaaccctatggccacaaagaacatatttaccacggacgacgacttttaataattgaataatctataataaatcgagactgtaagaaacatgcttaagtaagtagcctattaccacagaaggaacagaaattgaatgtatactaatctatacacttggggtaaccagcatcatccatacaaaacatctctacgttgtctttttctattatgttgacccaaaacctctgccaattttgaaatcagaagtgttgaaaacttgtataaatatttaaaacatagagaaggaattaccgtacaattaatatgccttcctaaaattaaatttaaacattattaatggtactatacctgctcttcttttgcttgactttccattttttgcagtcgtgtataataatcaggaaattcatttaaatgtgccagtgcaatctttccggttgttatttcatcatcattcgttacattagttgataactcgcgactcccgtgttctaattctacatctaaccccattctaaattgctctgcgtcaaacttagtccaatcgatacctatagactcgccaattcttctggcatcatcttttgtaaaatgttttgctgtcatgaaataataattataagattacttattagaattttttcttttttattaaaaatgaaacatataatatttataaagaataaattttttcattatacgactctcgaaatagaacgatgacattaatgttgcttttatgtgtttacatcccaatagaggggcatcaacaatagataatcaaaaaaaaagcttacggtgtcaaaatgcaaatgatattttagtaggtattcatatttacttagatgatctaattattttgatgtgtcatatcaatgcactgaggtggctgctggatcctcttccataaggccaagtatattgttttcagtgtccttaaagactgtcatatacccaacacctggtattgctgtctttggctgaataatttctctaccattttcctttataagtaatgaatattttacgacggaatcaacattgatgaacggagtaagatactacaagattttatcacgttttgccaatcctccgtcaatcccatgttcactctcatttcctgtctttacttgccagcattacattggtccttcccatttttttaaactcccacgcaaacaccttctcgtagaatctgatgtctcgctctggctcatctgctgtaaagtccaaatatgatatctgtgttatgtgtaaattaccatcagagaaatcacttataaaaattatgaattactaataattattttttcaagatatgaattcaaataatattatgaacttcaaagacaagaagttcatcgcttatcgtatgaaaaaagaaaattatgtccggtcatctaaatacaacatttcagatggaagtactactcaaaaattagtattatttctcctgcttttacaggttgctgtttgttgaacaatatttctattatctttccatctctaggagatttaatttcgttgtacattttcattgcttcaagaactaaaagagattgacccctcttaacatatgatccaagttgcacgtaaatatcaattatatttccactcatgggtgcatgcaattcccgtatggtttcttggtcgatatttattttagatatcgtgtatgccaagccatttatgattaagaaagattgttgtttaccatcatttcctattcctgttctctcataaaaatcaagacaaaacctctttgaatctataacaatttcattttcttttattttggtcaaatctatagctttatcatttatgaagattttattctcatctaattttacttcataagttgttccgttaacctctaacttcatttggcccatctcatagaattttctaaattataatttccttgtaaattaagaaattcttcaaatctacttaaaatccatggttgtctctgcccattttcttgcggtgtttcgtcttctttaaagtacttacttgatgatcctgatcttttcaatatattttcaaatattattgctgcaatttctccacccttttctgaatatgatttcattttttcaacaaaagcagtatcgtaatttccggttagaaatcaatcatcatttaaagcagataaatgaaaaggtatggttgatggaatcccagaaattctgaaagataagagagtatttttcattttttcaattgcttcttctctattttctgccctgactattactttggcaattaaagaatcataaaatggtgggatgttatatccttcatacactgaaccatctatcctaatagatcttgaatcaataggaggggtataattatttaccaaaccaggatatggtgcaaagctaataggatgttcagcatttattctgcactcaatggcatgcccgctggcttttatatcattttgttcaagtgtcatcccattcctacacgatatgttgagttgttgttctactatatcaattccagtaacggcttctgttattggatgttcgacttgtatccttgaatttatctccataaaataaaaggacttatcctttaaaagaaattcgaccgttccagcgttatcatatcgaatttttttcataatttcaactgcagtttttaccaaactctccctagcgacgtcatctaatgctggagatggtgtttcttcgattaatttttgatgtctcctctgaatagtgcattctctttctcctagatggattattctcgaacgatcacctattatctgtacttctatatgtcttggattttgtacatatttttcaagatatactctacctgaaccaaagcttaataacgcttctcttatagagaactttaataattttgtcaattgttgaggagtatttattatttgaagtccccttcctcctcctcctcttgcagcttttataattaccggatatcctaattcttctgcaaattccaatgcctcatttatatccgatacttctttaccctttatagtagtagcaacgtttgataatatctctttagctaacactttatctcccgaaatttttaatacatcagcagaagggcctataaagaccaatccctctttgttacacaaattagcaaattctgatttttcagcaagaaaaccataacctggatgtatggatgtgcaatccatttttcttgccgcatcaactatcttgatcatattcaaataactctcattgggcaaatttccaccgatattttctacactgtcacaatgttttatatgcaagctatccttgtcagcatcagaatatattccacatggagaatatcctagtttacgacatgtcttggccactcttatcacaatttcccctctattagctataagtattctctccattctgaaactaagtcacaaggtaaaattaaaattgttctataccaaaaaattttaatatacaccagcagattacgtaatggcctatctacaaaacctttttgtaccaaaaaattgatcaaacttattaaattatggtttatataggcatgtttccatgttttctttttggtaaatcttctcttttcctattgatggcctttagagcagaaatgagtttctgtcgagtctctcgaggcattattacattgtcaatataacctttagaggctgcaatatatggatttgaaaattttttttcataatccgatactaactcagatcttcttttgactttattttcagaaatagataattctttcctaaaaataatattgcatgcactttcggcacccataacagcgatctcagcttttggccaagcgaaattataatctcctcctatatgtttactattcattacatcatatgctccaccataagcctttcttgtgattactgaaagtctaggtactgtagcttccgagaatgcgaacaacagctttgcaccgtgtcttattattcccctccattcctgatctgtaccaggaagaaaaccaggaacatcaacgaaagttattatgggaatgttgaagcagtcacaaaatcttacaaatcttgctgccttgttgcaagaatctatatctaaaactccggctaaaatttctgggttattggctactatacctacagtggtaccatctaacctagcaaaaccaattataatatttctagcccagaatttttggacttcgaaaaagtctcccttatcaactacttttctaattacactttccatactatatgacatatgtgagtcggaaggaaggattgaatcaaggctttcgtccagaagagtagaactatcaattgatttgacctttggtgatgattccaaattgttggacggaataaatgatagcaattttttcaatatttcaaaacaatcatattcatcatctgcaacaaaatgagctacgccacttttttcattatgtatgtaagcgccacctagatctgtagatgtaacattttcattggagacctgtctcacaacatctggaccagtgacaaacatgtatgctgattttgtcattattataaaatcggtcaaagctggagaataaactgcaccccccgcacaagggcccattatcaaggatatttgaggaattatgccagagactctaacatttctatggaatatatctgcataaccacctaggctttcgaccccttcttgaatcctcgcacctccagaatcgtttatgcctattattggaaccccttgttttaatgcatgatccattaccttacatatctttgatgcaaaaccaagaccaagtgaaccaccaaagactgtaaagtcatgacaaaaagagtagactaaacgagaatctattcttccataacctgttataacaccgtcacctagaatttttttattttccattccaaaatcatgacaactgtgaatcacaaaaggatctatttcctcaaaactagctgtatcaaataaggcattgattctttcaaacgccgtcaattgacccttttttcttcgttcttctagtttctcttttccaccacctagaagatgagttatccttgttgcttctaaatcagaaaaattcatgatccaaattatgcaactgaataaaaagagttttcgttatcgttctagtagtgttctaattgttattgcaaaatcagatgaaataggataatttaccagttatttaaaaacaaagattctgagggtgtttatataggttttattgttgttttgaattaatcttgtcttcagattatatatagaatttgaggccctgacgttatgaagatcttatagcattctacttattgtatgtggggtattaggttcaaagttaaaacgctcagtataagcgccaggtactcactgaaccatatttctttgcgcggccatcaaagtaccccacagagtgtgaatggatgtttgccgcctatatggccaacaataataaaaaaggaaatgagatagaagtgaatcatctcgaaatagatgtaggtaaaagaattgatgagttttagagtcattaggtgaaaaaaagtaggtcctaattcattcattattcgtaacctttggcaaataaaaagtcaaagatatgggaactatttggttcttgcataacatcccagaaaattaagtgctacaggaattagagttttaatcaaagatgcttggcagatccaatgtttaagagggaaatgaacaccccaaaatggagaatacaatttcagaaaatttgattttaaaaagtgtacatggattttgaaaattttttaaaacggaatgacagaacgtcatgagggtactcatcgtttcaatgctaatgtcacatgataccgccagttttctccctctgattaatattcttattaagatcaatattatatcagagaattcacagataatcaaaattcataaattattgattgcttcttgcatatctttttcacttaaaccttgatatttcataatttgctcatagaccggtcctttagtgactaattttggtcctggttccagtatcgaaatagtatgcttgatcagatcattcatatatcttatccactctgtcaattgttcttttagactctcatccgaagtcactttcgcggttcctattatttgacctagttgatgaaatgccacaatgatcatcagtctaactcgttgacattcttgcttaaaattatcattatcttttatatttgaaattgtcttacttaggtgatattgacaattatcaagtgatgttgcaacttcatttgctttcacaaattcgataaatttattagagaagttcgccagacccatattcaaatctgcaaaccctatctttgccccattcaaagtgatttcattgccagtcctttttattaacatctcatgctctctccctttgatcagcgttacaatttttgtgagcaattccataatatttttctcagaaagatattatataaatttaggttgcaattccataggatgtttaataaatgcaaaaagaatcagaattgtatcttccgattattattcgggtttttattgttgataggcggtggctgcttgcctatagtttattctcaaagttctaacttgtctcaaacaaacccgccggacgttaaaaaaacaaggacgtaattgttgaattaacagatgcttttaacgaaagaaatcttaccgcgatagatacgcttgttgcaaaagatattaaagagcataggccaggtgcatgacaaggagtataggcaacgaaaggttttcttatggccctccaaacagcgttcccagactttaagaccgctataaaccggatagtagcagaaggtgacaaggtaattgtatttacaaatactacaggcattcatgaaggaccatttataattgcaccatgaataccacctacaggtaaagtattgtcatttcaaacaggcgatttttacactatgggtgaaaacggaacgattgtagagcaccaagacgttattgaaatcgtggacatgcttcaaaagatgggcgctatacaattcttaacaaactcctcttcttcctcatcctcatcattattaccataatcgttggcgcaatagatcaatagataagttttatatcttatcattttgtgcattgatatggagctatcctatcgaacaggaataataattttattggctttcaaaattaatagtataacctattatttgtattacaaatccaacaatcaaaagaatcgcgcccagtcgtgccaatcgtgtttctaatattctgtgttttatttcatgttcactgtgttttgacattttctcgattgtttgactagacctgaaaatcttaccgtaatacatcagtattgctccaataatatctatcaacaagccaatcacaattatgatgtctaacactatgctactatttctaggacgttattaatagtaatagaaaccacaaagcattcaaaaatgtcatcgatcacctatcgtttttaaattaaagtaaatttactcaaaaagtcatctttgaccgaaacattcattgttgggaatgtatcttggatttttcttttacaaaagaaaagaaaatcaaagtagatgagggttgtagatttgaaatatcaagagcatcgaaattattgtgatatataagccttttataatttttaaaatagattttgtttaataaactaataaaaaagttaggagctatgtaaaagactgataaaacattcattattatattcactatgtgtgaaagaaatcatggccgaaaatttttagtcctttttctattatgcgattatctttcattttcattttagttaattgaatcaatatgcaaatttgagattcagataatttcacaaagggtaataaaatttgcaacagtagtgttgcaaaattagaaagttaatctcactttactgctcaaagaacttctgaaatcttgcttttttgtagtttggaaagttgctttgtcagaagtctcttatcttatttatagtaaaaatatggtaatcaaatacctctttaaagtaatttttctttcgattatacttcacaggttgtttaggtgccatattcaattcttcaaccatacgaccaatacttaagatttcaaaaacaatgtgaattgaggtaatttttgaacttggttgactaatactgaaagcgatttggggctaagtcaactccttttcttcttcagaaagtttaaactgttctgttatttctccaataggttctatgatcacaggagcatagtatattttgtaatattgattttatctattatttaagacgaatctactccaatgccactactaaaaattgatcgtattcttctatctaactgttcacttaatcgtaacattcgattgccttatgttgtatatagaaaaagcagacaacgctactactataacctgaaagattttagagatcatgtctaatcttccgacataatactcgacgccaataactggaacaccaatagttctagaggctatgtatgttactatcaatccgatagatattataatgactactatatgtggaatcgtgtttgtataatttgattttagaacccaaatgcctagaatgaaattaactattcctaccgaaataaaaaaagccatttcaatctgtttttctgccaattctccttgtattccaaattctgagagctctttgaaatcttcgtattcaccgtttgctacaacaaagtaaacgattcccgtcacaaaaagaaaggctaccaaaatatagttaacatatttttgatttattatcatgactaaaattatctcctgtgaacgaaacagaaaaatgacaaaaaaatgaagatgattttttaagataggccttttttggcttcttctgcgtgagtaactgccccggttgtatcaccttcttttaacgcttttaatgaagcctcaatatgtttttcagagtttacagcgcctggattgtcttctagcgcaagttctgcttggtataattgctttttggcttcagaatcgtcaccactgtttatagctgctattcctgcatctattgcctttaccactggactatcagacaaagtggatgtttgaggaacagagcttgtcgtggtattttctattgaatcggtagtatttgtttgagcatacgtactgatgctgcttgaaaccaaaagtattgacactgttagggcgattgtaagcagtttactaaatgaggatgtagagatattcattaaatcattatactgattaaatttataataaattaccgcccattctcactatatgagaatacgagtatagctgatagaacagtatgtatagggtataacaataaaaagtaacacttgaattagagatttaacctttaaactgctgccacagtctagctattttatcttctagaggcttgtgtttagcgttgtatacgagttttttgtttttgtatcttatagatatttcgtaaatccagagagtatagaatgcttcatctaatccatccattctacgcaagatttttgttttcttgattatgtctaggtcttctaatttgctcatttttctatatgtggaagataacggcaaatccaatatggtggccacctgttgaatagtgatctctttttcttcaagcaatttcattattcgaagactagcatcatctaaaagaatggacagataatctcttgtggctagactcttcaacttttaagcactgcaacaatcacaaacacaaatccagctatttcggtgatttcttcaattaattccttattgctttcttctgcaaaattcatataatctcctattatggtatctcccatagttatgagaaaaaatccaaatgcaaggtagagcattggaagatactttgatcttacaaaagccctggcagcaaagtaaacaagtatgaaacctaaaagaatatgaattaaaattaccagccctaaccagtccattgattagatgaaatagacaagggttaaaaccattttcagattaatccctcttttaatatagatcaaaatggtttataataaaattggctaacgctttaaatttttataacagcttttataaccattattatgaaaactagttattatgtgtattttctacccctgtttgtaatggctattggccttatttctttacctgtctatcaaagccttgctcaaagtacacattcagaagctgactctactcccattaatgctgtcattatgataacaacgggagaacaaggacaacccgtttttagtccgcaaaagacagagataaagcaaggagacgaaatattgattgtgaacaatgtaacccaacaacaaacatttaccaacggcaatggaaccggagatcagatggatggcaaaatattttcagtagaaatagctccagacagttttgcagaatacttggcttcaaacatctctcctggtaattacacattctattcagagaatgatcctaatctaaagggtgaactcatcgtatcgccttagcaagatttagcctatcagtctgttttttttatacaagttgattctaaagcttaacttgtagtatcattatgttaagttcgtattaacgatagaatatgccattactaaattaaactaagaaaaaaatttgtaaattgtttgttcctttgtcttcttttatttttaattcttcccattaactatatggcaaggaggaagataactcgctaataggaggaataatggtgtcaagagcattgccttgggaagtccaaactattaatgtctgtacatctcctgtccccttttgtcctcctcttaaatcgttaaagtcatacatgctatcaattgtcaatcctgcattttgaatatcttgaacatatgcgtcaatatcttgtgttggaaccatcaatactcctaccgtgtcttttgttgagttgtctgctgaattggcaatagatgaagtcgaattgtcaactactgttactgttccggtcattgtaacacctgggtctccctcagcttgatagttatataaaccaggttcattgaaggtaaatgtttgagataattgcatatcagttatttctccagtattaaataaggtggatgatccatcagtgtcttttacatctatagtacgttcatggcctacatccccgttaaaccaacctatggtggttccagcacttacaactgcattttctggtacaaagtgttggtccaaaaatctggcttcattgtcttcaccagcagcatgatgaccttcatttgggataagaataacgagattttttatactgtcgcccaaagtcattgttttggtgttaaaaatgctttctgcattgatatttggttgattattatcgccaatgctaccgacaccgttattgttactattcgtaatagtagcagcgctactagtgtcattatctaattgcgcatatgcgtcatagtcgaaagaagagtattgtgtcgaaaaagaaaatacaacaagcatgccaaaaataaataaaactactggaattgtattgatcatagtctaaatggtattttatcagtaatattagtaatacgtttaattcgttagagtcagttattatgaagggattttccatatcacctttgcgcatcaatttaattgctttcaaatatgagaattagaataaggcatataaacaaaataatcgtgaaaatgggtataaacacatgtcataagttgcatctaggaaggaatatctcatctttcccagatgtaagtgccatttagcctaaatgacgcatagtatattgtcatcttatctctattaaatattacgagaggttgaacaatgaaatgtatttatgaaaaaataattgaagagtcaaatcctacctttaattgtaattattttcggggatcggatttaaatttcgagattacaatgcctcttaatctatgattataacaataataatattgaatcaattcgggtgttgatatgaataactatagtaacgaactacttcatactctggttttgttaaaagttcattttccatgtcaagatttttcatttgagaaatagttttaaatctatatagactttcaaaatcgtatatgccacgaaatcggcatcgccttcgggctctcattcataacaaaagatagagttccgtgtcatatttgccgcgaatcccactcagtccattctagtaaagcctcgttaaaagacctcagttactaaatcttctatctcttttttggttaagatcaatgtttgtagcattaggcactgctaattatcttgaaaggtcttcattctctgcttctaaagcaaataattaacattagttgatgaatcaagacggctgtaccaacttttgacattgggtatatgcttgagtagtagacgggtttgtgcctgcttgagatacgcctttgcattccatgaattacctacgggttgatacttgttataattctaggattttccaacatttccgttcataattcgaatgtactgtaatattttatatccatggtcaaaaaatggcaaaatacaaaaacgttaaataccaattactagaactaggtaatatacatgagtctgagcactagaaattattataatgataatagaaaatacaatatggaatctaaactaagcggaattgcttggaatggtcaattgatggagcgaataattcgatgatccaacacatacgaccccagatcaagacttgtaccttactatgtacacttactatatcgatgtttgttttagtaatgtttgcttttgatcattcaaattatactacagtattttttattccgaatgcatatgctaccaacggtcctgaggcaataggtggtctggccgcaactgttgatttgggtagtcccttttatattcaacattatcagcatgttgttgagccaccacaatcggaatcggaaccaaatctttacgtaaaccatacaaacgaaggaataatcaatggaaacttgaccgtaattcaggaagggaacaccacagagactttcagaaataataacacagtctatctccaaggtttcagaaatctaacaactgatagtgatctggatgcggcaagttataatttccaagcaataggtaactacagtccagataacacttacgaaagtagaggcgtggcaatttttgatgaaggtgctactggagaactatcatttctagagaattcagttgccatctataaggtcaaggttgatgccgacggaaacggggcatttcttatgtggcacttgaaataagatgtatggcactggaaaactatcaaattagaaatacaagtaaatgagggaatggcacataaaaacaacataatattccgataaagtagaaccgcttggagtagtggacctagaagcctcaactagcacgtgaataaatagtacggatagtagcagcctatcctcttagaattgtaaaagctagcacacttttccctggcacttcagaacgaaatatttcttgttttaaatcctgatagtaatacgctataattctgggatttcccataattctgttcataattcaaaactataccacctttatatcctataaagagaatgattaaaattaaaaatacagaaggttttattgataactttgatgttggtatctatcgaaacgaaggcgcagtgtacatatcctcaaactgcgatgtggtattagtttaaactaatccactggtttatacattatataatttcattttttaattgttaataactacactggcagttaaatatatcaatacattgttcattttttaatgtttttttggttaggtcgtacgtattatggcaaaaatatgaggttaaaaccaaaaattttagcaagcaataaatagcaattgaaagaagcgagcattactgatgatacagaataataactattacttttttaataagcagttcagtttaagaattgaatataaaagaaaccatttagaaagatcaaaatacctggcgggatttaattagatggtcaacaaaataaaaccttctattaatagccgtggctttgtgtacactttttccatttctatgtttgttttgatgataatgtttgcatttgatcattcaaatttcaatgctttagcccaaaatcaatctttgcctttttctgatatttatagcgaacaagtattaaaaaaaataaacgataaggatcatttggctgggatgaacttttcaaagcctgtagatgtatacagcaaagatggggttttgcaaactacactcgttgctgattacaagataggtaaagtggacaacaagacaatcactggaatggtatacaatggttctctcgtgggacctgcttttcatgtctatcctggagacagagtggagattgatttggtaaacaatctcaatgaatctaccaacctgcatttccatggacttcatgtgtctcctggaaatacttctgataatatatttctgaatgttgagccaggcaagacgctgcactatacggtcgatattccgaaaaatcatgacccaggcacgaattggtatcattcacatttgcataaactttcttatggacaagtttcgggagggatgtctggattgtttattattgaaggcttagaacagttattgccagacccattacagaatatcactaaacagcccgttgccatgaaggattttccatttgacaatctattcgttactacacataatttgagtaacacaatgacgggccgtgaaagcctaaccgttaacggggaagtcaatccggttatcaacataaaatcaggcgagactcagttatggcgccttgccaacatcggttctgagaatgaatacacgctcacactccccggcaatacattccatgttataacagaagatggaagcccggtttgggaagtatggaataatgatactcttttcttcccatcgggaaaacggtttgatgtactggtgactgccaacgggagtgggcctattccattaggagttcctgctaacccctttactgcaccgtacgattcacatgttgcgactgtaaatgtacaaggtaaccaaacagatgcgaattctgcagatactctccctacaagcttaattccagagagggacttgagtaatgcgaacatatctaattatcgagtccttaatttctcatcaaatgatagagattggatctacgagataaataatacgacctttgatcctaacagagtagatataacagcgaagcttggaactgtagaggagtggaagttagtaaaccttgataaaatctcttctggcaacatacatccatttcatatccatgtaaatgactttcaggtaatgtcagttaacggaaaaccatatgacgctcacgggtaccaagatacagttattattccaactgaaggtgaagtggtcattcgaatcccgtttgatgattttgtaggaaaatccgtctatcactgccacctgatgtttcatggggactttggcatgatgggtatctttgaggtcgttaagtagatgatgatgttattggagattaatagcatgtttgagataattatgtcccaaaaaggaaaagcagtggctatgatcgttgtaatggcctttgccgtagccggacttacagcagtaacctctctttcagattcgcttgtgatagctcaaggcgtcggtaatctttcagatccgtctgtagtagcggaattatctggattgaacaaacaccccaatttaacacccggaaatgtttcagattcgtctggggtatcccagaaccaagataacgacccaaatgattgttttaggacaaacaataacatagatacttgtcctttgcactctcattttaaaggcctcagtaatgccacaacggattgttttaagatagttggagaagcgaaggtaagcaccggcgatgctcaaaattacacggaaagtgtacagagctttttctccttactacctacaaacaacgaactaacatcaataaatgaaaatataggtggaggcagcggtccagtaactgatatgaagggtatatgggatttaatgaagagtgaggacatgactcgaaacgataggcaattggtattggacgaaattaatagcatcttggcaaccgcccaacccgggttcacccaaatacaacaggatgcgctaagtttctgttttacagatgaaaccaatgctttgggccctggacttaactattaggtccatcaccttttctttagactagacaatagtctgtaagattgccactttccatttattcattcttgtttcataaatttcgattcaaagtgactgacagccgaacctgattccccaaccattagtatgttgtaacacttccttgtcatatttgccgcgaatcccactcattccacttttataacagtgataaaatacggttctcacaataataatagtgatatagaaccaatggactagccagttttagacgacttaataaataggattatctatgattttggtctatttgatcgtatattctaatagattctaattctagttatgaaatcatggtactatgtagcaatggtaaaaaatgaatccataaaattatacttatactaaactaagtattatatatcataaaataaaaggtacctcgcatgaataaattcaatgcattcttagttttaagtatcgtagcagtcacgtcaatattcgcaggagtagcaatggtaacaccagcagtagcacaaggtaattcaacaataccaatgggtgatatgggtaatacgacgatgacgatggacaattctactagtatgactagtaattcgactaactcaaccgaatcagaagaagaaagctctgagagtggcgaaagtgaagaagaaagctctgagagtggcgaaagtgaagaagaaagctctgagagtggcgaaagtgaagactaactttaaatcattttaattttttgtctagtgattcctaagctacattaattattgatttctgagagaatagttacgacttcgaggactatcttatgggtagattcttaatgttcattaataaactctagcaagaaattacattttttaaaaatgaaaattaactgatttttcagttgttaaaaaggtataaaaacttagttagaatacaaatttacttgttaaaagaaagaaatagaggtttatagatacacaatgttgcttatagtaatttataaactttaaagtacaatttcagacaatgagtttattgtgtcctaattgttccactgaaatgagattaagcaatagatcaggggttgaaatagatcaatgtcctagatgcaaaggtgtatggctagatcgtggagaattagaaaaagttgcaaatatgcaaaacaggtacgaagatgaacactaccaaaaatatcactatggaagaggtcatgatgacgatgacgatgactactatcgtagaagaaaacacaaaaaaggcggtttcttgggtgatttatttgactttggttgattatgtacgaataaataattcaatactcctcttttaatcgaattttaggggttcttatagggtagattatggataatgtatccatccagggttaatttatgatatttactgtatctgcatggttcactcgaagaactttgggatacttgtgcctctctgggataaaataacgacgtaggattcctatactataccctattacttgagtaacttatatgaaaaaaatgtttatccgtatcccaaaacaaccagattcttatatagtagatttgttgatgaccatcgattcttgtcagatagccgtcagatagccgtcagatagccgttaaagacagacactgcttaacttggaatggtaaaatcatcatcaaaattttgatataaatactctttttttgttatatataacatgtataagattgggaaaggcgattcctcaagcaatagaggtcagtccttagaggctggttgagaggtatatcgcgtgacagcatagccatagagaacaaaatagggtatcgcagtgtttctactataattgatcaattccgactccaaatagcagatatggatttattgagagcagtttctatagagttaagaaagaaggaccttgatctatatcagttaggtgcctctattagattgaaaaggaaattagacaagataaacttaccagaagaacaaatagaaaatgtccttgagcaaatgagcatccattgctttcaggaagatactgatattgaacaattctttgtccagatcgacaaagttacacagatgtctaatactcttggtatttcaatatttgatatttcagaaatcattgaaagagaaaaacgggaattagcccgattagatgaactgatattcattaatactaaagaaattagtagacagatagtagaggaaggaattacgaagaaagacttggatgaatatagaatgacaagaccgcttgcagacagaataaagcagctggagtgggaatcaaaagagaaggatcgaattataagaaattatttacgattcctagaaaaatggtaaatgttacaggtttgaaaacctgtaagcgtaggataagtacaatattccaccagccgtggaaactggatgcttttcatgaaccctcactccattggcaatcgcctgtgagatgtgacattccatctatgatgcttttaggaggtggttgagtaatcataaattttcatggctatttttccaatatgattgagacttaatttagtaatttaaaaagtagagaatgataaaatgtttactcatggagatattatactccattagcattccatgattgccttatcttatcttatgttactgttatgcttccggtcatccatggatgcaatatacagatatagttgtatgtcccaggtttctcaaatgttactgtaaatgtatttcctgcacctggatattcttgctccataccctttggaaggaaccaaccggagttgacatatttttcggtaccgacaatcgtataattcgcattgggactcataaactcaacattaccagtagagtctatcacagttggattaaatgttcttgcatttatggctatgatggtgttggtgccgttttggcctggtaatactatgggctcgttgttagagttaggggggagagctgtgaatgttgtggtatttgaaacagacaggggagaaaccactcctgccattgtgttattatccattacaaatgtcaccgtatgtggttcgcctacctctgtaggattatgccaaatcacaggttgtcccacgtttgcttcaatattgtccggaatatacatggtgagaggggcagtataattacctccgccagccgcaatctcaatagatttgttgtcttgttgttcctgttgttgttgttgttgttgttgttgttgttcctgttgttgttgttgttgttgttgttgttgttgcgtctgttcctgtgactgtgaggttgcaaacaccaagatattcttatcctctgttgtggtttcagatacaaaaaacaataatgacatgaacaccattgaagttattgttgctattaccattgcaaagatggttgagcctgatttgttactcatcttttcaatattattgtgctgctttattagttttcggtgattattctggttctattactcaaggacattaaaatcattgttgtattagtcgacaaataccaaattaaactaattatatgttgaattgtgtgattctatcttaaaatatgataatgatattcccaaccgcctagaaagttaatgaaacttttgtagctgccgtaagtaattagattcggtggattactataaagccctgtaagacatacaagtcataatttggagaaatacaatagagcactaagattaaccttgatattttgacttagattcaatcacaaagaaaatttaattaatatgcttttactacagaagataatgaaaaaagtctattctattgtattatcttctcttgtttttgctctagcaatacctttcgcttatggacaacaacttgataatcctacaaatcctaataccactataaatcaaaacacaactacaaacgctcctgaatctatcataggcaagagcgaaaatcttacaataaccgatcttagataccgtgcggaatcaaatcaaataacgggaacggtcacaaataactcgacaaatgagcagtcttctataaccatatatgcggtcctttttgatagtgatgattcttttcttggaatatctgaaggaagacctttagttgaatctcttccaccatctgataattctccattctcaatagatttgctatcaggatttggattctatgcaatgcctgaggacccaaagagtattagccattatacaatatatgtaaaaggatccgaaccacttttctaatacaattaaaatctacaaagattaaaaaaagcaagtcgataaggtcaaagggccaaccaataattatctttctctccgattacaaataagtactatatggcatgtttttcccacaaccaaaaattgattattgaatagactcttaaaagtcctttttagattcataatcatgcctagaaaaaacagcagagtccagcgtgttagaaacggattcgttatatttaagactacttcaattacctgtgggaatagcttttgtaatgcttaatccaataatgggtattatcgcaatcaaatatggtaatggcgtgtaatgtgtatttcttatagcggctgtgatctcgattgctatgatatttatcacggcaatattgaaaaggagggcagcttcaacaaaattgtcatcttagtaacaaataaaatatgataaactttattctgtgcgtatgagcaatcaaagccaatcatcataggttaatttcaataatgcctttgtactttaaaaatttgagtgcagatcttaaatcatagacccgattttctgctttgtcaggaatcaaagtcatattgaaacctcattcaaggttccttcccatgtgatcttgtggtcaatccagtctattagatcaaccttttctgatgttctgatggttcaaacatttaaaacattagagaaactgatacttttatagatgatgacaagttgatttgggcggataatttaccttatttcctaaatatttacctattcaaccattataatctagtgaaaatgatcgctaataccgaatccttttttttatctctaccggaatctaacaaacctgcgtttacaattcatgatattattaatctctaatatttgtaaaactttatatctacagtaacctattactattgagtagtattatgaagtatttgaatacatatgcatttaatgcatttcatttccaacaatgccatattttcttgtctaacattccaaagtctagtaccgactttaactctctaagggggacctttttttgagtattgataaatctccagtttgggtacgtgcagcccagattggtctgggtataattatcttaattctatctatagtggtattgcttaatccagttataggaggcatttcgataatttttatccttgcactactcttattctttgctggaattgaaaaggtcgtttcgggtattattggaaagggaaaatcgcgctttgccaatattgcattaggaattattgtgatcatcatttcattgatagcaatgacatatccagtaggagcaactgtaatcgtagttgtattgcttggtatagcattactagttgatggtatatcaagaataattcacgggctaaaaagtagaaaggaaacaggaaagtcaaacctatttggtatgggagtcggtgctttggaagtaatctttgcaatagcagttattgttatcccaaatattggaatcgccttggcaggaatcttgataggcatagctttgctaataacaagcatacaaataatttatgcaggggttaccggtcgttctagaagcaaggatacgttgacaaagtagcagctttattttacctataaaattttttttctttttttaaataaccaattctttttgtttcgctagtttgttttagaatagtttttaattttgggaattgccaataggatcatagcagattactatattataatatttttgttcactggaaatgatgactaaaagtaaaaattaaacttgtatagatttagatattctcaagctaggtaaattatatttctattctattattttgtcatgtggcaaaatttccatttaattattatgatatttgaaatttaattttttctatcacctttcgtcattaaatttattactcaaattcttttgtgtaattgaatagtaggaacttataatatgcttctccattttctgatattatagcaaattcaattaatttgatgatttttcagatattcgttattcattgttctgaagtaatctaattcgagattaatttgaatcaaatctttcttgttacatagttactatttaatagatagcagcagttgatagcaatggaagggcagtgcaatttaatagcaataacgatcatccttttctaaataaatatatttaataatattttggttaaatagaatttactaagatggtaaacacatttgtataactctctttatcagccatactaatcggtttcaggattaaattagatatcagttactattagaagagtttttaattaatcggtatggctgctagatggttcaagtacggtgcatggggctaaactcaatactacaccaaaggattgaaagtcccttagacggagtatttgatcaacagacttaaattgttaccaatgtttgggaataatagtttttaaaaacgcaaacgcataatcaaatcaaatttcgaactttatcgagccaaaaaaagactgattaaatataatcgtgacaataaggtataagttaattcattgctttatattgaagaataaatttatagtttgtttttaattaataaacaggttaaatggtcgattatgccaactcatctatagaatcgttgatgctaactatccttgtatcattcttagtagcatcccatttttgatagcatcaatcatttccaaagaatatggacactcacttagattacgtgcagatcttgcctcattttcatccggcatttttatcgggaccgtaacatttagcattatagaagaatctgttaaaatgggtgacatttttaccatgggaattggattggaataggagctgtaacttttagtttagtgcgatacaagatcgaaagcaaaccaacgctgttcataaataaggataacggcaaacaaaatattgcagattcaaatacgattggtcatgacaactctgtatagaaaaatagtactgacaaagaaacagaaattctaactgagaaaacagggtcaggaaagctaatagtaataagcactttaacagatagtcatccagaaactgtcatgattggagtcatgatcgcgctgggtatcccgtgattatttcctatggctttggcattatttattggaaactttgcagctactattgtaggtaccagagagctgattgcagaaagggaacccaaaagaaagattctacaaaaatgggacatggtattcatgttcgttacgataggaggtccaattggatactttctaacactgtttcttaatgagtattacttgtcaattgtattcagttttgcagcaggagcgttaatgtcattggtaaaagaagaattgatacctaatgtatacaagaaggtaaattggcatattgggctttctgcatgcgtaggattattcgtgagttttgcaatatttcactttaaccaataactttattcagacattttcggacttgaccttaatttcactcttgcaatatttcttgacatgaatcgcgtgtagacctactgcccaatagatacaaatctaataaattgctcacttccaaatatggaggctatatctggtcaatatttcctataattgctagtagttcaataaacttgctattttcaatagatatcaacgaaatattatacagaacagatatgaatttttaaagataaagcatatcataatcacttttctattgagaagtatttggatcgctgaatgaacagcacaaattatcatgacagtatagaaggatttgatcaatacttttcgtattaaaatacattgcaatatcttttggaattttagttgataaagatccgctcaagtcattcaaaaactcataaatattttattcaaatttattagcaatcaggaagaaaataaagtaatggcggggggaggcgaatcaaagaaggctatctacgctgcattgtttggcaatttagccattgctatatctaagctttttgcagcgttatttacaggcagtacgtctatgtgggctgaaacgtatcattcattctccgatactttcaatcaagtgctacttttgttaggtgtaaagacaagtaaaagggaggcaaatgaaaaatatccttttggatacggcaaggaacagttcttttggtcgtttgttgtagccatacttatatttggcgtatcaggtgtgttatctttagaacatggtatcagttattttttaagtggtcatgatgctcacagagtagaaaacactttaattaattatattattttggcaatagcttttgcatttgaggcaaatgcaatcagaatagcctttgcaatatttagaaagacaatcacagatagaggtgataaattaactttacctattttgttcaccgagctaaaagaaaacaaagatccggttattatgacagtacttgtagaagacgcagctgctctgctgggaataataattgcagcagtagcgttgttgctttctgatattacaggaaattctgcatatgatgcaataggctctctcttaattggaatagtgctaatgggttttgcattatttttggctagggaaaacaggggtatgcttataggtgaagcgatgtccaaacgagattacaaaaaggtatacgacgcagtaattaaaatccctgaagtaaaaaaaataatatcaatccgtactatgcactttggtgctgaagatgttctgatagctattgaagtgagtttgattgagaatttgcatactggggcgattgaatccagtattgacaatattgaaaataaaatcaaggaagccataccctacgttaacacttccaaaatatacatagagctaacacaggcgattaaataaaataggtgatttcaatttgaaatgagaagaactatcaaaatatctctaatgcaccaaacagactagtcgacgctatttgatatcaaatattattatgaatctaaaagaattagggtcttgtctaaattaattggtaacggatcctcctatgagatctcatttaatataattaataaattacagaaaattgatgatcctctatcatttagaactaattacaaccgataacacattttggttaactgattccaagatttcagcagtttagaatctattaacgtcaaaagcaggattaaaaattctttgcaactttaaatcgagtaagttatctaggcttatggcttttttgaatggtttattatagtagtaaaagtcatcacagatgttacttatatctagaaaactatctttgcaattttattaaatttagatcctttctcttttacccttaacatatatttttaagcgctaaaagaattatgacattttaattgtgaattatttggagtcaatatacataaaaataatttttgaacatgattggcatattatgtatcaatgataattgtgtaaaagtgttctcaaacaattaagtagtgtcaaatattgatcatccatgatatcgtttctaacaaaattttcaagtgtttatagttatagatttgaggtcttagacaaacgagagccaaaaatttttatgctactcagagtgcaagatcagtagaaacaatatacttgtattttatttcagtttttcatattgtcaaattttaatactatttgtgagaatgtagaatatatgaaacccacaagcctactagtcatatcgcttttaataataccgtctagcttaatgttctctatatctggtttggtagcaagtccaaatcatgctgtctatgcaatatgtaacgaaacaacagatccaaatgtagtatgtaatgagcaatataatacccgttcaaacacacttaccactacaacatcaagtaacaccactactagtagtaccgatattagtgaagaagaaccagaatcagctttgtgttttgacattacttgcagtttaacagaagactatatttcagactatgagattgattctgaagatagcttatcagatgtaattgattactaaacagatgataagttttagggatcaactaattaatttagtttaatttactatatctcaaatgtcattagttaaataatatgttttataatatggaatgcttttataaaatagaattataatttcgcaagaaattttagtcctatttaacaaaagcaaaatcctggttttaacatgtgcaagcagactttctcttcttattgtttttgttttaaataaccgaatgtttttttcaagaacatcaacgtaaatttaacaggttaatatatctaaataataaatagccaaaattaatatacgttgttaaccagttacggagaattaatctttattctgttagcaaataatacaataaaaggtaaagaccgaagttaaatcatgacagaatccattctgttaaaaagtatggatctaaaatatcacttttacttctgtgtttcatggtgcttgctaaaaagaatcaaatccccccatatccattccactgtcagcgcccacatcgctaaaaccacctgtatctgaagcgcccgtgtctgatgcgccagtatcagacgctgctcctgtatcttcagcaccagaccctcctgattcgtctacttgtccttcagtttgagcgctttcagccggattcattgccattcccataaaagccatcatagatccaaacattaccatgctcattattccagaaaataacatcatcggcatccaacttctattatcgtccatcatgctctgcatttgacccttattgccggtttcatagagttgttgaagatatttggatttcttgactagttcttgtttttttgaatctaatactctcgcacccgtttctgaagtatgaaactcggtcttcttattaccaaaaaagcccttttttactaccatggtaattagcttttgattttttaggtcatttacaatcaattctacctcgtctttagatagttttgtaactttggcaatactatctatctttttcataccccgagaaatcgcatctagtaccatgaaatgatttggactttgactaaatccgttatctgaagacatacatttgtatgaataggaaattatttaagtatttgaataagtaatcaacaatatctaataaaattaactgattaagtcatttattgagcgagctagaacctggaaaatctaaaacggtaactcaagtatttattatatgaatactagattttctcactcttgttttgttacttttgcaggagtcagccaaattttttgttgggacactacaaagcttatacttcatacttttggctaaaaagcctcatttttctatcctgtgtttcttagaagcgggaccattatgtagtgacccttcataatgagcaagttagaccatgtttccatttatatcataaaattaaaagaactacgacgacagatgtatttgccatcagttccatactagcctaatcgatgacttgcttttctcaggtttgtgataaaattgattattcaagaaaacaatgaatagacattttggtagggttaaagaataaaaatgaatatcggctatgaagtatttagtatatgaacgattgtggcatcacaaataaaccttcatcatcatcatcatcagtacaaccgatatatccaaaaacgttaaatcacatagcaattagcgtatccgatctagattacgctgcaaaatggtataaagaagttctcgggtttaccgtattggcaggaccggtagagtttatactcgatgattctcaagtgggcattgcattgaaagatattcatggccctgacctaaaaaagatgagaatgatttggatgagttcaggtaatcagataggatttgaaattattgaatatttggagccaaaggccgttagacgtcaagagaattttgagtattggaaatcaggaattacccacatttgcattactgatccaaatatcgaagatttatgccacaagatttcagaaaccggtggaaagcagagaagccgggtgtgggaaattgttccaacaaaaggaaacaaaatagcattttgcgaagatccatttggaaatatcatagagatttatagtaatggttatgaacaaaccgtaacttctgttgtgtaggctgggaactatagtactattaattcttcttctgcttttctgatatctgaaaacaataattatagtaaattcgtaccttgtgaaatgtcttgggtcgatcttagcctataacaagactgctctattttatagaaaaaattaactgcaatacataatattcagctttgatcagtcgttttaaacttgattttctagatgactaatagaatatttacctttgatatgttactaatattaatgatgatttattatttagaataaacatgtactcggctttcttaaataaataattattatagattattaggtggcaataaaggctaataatgatactttgttggtgagcttggaattgttctatctaaagcctttttttgatttaattttgttgtaaaatgatcaaatacaaaagagaagcaaaataaaagaatttgtaatataaatagaggtacgatattgcaaagttaccagaattaattagagatagttatatcacctatatgtattggcttcaccagcagttgtagtaatattagatatattggtaccttcattcaatgtggtattgccttctaatagaggctctaaagtggtctgtgtttgattattatcagtagattgtgccattgctgggatcagaattccacctaacatactgaaagatataatgatgcctaatatagtacaaatattcaaaatcttcataaaattatacgataaacatattatataacgtacatacttgaattatctccaattccttagtcctcatttgttaatgaataattgagcttacaaattccgaattatatttgataaaatctgaggtttagcataattctgccttcatctaataatgaaaatccacaatttatattttaagtatatttttatattccatgtccttaaaacatgcttgttttgcaaatgaatgcatttgaaacctaaccattatttcttgtcccatattttagcacctattgggttgtaaaggattatgtgtaagatatgatagactagggggaggaaaagaatctgtttatgctttggggtataaacgctcttcaggatgcagtttatatataaaattcagcgggactcgctatccatgttgcaattatcctttgcgaaccaaaaagagggattaacaaagtcaaagtttacctttgtaaacaaaacaaacaaagcatattattatataacacgaaaaattcttttggatgcatgacagtggtagttcaagttcgggcgaatccaaaaaaactgcaaccatgacatttagaatcgacgaaaatgtattaaatgtcttgaggacagaatcggataggaatcaaatcacattaaatagtttagtaaatcagctcctcaaacgctatgttaactgggatatgtttgaaccaaaagtgggtatgataccaatagcaaagccaattgtagttgaattatttaaaaagatgagtaaagaggagatatcgagcatggctgtgaatattggtaaggatgttgttcatgatatcgccctatttatgaagaaccgtatggatcttgaatcatttctttcatggtttgaaacaaggatggctagttcattgacagaaactaatcacacggtgcaagctggttatcatatctacgttttaaagcatgaactgggagaaaattggtcactatatcataaaattatcttagaatcaatgttcaatgaaatattcaatatgactataaatattacgataagcagtacaacaattagattcaagttcagaatctaaatttccaaaacagctaaataatttgctgttttctcctatgcagaaaaatatcctccatgtgtctctgtagttctcacaataccgctaattgttccatctttattactatttccagggaatttagagaatatacgcaaaataatgaactgtcttcaaattcaaatccgataatgacattctagcatagtgaaactgattgaaatttgagatatttacgatatgtatattttagggtagagaatgtgtatttatggagtaatatattttaatttcaatcattcttttgctacataataataatttgatataaagtatacgttaccaaactctacaacattattatataacttttttactaataaattttctataaatgtctttatatagttttttatatagaatatagagatgaataacaaatcatttgcaaataaagctataattacgtcaacagcactagcaatctcattcatacttttgatggggcctacgtctatgaccatgaatacctttgctacaactaacacagccaaccaaggtatcggccaatcacaggcttcaacccaattaggaatttgtatctcaggcgacggaactctattttcatgtaataatctaagcttccaaaaccaagagaacgaaggaaacaatgcagcagcacaaagtggaggagatgatgataacggtggcaacagtgccaaccaaggtatcggtcaatcacaagaatcagaacaaagtgcattatgcgtttctggtgaaggaacattcctatcatgtaacaatgtaaacgtacaaaaccaagagaacgaaggaaacaacgcattaactcaacaaagcggtagtaacggctataactataatggtggcaacagtgccaaccaagctattggccagtcacaatcttcaattcaaagcagtaccgtagtctctggtgatgactcgatactatcaggtaacaacgtaaatgtacaaaaccaagagaacgaaggaaacaacgcattagcccaacaaagtggaggaaatggtaatggtgatgattatgaccatgataagaaggataagaaatcaaaccacaatgaggataacgacggcaacagctccaaccaaggcatcagccaatcccaggactctgatcaaagcagtaccgtagtctctggtgatgactcagtaggttcaggtaacaacgtaaacgtacaaaaccaagagaacgaaggaaacaacgcagcagcacaacaagattaactactaaaataacttccttttttattttttcttctttgattttttaagaaattatcattttaaagaaacgattctatatatctatgccattactatgccatttctagcgaattttatgattgtcagcaagaatcagatggaaaataactttaactattattattaaaaaacaaatgtttgactataaaaaaagatgatctatagatctctttcattgtcgtgcatttcaatgatctgtctcattaccaaattggtataaagtcctgataacataatcggcaaaaccactgcagatgtgcaatcaattctgataaacaattctaatttcttagtctagttttcaaagcccaattgattttagaaagagagggttgttcttttagctcctatataatcgaagaaatattcatcctttattgtgaagcatttgtatatgatggttaagctatcatatttaagataatttgaattacaaatggttagcattaagtaatacaactattggtaccctcatggcatctcttgatagaaatatagtaataatagctcttccttcaattgccaacgaattacatacatctcttattacactggtctggattgcaattgggtactgggtaataactgcttcaatgctattgacatttggaagactagctgatatgtttggccgagtcaaattatataatctaggatttgctttgtttacaattggttccgggctttgttgcgtatctcagacaggagaacaattgattgtttttcgaattatccaggcatttggagcagcttttattttttcaaatagctctgccatcctatcggactcattcccagaatcagagaggggaaaggctttggggataaaccaaatatctattgtagtgggatcagtcatgggcttagtgatcggtggggctttaacctcatattttgggtggaggtctatattctggataaatattcctataggaatatttgctacactatgggcattctcaaaactaaaagaactgggaacaataaaaaaagaaaaaattgactggctaggaaatttgttatttgctggaggattgatagtcctattaattggaatcactttcgggtcctttcatcttttaaatattttcgaaactatcttgtttatactggccggattctctttgttaatactattttataaaaatgagaaaaaagttagttttcccatgatggatcttaccttatttagacttagacttttcaccagtagtaatattgcaattttcttaaactcacttgcacgtggagcatttacttttgtgatggtattttacctccaaggacccaccatgcgcttaagcccattagactcgggaatttatttaattccagtctccctcgcattagctatagttgctcctataactggctggttttttgataaatataggtttcaaattatctctcaagcaggattgatagtttctgcaatagggtttgtattgttaactgccatgggcacaacgatttcatacgtagatgcaatactgccacttgcgctcataggggcaggaatgggtatatttacatcgcctaatagagccactataatgaattcggtaccatcaaataggagaggggttgcggccggtatcggtactactttggttatgactggaagtgcgtttagtataggattggtatttttgatattttctgctctactgccgtccgagtctgtcggcgttatcttttcaggttcgactgaccacacaagtcttaattcaattcaattcaataataccaacctagacgggtttattttgtcaattcatgtaatattcataatttctgctttattgatgatatcttcagtactgattcagcgtaaaatgaattaatttaaatttaacaaaatatcattttttgtttaattcggttttgaatggatattacctaatacaattgtattattattttgatagcgattagtggtaaattatccattaatagaacccactatactatttatattagacatcgtccataaatctatctagtggtaagaaagttatcatcaaatacaaatgagaattctttagtctatttgttaaaacccttttgcttttctgatgcgccggttattttccacgggttatcattgaaggaggagttttctaaataataccatttgattatgagaatgaaaatataatcataaacgcagttgaaaaggttaacaaagatgtagtaaacatagccagcgtaagaatggtcaaggatcaactattacgaatttttcctgttgaaggtgttggatctggggtaataattgataagaagggatacatattgacaaataatcatgtcatcgagaaggcaaacaagttaaaagttacaaccacggacggaaatatttatgacggaacagtaataggaacggaccctctcactgatttagctataatcaagatcgaatccaaagatgcgttatcttacgcggaattaggcaattcggaagaattgaaaatagggcaaatagtaattgcaattgggaatccttttggtttggatgggggtccatctgttaccgcagggatcataagctctttaagcagaaaattacagtttgatagaggtatcatggagcttgttcaaactgatgcatcgatcaatcctggtaattctggaggcccacttataaatacaaaaggccaagtaattggaataaatactgcaaaaatgccatacgcgcaaggcataggatttgcagtgcccataaacgttgcaaagttgataataaatgatttaataatgaacggccgcgttaccaacagaccctggataggcatttccacaataaagattacgagtgaattggcaaattcttatggactaccaaccaacgagggctccttaattgctgaagtacaaagagatggtccagcttacatcgccgatttgcgtaaaggagacatcattgaatcggtggatgggataaaaataactgatccatatcagatttctcatcatatacgaaagaggaacattaaagaccaaataattatccaaatcaatagatatggaaaaaaaatggataaggaaatccaattaatgcctcatccaacaaacctcaattaaatagtcccaaaaagaagattttttggtttgacatccgcaagactaggctatttcatttttttcaatacctttattcttgttttattttattctgtcaataaatttgcgtgatactaatatgagtatctattctaaataaatttactagattgttatggaactatataatatgctcttcaagataatgcataggaattgtcttatttattcctcatttaacattttttgtataccctgacccatgtcttctaaaaatgctatttgagataaatgctttctctccctaggttttgtatttttaactttgaatttttctggtaaactatcattcgtaccttgatatcctatggctatcatgatcccaacttcataatcgtcaggtatcttgaatatctcttttgctaattttacattaaatccacccatctcgtgcataattagaccttgattaaaacattccagaaacatattttcatttgcagcaccaaggtcatgaaaataaagtctatttggctctagactatccgtataggtcttttttgtgatagaacatatcaagataggtgcttgttttgcaaaggaatttgattcttgcagaactgattgagcctcaaataatctactgggattgtcacttgtaaaaataatataacgccagggttgttcgtttctcgaagatggtgtccaccttgctgcctctagtatcgaaaatagctttgttttctcaacccttctagtcgtaaatgctcgagcactccacctttttcttaaaaggtcatgaataggatggtcagtcaccgcatgattatctataatgctattctccaaattgaatcaataaataatccataaatcattaattaaagttcttaaaaggctaaacagtttgaagggtactgtgattatatattaaaaaattccatgaccaaattattcagtatcattttctagaaattgtggatttccttctcttattgtttgttaattttctaacttgttgtccatcttcctcgatttcttgatcagctggttggtttcttatgcttagttttgcgacacggggggtagccatagcaaattgaatatggaaacatgcagatgattgacagagtgaacaatgtaacttttcgtcattaaaatggatttccgtagtcttattttctttatagtctttgatgtagagcgtatctctggtgcatccctcctctgacaagaaaggagcatagtgtttcaaaaattcatctttttctagtatttcatgtagtaactcgtttacaaatcctccaaagtgttcatttatatagggatttctctctcgttcccttttccatttacttcttaactcttttacaatgttaactctgagcgtaattaattcagcggaatttgatctcggcatccttctagtcatcttaggctaaagtgatatataactttaataatcaatggagtacagtagatatgctactttatgcagtgtaacatgagctaggtcttttccatttctcctttcccttccccatttctccttcgcatcagcgtgacaaaacagagaaaattaaataactagtgattcccttgttattaatgtataataaactcgttctttttgtttttattccattatcattattgctattattgataggaacaatgatctttcaacatgattatgtcaaagcacaatcgaattcggcgcaaaaaacatttaccgatccaaattaccaatacaatcttacatatccattagactgggaaatagctccaagaaattccaccttcccatattatggagaaactacagcactagttctacgaccagtaatggatgaacatgtcactccattaaatgaaatattttttagcatttctattagtaatgtaaagagatcgctagtagacagtcagttattaccatcaggattcttggataaattagtctctgataagattagttcttttcatgatcaatcatcaatctatggaaatttgaatgtaaagctacttggaaataactacactagacttgctgatcagcctgccaaagaattgacattcctaccccaaaatatcgggacctttgaagtggatacttacacaatctataataaccaattgtatcatttcaatttcattagtccagagtcaaatgcatcggaaatgtacgaggagtttcaacaaattaaagaatcttttagattcatgtaataggattctatccatgatcctgctattctacctttagtcagctactcatgttctttatcagattatgaaagtcttcatctgataccttgttttttatttccataatctgttccacatctttacctgctagatatctcaactttggattggagtcgtttatggcatccagtacaaccttagcaacattttcgggcctctcgccagtctgaattaattttttcattcccttatccatattattcataaattgaaagtaaggagaattaggatctgtagatttttgtgctagtaccgcggctttaataaagttggtcttgattattccaggctctacaagtacagtcctaatcccaaatggttcgagctcatacgatatagattcagttaatccctccatagcaaattttgaactcacataggctgaactagttgcaatgccaaaacggccaagaccagaacttatattgacaattattccagatctctgctttctcataatgggtaacactgcctgtgtggctcgtatcaatccaaaaaaattagtgtcaaattgtaatctaatctcatccatcaaaagatcttcgaaagctccactcaaaccatatcctgcgttattaaccaagacattgatttgatgggactgattttctatgatttcaatagcttgtttaaccgacatatcatttgtgacgtcaagttgaatacatctcaaaggaatgttttcttcatcggcgatagatttcagcgttgaacttttctttaaatccctcatcgttgcgtaggtaatgaatccatgtcttgctaacatcaaagatgtttcaaaacctattccacttgaacttccagtcacaattgcaactctcttctcactcataattttatgtaaaaatgtcaaattaataagctattcagatacaagtaagttgattgattcaaagcttaatttcacattgcgggctatattattaaccctattttgttgcattcatgttggatatgcgccccataatatagatagattttattttaacatcaacttgcctgatcctaaacattgcagatattcaacaaatcactctgaattccaaattgatttatttattatttttttgtctcaggatttactcaacaagtaatttattttcaattctttatctggttttaatatggatatcaattaatagtaaatggatgaagggataataaggtttttatgatatcaaaaaaagatgatttctctactactttttcagtaagagtagatcaatttaaaaacatcacgtctaagtaatatttcaaagacatcgattgaagtctatattgaagtaataaaatcaatcaattttggaactattgcaaggcactgttatgatgaccaacaacagtgccttctttgataattatacaacactggcatccagaatttagacaactctttgatttcttatgattacagatagaacacatacatatcttagctagattctgcttttgatctcatgttcttgaatgaaggatatctactaaacaacgtcattagtattcctaatataataacgatagtgcctgggagaaaagttctagatatcataagaaatatacctaaccccatcatacataggcttccaatcaataaaatattcatgaatttcacactccaataatgtatatcatacattctctcttaattggtgatctcattttcaggatttaccttcttttttctaatttttctgattttttcaagaatctccgctagctgatcttctgaaatttttgatatccttgaatcacattcaataccttctgcatccaagacttgttcagtgatatccacaatttcgttcttatgtgttatttcctcttcggttaacatgttcaaacttgcaaatctgaaaaaggcaaaatcgctcatgaaagaatactatgcgtagtactagttatatttatagactagaaaatgaatttacaagtgaggaacctatacaaattgtgcttatgcttaagcccagcaaaattaatatagaatttgtctagagtttcccactctttcaaaatgtttatttatttcgagaatttcaatttagattgagagtagaataagatggctgataaaatcaaatgttatcatattttggtaaagaagcaaagcgaagcattgtcgctattagaaaaattgaaaaaaggggaaggcttttcaaacctggctaaggagttttctattgacaaaggaagtggcaaaaaaggaggcgacctgggcttctttggaaaagggatgatggtcaaaccttttgaagaggcggcattcaagctaaaaaagggagaagttacgtctgagcctgtaaagaccgaatttgggtatcatattattaagcggtctggataatagtaaaagagaattacggtttgtgtctatttcgatcagtgtaagacaaatttgtaccgattgggaagtcttttaaaattctgattttataatcaaatcatgattttttttaaattgtaactgaatattactacctatcttggctgacttgccaatttaacttattttttgaacatttttctaaacaaataaaaaatagatacaaggttttattttttttcaatctaattgttgaattctaaataatttaaagaatttttcagtcatagaatgcaatatagttgaatttaaccttctgaatgtgcgaattgatatgaaccagaccaggtcaaacatcaaccttcaaatcagtacaatgctttgaaaatgataaacgagaaataccaacaaaaatttaatctgttcaacagaaaacattcgtattttacaatggaattaagtacatagaaaaatgttattatagtgactttagctcatcagcggcatcaactgttacagaactcgttatacacatcttgtaatcgtttcttgtttttattgtagtcagctaaattctgatttaggctgagatatggtcctccaaatgctaaaagagttttcttactttcagatttccatcttaggttcggaaggatatgttttcattttatctttaaaaaagtgattatttgcattatgacagcagtcctgctttgacagcaattttacacgggaacacgagtacacttgctatctagcagggatcataatgcaaacagaatttataatacatcgggtaatataaactgaaatattatccattaattaagagtaaattttgtcggatttgtattgattcaatccttaaacatgatcgctttagtatgggcaagtcctaacaacataaatactagtaaaagaaatgccaatcataatatccaaagattagatttttacatcttttacgtacaaatcttaaggttttgtatggagctaggaaaagaaagccccaggataagattcatgactctgatatactctttggatcctgtctgcgaaaagcattttatgctcgtactgttaaagactatgaattaactatagaagacattgacaattttgtgaagggcgagtcctctgaatatgttcttgtacggcttgcagacgtcggtataagtcaaatggaattattatttgaagatgatctaatagcaaggcctgatctgatgacaggttctcagtctcataggacggaatctcaagacgccgtttccacaaaaaaggttaatgaggctgaaatcatcgttgaattcaaagatacaaagagctttgagaggttaaaaccagatagcaagcagtttaaatcctatttccgtcaactattgtattatttggttattgctgaatatgataccgcgatactttgtattcgttatgcaaacaaccgaagaatggtctggataaaacgagacagtggtggggattaattcttttctcctaaagcaactgaccaagatggagaaggcactttggctgaaatcgagtcttggaccgtactattagaaaaaggatctcctatccgtgatattttaaaagaagaaattcgaaagagtttctttgctaaaatctgcgcttgatgccaatagcgacattcagctgccaaaggtagctgaagaatagaaatgtataaaatgtccatttaaacaaacttgtaatccctcaagtgtaactaagcaagattctgaaatagactttttagatgaagatgaattgatagtaacaatagaatccaattagtttaaaagttatttaagggcgtacattaggaaacaatattcctaacagtcggattaagtacctgagagtatattgtatctaagaattctctcatgcacgaaaattcaaagattttctgcattaatatacttgtgaaactttataaattcatctgagaatctcatatgcttattttactcaaatctagcaaatcctcttaaatgcccataccaatctcccgctcgttcttgtaaagttaaattgatattttggataataaattttctcggccaacgattttgtcgtcttaaatatgagaagtttgatttgtttatctttgtttattgattggaccaggccgatacaaaatagcattatgtattttccaattccatagcatctgtattgtttatcgatacctattttctttatcaagagtgcacaggtaggtctttgataaaatgcttcgttcttccctcttacttcgcgttgaggaataaattcaggttccttcatatgcaacctaatcagatgaatagaaaaaaaacctatccaattgtcaaagtactttattacgtattttacctcatcagtatcagatttgccacttaagatataattctcataatactcttgaactgctagcgggtcctcaccatttgtttgtctgaaatctatgcggggtagttgatgttcctttggattaaaaatcttaaattttaatccatctggatcaaactgagtcgtctgagtcatgcctatgtttttcataaaacgcagatgcttcggttaagaattcttgttctttggcattaattttatcatttaaatattcactaatttggtgatattcaccacattctaggaaaatatcagattgtaaagtaaacaattttgtcataattatatatcaataaagcactattaaaatatcgttgatcggggttttggcgcgaattcgatgaataaatgccgtctgtttgagagtatgataataaaatattatgaaattattcattattccatagaaacaatatttttgatatgattttatattaaaaaaaatattcagatgcttcggattatactagtgttaaataaggtccatcccgtctgaaaaagtacagttccagtattattagacttgtattttttattgctagcttatactgtttcgtatcgatttagacaagttctcttgattaaatatacctaaagggatgtgtttaaaaaccatagtgaaaagtaatatatgtactaagtatgagtcaacaccaaaccgatattagtcaacctcctatcaagaatctttttgaagacaagaacctggcgtttgttgctactataatgaaaaatggatttccacagataacccctacttggatcgatatacaaggtaatgagattttcatcaataccgctctaggtagagtaaaacagaagaatgtagcaagagacccaagaatagctatctccctagtagatcgcaataatccttatcatatggtaaccttgaggggagaagtcattgaccaaatagccggtgaagaagctgacagacatatagacaaaatggcaaaaaaatatctagacaaagacaaatatccattcagagcgccaggtgagaaaagagtcattctaaaggtaaaacctttacgagtagcgtatatataaaaatcagtctaagatgattatccgtaactgttatcaagtcagtaacttggttttaagggccatcaaaatagtatccctaaagatcagattttgattgaagcctttgattattttttaactgtacggttaaaaatacattggaatacggctatgatagagatgtttttcatatcgctcatgaataaaaatgatttttcaataagttagaaatatcaaagtaaaattctatttcgaaattttaattttaatggtattaaattttttagatctcgaataggatgatattttgatttagatgggcaatcattgctgtctagtttctgagtttttctgccaaattcacctttacttgcggccattcttcattaataatactatagcatgccgtatctcttatcctcccatttctcattatcttgtgatttcgcaaaattccgtcttgctttgcacctagtctctcaattgcttttcttgatacttggtttagcgcatctgttctaatttctactgcaatgcaatttagcttttcaaatgcatgttctaacattaaaaacttagcctcggtatttacaggggacctccgataagattttgatatccatgtgtgccctatttctactctgtaattttggtgatcaatatttaaaaatctagtggtcccaactatgattttcaaatgcttgtcgactataatgaaaggtaaactagtactatcatgttttatcaagttctgtaaataaatggacatttcttcaatacttgggaatgatgcgaatgggtttttccaaatttctccatcaactgctgcattacataagccattcaaatcatcgagtatgggcgaacgcagtactatatgactgtgctccatcgttatatcatggatgtcaagcatgtatcaaacatagtaatagaccattactgcttaattaaatcgaatgtttctttatatgctgattcattttataaaacgttaacactttgtagttgtcgaatctccgtccggatacattataatactcgatgatgctttgtggcggaaacacgcataactaccgaatacaatcagtgtgtttaatgaatggataatgcattaaataattaaatatgctgtgcttattattgtggatcatgatgatgatgaataaataaaggatttacactttattcaacagggagataaaaaccgtaaacgaattctatgacgttatctatgtctctgaaaggtaaaaaggatgttgcaggtaatgccaaagctgaaataaatgttaatagagttaccattttatctcgtaatatctaagtaggtctgacctgatgctatattatactgattttcttaaaacgatgataatcaaatatggcactagtcgttgaaacttttgtaacggagatattgatacttcttacattattttgtcaagaagagaattcaatatactattgattactagaaccgcattcatcgttcacattctgtcaactatttattttgtagttgacagaaatgtttgcaaaatcatatcaatttccgcaggatactgatccattactgcatgaccagcatcttttatctgtacaagccaggcccctggaactttgcttgcaatgactaaagcatttgcatgtgggacatagagattatcgtctgttccggctatgaccaatgtgggtttggctattttagcaagctcgttacaagcgccattccagtcggttgactcccaagcaaatccggcgtccttctggttgttcaatgcttcaggtgaaagacctggcttcatttgttggaatgtaaagttttctggaatgtcaacagattcaggatgcaattttatccatcccgcccctaaggaggcagttacaagtgcttttaattcatcctcagaaatagattcattgtttagagatttatctgccatttcggacatcgatttcataaactcggctggtttaggtattccatctttaccaccacaggttgaagcaacaagtataatgctattgaccttctcaggatacataactgcaaattgctgggttacaaatgaacccagagaatatccaaaaatgtttgcctgtggtattttcaaagcatccaataaaccagccgtatcatttgcgagtaactgtatagaatatggctcggaaccatctgttgtatttccaactccgcgactatcaaacactattactgtgttatttgaagagataggagttagaaaggacggatcccaagcatccatgttatcggaagcaccattgtgaagaattatcgggtcacctttaccgaatattttgtatgcaatatcgatatctccaacatggactttttctaatggaatatcctgtatattcactaaattggtattattgcttgaattggcttgatcagaacctgcttgaccacgcactacattagtaacgccactataaccatagttactaattattgaacttgagagaattagagtatacgcgactactattatgaaaagataatcttttcttaactgtcttttatcatacacaacgccattcagtcgtcatagtataaaaacaggctcgaatcttacatgaggttttgagggttcaaatttcgcacctcgcactttattatgcataaaactaactgtttgttggtatatggctgaagataaaaagagggtaaatggactatgttttttatgattcattaggagtatattggctgcttgactctggggtaactccttcagtgacattctcctctgcatttaaacgaaattttacctattatatgtacgagaaaatccatagaaacagtattatatttattactttacaatctacgtaattgggatagagaagagtgacgatagagctatcagtgggtgcaataataagatatcaatctgttgaatttaatagagatcattcggaatttctacttttgagaaataaacggggattttggggttttccccaaggccacaaggaaagaggcgagaatgaaattcagacattgcagagagaggtacaggaagaaaccgggatcgtcgatttagatatacaccaatacatcggcaaaattcaatataaatactttagagcggatggaattcgatcagagaaggaagtaaaattttattttgcaactactccaattagagaagtcacaatatcaaatgaacacgaaggtttcaaatggactacttatcaagatgcgctttcacttttagatcaccgtcaactgaaatccataatactaaaaggcagaagaagaggcctttattaacacggatgcttctaaagttactgtcctactccgcatactctaaatgctatgaaaataattttatacctacgttttattaatagaagcggatatagattaaaaaatggttgctggtaaaagaatagtactaactgccgatcgtagtttgatgaccaattatagaggtaattttctctatgggtttattgcatgtggcccatatgagcttgtccctgaatttgtttttgataaacttttttgtcctagtgttgaaactgataagaatactggcgaaatcaaagttgcccaatgtggtttacgtcgtatcgaaagtgcattaatacgagagtatgataaaagtgaggtattcctagcacatccggaaatgttggagaagtgtattggaccacaaaccaaggttgttggaataaatgtcatggatccgttgggaatggctccggttactactactatgtcccctgaaaaattatcttatgtggcaatgaaatttaaaaaaatgtgtgcttcaatcattcagttaaaaaagaaatatgattttaaagttgtcgttggaggtaatgggtcttgggaattagctaaacctgagaggatgaagattcatggaattgacaccgttgtgataggtgaggctgatgaattagctttagatttgttccatgacctggaagctggggacgcacccgaactcctgcatacttttgtacgcaatatagagaatattcctgttatacgtggtccaacgattaactcattaattgaagccatgagaggttgtggacgaggttgtgatttttgtgacgtcaataagagatctaagaaggatattccattagaaagattacaggaggaggcgaaaataaacttgcaatatggtttcgattctatctggctgcaatcagatgaaatgcttctttatggctgtgataacaaagattttataccaaatcaggatgcaattttgggtgtttggaagggcctgaaatcggtaggagtaattttgtgggtaccactcacatgacattgtctgccgttgcttcctctccagatttgataaaaagtatatcacaggtaaatgatatggaaaataatggtcgttggcttgccactaacttgggagttgaaactgtcgctccacgaatggtaaaaaaacatcttggagtaaaaacgaggccttttcaaccagaagaatggggagcagttgtaagagagggatgcaaaatattaaatcaaaatcattggttccccgcactaacactgataattggatggcccgatgaaacacctgatgagactcaatacactattgatttgatccaggatttcagacaaatgcgtatgagaggattagtcgccccattgctatatcaggatttctctgagaaaaattcaatgcactttggaaatttgaatgaatcacaatttgcgcttttctggacctgctggcaacacaatcttagggttataagcgatattatacctataattattcgtaacaagtcgtacggacctgctatgaaagtgttcatggcaatgttaataaagtttggaacgtgggccattatgaaatacttgcgtggcctctctaagggattatttgaaggaaaacctgctgaagatattgttgcaaaatatgtaaggccgcgttctgtgaccgctccaatgcctccaaaattatgaaatagagcgaatctattttagaattttagttacatgttttgtttccagctcaattgagcgagaatatttgatgtttttccaagatttattcttggaaaaaaagacaaactattgtattgaactaatttgacttaatgctacatcagcaatggtgtccctcttaggagtgatgacaataaaataattcttgtcagctctctccataacattgactaatttatgtttttttgcagagatatcaaattcgtacattccgcgttcaagattccccttagtataaatcatcagtagtgtctctcctgataacggggtaatagggaccatcgaaaatacatatcctttgtaagaactaattggaaggatttgtttcatatagggcgctacagaaaccaaataaatcaaaacatcttcgatagtttcgaattcttcaaattcaaatttcatttaaattaactatttgaaagtaggttaaataaactttataacaaaaagaggtttatccgtacgattcaaatttaacatcaaatgtgccgtcttttctcttgttcctttcggttacaaaaccctttggtacaagtgaatctagtactccatctacagttccctgccatccgcacacataaaatgatgtattttgaggagtaattttctcgcctacaagttcttccaatggggatttatcattacctggcattggacgtaggaaagtttccactctccccttgtgcccattccaggacctattgaaccattcttgaggtctgcttatactagctcgatatctgaaattccatgcattatcacctttatccaaactctcctcctccagctcggttaataattctctataacttagctcatcgacatagcttgcaccgtgaaggacaatgatttgtcttttagtccctttggattttaggtgcagagaatatgatatgaatggggccaaacctgttccacccccaattaaaactagtcttctgttatctggaccgccgtcaggcattttttcattaattgtaaaaatgccagtaggtttgacccaattaatttcgtcaccttcttttttatcaaataattgagttgtaagccttccgggtagtggttttttaacccaccgtactataagttcaaagtattttttttgttcgggaggtgaggcaatagaatatgctcttcttatcactttaccttcatttggaacattcaaacccaaggtaacaaactgaccaggtttaaagtctggaacttggccatcgtttggtttaacatgaaaaatcgcaaggtcttcctttaaaaccctaatatatgaaactgttgccttattgtctactaccataatattctctgttttaagccaagttagttaaatattttgttttcataatttttattaactaataagtgttttaattatcggactggaaattacgagatctcataacgattttgtcatgacgaatcattattaaatgaaccctacacaaaactggaggagacctggatgatactcttaacagatgatttggtctagttgaactttttaataatagtatagtaaggagatcctttgtgtctttcgatacatttttgacaaatcgatttatcaccgtatttcttatgacagggacaatcgcaaaccaaattcatgttggatcccaaataatactctatgagaaattgacgaaacatataaatcgttatataatatattacgaaattctaaaagtcaagaggtgttcgattaaccatctcatgagtaccaatggtcctcaagtgaatctacataccgcttatgatatcaacattctgagaattgatgagagtgtctttttcatcttttaccgataaacatccgaatttctatatagtataaagtataatctaaatacgactgaaattttgaccgaatccatgcactcacttgttacaaattcaattatttcttcaacatcttgcaagaagtttttggcttctgatggtatctcatctaactatctgttactgaaggatccatcaggaaaagtattgcttaattgcaaggatgtgaatgctctgaaaggtaaaatagacggagtaggcgtttcttttgctataactaagaatttagacgagtatcagtttcttgtatgtaaatacattcccacattacctgatcatgatgtgtttaagttgaaatttcaaaagatgcgtttgcttattatcctgttcataaataagatggtcaaaatactacttcaacctaaaataaactcgaaggtcttggctgacttaaatagacacggtaatgctatcttgttagaggtttctgaattaactcaagagtatcgtgaaagagacaaagacgacaacgtcagttattgtttcaacagtaaaaatgcagataaaataaatctcaaaatggactattttatccaatatgaggcaaccgaaatccaaattaatcggattcttttatcaatttatggttttgatacaacagcatctgcagttgaatgaaagtgttattcctcgctaaaaaattctaggacttctctactatgacctttaggtttaacgcttgaatatattttggcaattttaccagtttgatcaacaagaaaggttgaccttgtaataccatagtactccttacccatgaattttttgaggccgtatacaccgtaacccttcgaaatttcattattaggatcagctgctagcatatacggaatattcattttcgatctgaattttatatgagaatcctccgaatccggacttattccgataacctcgatcccttgttgttcaaacagatcatagtctctagtgaattcctcggcctctacggtacaaccaggtgtaaaatcttttggataaaagtaaataactattttcttttgatttagtagatttgacaacttgaatttttcacctttagagttttgaaactcaaaatcgaagggtttgtggccctctctgacttccattacatcatggccttcttgatttgtcatattgtaatgttcacatactcaaagatacatgtttgttttcatcttgtcttaccttttgctcaacaggcatctataactaaaatctctgactgtcattatgctctaaccaaatacaaatgtataaaaataaaaattatctgtagtaggtagtatttctaatatatgactttcaggatttgatgtcttaactatattcatgatatgtggccatgtgatttcgaaaaaactggaactactatccttttttgtatgatatcctaattgttgatcagttaaaaattgaccatcaagcttgatatttgcaaatgcaggctttttgtctatacttgcaactattacattcacattcgaagccatattgtatttgaagatgattgctggctgcttctctttatggtcaaatgatgcctttataccctctctattccatttccatttgcctcttaaatatacggtattatccaacacggttacaggtccattaaacacgttatattcatcaattttagctttctgattattaccaaaccttgtaagacgggagtaaccaacacagatctcaggggccataccggtaaagtgcattccatatattttggtcacctcatttttttccttgttattttcattgaataaatcatcctgtgaatctgataattttcccttttgctgtaccaacggtgcgtccgagtatggaagatcgagcaaatcgttcaatgcctctttaaaatcatcaaatgtcccataacctggatgttcgtatctaacaaacccgtctctgtcaatcagaatgtgcttgggccagtatgaatttccatatacctcccaagtcttattgttggtatcatatccagttatatattcatttaattctaactcttttaatgccctttcaacattagtgatatttttggcaaaatcgtactcagcggaatgaattccaacaacaaccaaacctttgtccgagtattcctctttaatcttctttatcgttgggatggttcttaagcaaaaaatacaagtatatgtccagaaatccaaaagtactaccttaccctttaattcttttatactatgattggaattatcgttccaattgttgatatctttaaactcaggtgctgatatagcaggtataatgtccatctaatgactattttctgtccatgtaatttatgtctgtattctagccgcttataggatcttgttaaagagtcatatcagatgcgggagatgggatttgaacccacgaacccctaagggataaggccctcaaccttacgcctttggccaagctgggcgactcccgctttgaccttttattataggaaggataatttgaatattcccaataatattataacgtgattttgaatgatttttattatggagttcatttttttataccatgcttgttccagtaagatgctttacatgtggaaaactaatagctaatatctataatgaatatttaacccggttaaaacagggagaagaaccgaataaaattatggattctttaaaaattacaagatattgttgtagaaggatgtttgtctcgagtgtagagaccatatatcaagtcattccatattatgaatctctgcggaaacgaagggcggagatacaatctgagatggaatgatagacattgcctaaaatcacttcgattgaggaaaggttagtttttaacagccgaggcgataaatccatcgaaattgatgttaagtctgacaacaaatttcagggaagggcttgtgctccctccggtgctagcgtcggaatgtatgaggcacaaagctttgttcaaaatgatccagagcaaaccctcaaaaattttagaaatataaagaataaatttattggaattgacagcacagatctcaaaaatttacacgatgtaatcaaaacagtagatccctctgataattattctaatattggcggagcagtagcttacgctcttactatagccactgtggagtcagctgccagagccatgaatattccattttacaaagtcttgaatcctcaaatggataggattagtttcccctatcctctcgggaatgtattgggaggtggtgctcatgctgggcccggaactcctgacttgcaggaatttttgatatgtcctatcaaatcgaaatctatctttgaagcaatctctttgaattcgcagattcacaaggaggtaaaaaaaagtatcgaaaaaatcgacagtaaatttacgtatggaaaaggagatgaaggtggctgggcgcctgctattgtgaatgatcgcgccattgaactagttgaaaacgcaatcattaactgtggatatgatccaaagaaagaagttagaatgggtgtagatttcgcaagctcttccttatgggataaccacaagaaagtatatgattaccgacgtgagggcatcattagaacaacagaggagcagatagactatactaacaaattaatccgtgattacaacctcgtttatgcggaagatccgttacatgaagaggattttgagaacatgtcggttattactagggataaccctggatgcttcattacaggtgatgatttgcttgttacaaacacaaatagagttaggattgcggctgaaattaaggcatgttctggagcaattttgaaggtaaatcaagcaggcaccttatatgatgccatgttatttgcagaagaatgtaacaagagtaatatcaaaatcattacctcccatcgatcgggtgaatcggttgatagtcatatttctcatatttcaatcgctacaaattcaataatgataaaaactggaatagtaggcggtgaaaggatttccaaattaaatgaattattaagagtgtcagagtatggtttaatagaaggaatggctaaatggagcagtatataatgaatatgaatactgaagaattggattctattgataattctaataatgaacaacttgataaaacagttaatgatgatccttccaaaactgaggacgaagattcaacgaatactactgttaatacagaagaaacttctgaaagttctaatcaaattgaacaatcaaccataggcaatgaggaatctagcagcagcaacagcatgtctgaaatggcagaacaatcagaatcattggaagatcctaataatttagagaaaatgatattatcaaccggaatcagagtgggaactccaattaaaactaaatttatgacatcattcataactcgtgctaatccagaagggttatacatacttgatattagtaaaacccttgcccgaattgatgttgccgctaaatttattggtagaactaatattgccaatgttgcagtcacatctgcaagggaatacggaaaaacaccaatcgaaaaattttgtgaactgacgggtgctcgtggtatatttggaagatttatgcccggaacttttacaaatccttcactaccaaaatatttagaacctgaaatagttatagtcacagatccgcaagccgatgagcaagcggtattagaagcgacaagagctggggtccccgtaatcgctttatcaaatagtgacaatattaccgctaaagtagatttggtaataccatcaaataataggggcaggaaagctcttgccacagtatattggcttttgacaaaagaagtcctcaaaaaacaagggaagataaaatctgactctgaaatgccattaacaatagatgatttcgaggcaaaactagttgaagagttaatctaataaagttttgacacgtgaacataactttagtggcgttttttatcctaaagattatgggaaattgaatgagtcgattcaaaactttttttcacttttaaattcttcccctgaagatagcaaattcttacaaatggtaactgagtatatccaaaataagaagatcctaacattcatagttcctcatggctcatatgattactctggttttgtggctgcatttacttattatctaatagataaaatagaatgccaaaacttcataatattatcttctgatcatcgtggaacaagccctgggatctccctgatggatcatggttattggaacacaccattaggtcaagcacaaattaatgagataatggcagataatttgataaagaaaagtagtaccggctttatacatgtagattcatattcttttgaaatagataatacaattgaaactcagttaccatttattcaagttctgaagaagaataatttcagatttttacctatactccaaagaaagcaggacaaaaacacttgtataaaattggcaaagttattagcaagtatattaccacaagatgagagggttgtattaattgctacaaccaactttactcactacctaggttatgaggaatgctatgccatcgacaaaaaaatgatttcggagattaccaagatggatgtagagtctttttacaatacgttaaaaaactattttcagtatatttgtggatatggttgcgtagctactgctatagaattttcaaaacaattgggaaattttgatgttattttattaaaacatcttacaagcggcgatatcgatggcaataggtcgtctgtggtgggatattcatcgattctaatgctttagcggattcaaggagcagggggaggatgagtttgattgatttcacatgctaaaacttttgaaagacagatagtaacaatagcaccagggaaagtgatcctctttggagagcactttgtggtttatggatatccttcattaattgcatcgataaataggttctttaaagtaaaagtaattttctggccctctacaggcaacgacattcaaattgaatcaaatctaggttttagagccaccgtacgggattcagtacttatcttcccaccagatcaagacaaggcattctacgaaaccatcaggaaattgtacaatgttattaaatatttggtgactagtactacaattcatgtgcaacccagatataatatttttattcatttggactctgaaattccgctaggaggaggacttggatcctcttcagctttttgtgttgcattaacagctgccctttaccatttagtaaataacaaagtagataagaatatgatttgttttgaatctattaacgcggagaaaataatcaatagaaatacttcaggggctgattgtaatatttgcacatttggaggtttgggacaatttgataaatcaaacggttttaaaaggatttcagcggatttcagcgattaccagtttttgataatagatagtggagtctcccatgatacattttctatgatagagaaagtatctaaaatcaaaaataacaatcctaatgcttttagtaacctatgtaatgaatatggaagtatttatgatcaagtttacagcttccttgaggataaagaacttggacagattggtgaacttttaaatagaaaccacgagattctcgcgaaactgtctttgtctaatccaataattgataagatagttaatatttgcaattctgagggctcattgggaacaaaaattacaggggcaggaggtgggggctcggtcttatcgcttatacacaaggaggatcaatcagtacccaaaaaaatactaaaaagattggatttgctaaatttaaaatatttctttgcaaagattgatcctgagggcctaaggattgatttcaaaaattagatacctcatcaaaaatagactacacgactatctagattatcaaatattttttaaatcacacagttaataatatcttgatatttcattaattaaatacatcttgaagagcagtaatttaattattataaagctaggcggatccgtcgttacattcaaagaaaaaccattgaccccaaacttcaatgggattgaaaaaatagtaggggtgttgggtgaaattaataaaaatttcaagattattattgttcatggtgggggatcttttggccactattggtctgtaaaatatgatatgcacaccaaaccatatccgtattcagatctaggtgtatcagtagttcatgaatctatgattaaactaaatcacataattattaataaattcatagagtctaaattaaaaccttattcgattcaaccgtctgcattcgtattcaatagtgtggcagatcctgaaaggatacataatattcttgatatgactactgagaatgatctgatacccattacgtttggagatgtaatttatacctcgggtaataacttttcgatcctttccggggatacaatcatgtccatgctgtgtaaggtgttaaatccaaagttctctattttcaccacaaatgtagatggagtatatagtgatattacgaaaggagaaataattcgagaaattcaagtcgataagatgggaactagcaatattcttttggaaggggtgagaaaaaaaggacactctaattctacttttgatgttactggcggaatgaaacggaaaattactgaatctattcaaattgcaaattcagggcgtccggtatatttgataaacggtttccatccagaaagaatattagatataattcacgatcgtgagtacatcggtacatgtataagaaccagttctgggagttagcaggaaattgaggtattcaaatctctggaagggagttacaaatggatcgcgataatccctccctttcagaaaaacaagttgaaacaattaagaaaagaaaaaaagaagggatagacattcctctaaaggaacaggtccaaggcaaagaaagtacaactcttttggaagatgtttatttgatccacaatgccttgccagaaatcaacttcgaggatataaaattgaataccacttttcttggtaggagcttttctgctcctataattattgattcgatgaccggtggcactgatgaagcattattgattaacaagaggcttggtcaaattgcagagaaatatgggtttgcaatgggacttggaagtcaaagggctgggctgaaaagtgacaagctgattccgagttactctgttgcccgtagtgttgccccaaatgcttacttgattgcaaatataggtggggctcaacttgctgaagggctgtcaaaagacgaagtcaaaaaaatcatacaaatgattgatgcagacgcgttagccatacatttgaacccactacaagaattaattcaacccgagggggagccacgctttaagggtattctacaaaaaataacctcactaagagacaacatagagattcccattatagtcaaagaagtgggctcaggaatttcgcctgaagttgcagtcaggctccaaggcgctggtataagagctattaacgttgcaggatcgggaggcactagctgggctgggatagaaaaaataagagcagataatgtaaagagtgatctaaaatccaatttaggcaacctgttttgggactggggtataccgactgctctctgtgttttattaacttcaaaatatgtagacatccctgtgattgcttcgggtggacttcgaaatggcctagaaatagccaagtgtttgatgcttggagctaaaatgtgtgcaatggcatttcctttcttaaagaaggctgcagagtccgaaaatgaattggacaaatttacacaattgattttagcacagttgagaggtactatgtttttgttaggtacatctaatattgaatctctagttaatacaagatatatattgaaagataaattagcaagtatgttgaatagttatgagttcagaagaaataaaaactgaaatcaattttgttgcttctaaaataaatcaatttattctcaataatatttctggcgaaccttttgttttgtatgcgccttcattgcactatatcaagagtgggggtaagaggctgagaccgtttatgactataaaatcctgcgaacttctcaatggtaatttacaatcatcattgcctgctgctgcttctatagaattgattcataattttacattggttcacgacgacataatggataatgataacattaggcataacgtgacgacagtgcataggcaattcggaatacctttggcaatattagctggggatgttctcttttccaaagcattccaggtaatatctgttcatggtaaagaagttggaatcgatcaatcggtcctactaaggatggttgatatactatcctcttcctgtacggatgtttgcgagggacaagccttggatatacaaatggcacaggatgacgaattttcttcaactaaatcgtatattgaaatgattgaaaaaaaaactgctgccctgtttagagtttcatgcgaattgggcacgttatcatcgccagattttactgaaaaagactttgaaaatttgtctgcctatgggaagaagattggtgttgcatttcaattaatagatgatctaattggaattcatggagattcaaaaataactggcaaatttgtaggaaatgatatacgagaggggaaaaaaactctgcctatcttattggcttttcagaatctgagttctaccaataaggatttactaaaacagctatttggcagtaagaatgccaaagattctgtaattgcggagatgataaaaaaaatcgctgaaattaaagtcgataaggaagttcgtgacattgccaacaactacgctgaagaagctttcaaaacattgcaatcctatgaccgttctcctgccttaatttcattagaaaattctgcaaaatacatcgtagagcggagtttgtagttcatattgacctctgatcagaaatttatcaataccgttaaattgatagccttaaaaaacgctatagattttaacaacacaataaaaattgacgttgttatttcaaagactttttcaatctcaaagtacttgatagggaaaatcaatgtaatagatttagtcccagaaataaaagaaattgccggtgaattaaacagactatcgattgaagaaaaaaaaatactatatgattcaattattttggagaagaatcattatttagaagacatccaaagtggctcggcggcaaacgataatacccaaaaggcattagaaaacaaaagaaaaaaaacaatatccggaaagggtatcgaatttgaactcccaaatttggatggggcaatacaaggtaaagtagtaacaagatttccaccagaaccaaatggctatcctcatattggacatgccaaagcggcagtaattgatgaagaatatgctaggaagtatggaggaaaattgatcttgcgatatgatgataccaaccctctaaaagaaaagattgaatactaccatgccataaaagatggtcttgattggctgcaggtaaaaccagataaaattaaaaatacttctgatgatattctcaaaatctatgaatatggtaggaagctaataaggagaaattttgcatatgtttgttcatgttcgcaagaaaatatcaagagtaatcgccaaaatgctatcgcgtgtgaatgtactaataattcgattgaacataatttgtatgaatttgaaaatttgatctcaggaaattatgatcagaaccccgcaatccttaggtacagaggaaatatgtccagtttaaacactgcaatgcgggacccaactctttttagaatcatatcagggggccttcaccctaaggtagggtcagaattttcattatggcctacttatgattttgccgcccctgtagaagatagccttgatggggttactcatgcctttaggaccaaagaatacgaattacgaaatgaattatatttttctatcttggacaatctttctttaacaaaaccaaagctaattgaattctcaaggttggaatttgaaggcattccggtttctaagcggaaaattacaccattgattgaaaagggcataataaagaattgggatgatcccagactgcctacactattaggtttgaggaggcgcggaatactaccccaagcaattagaaaatttgttctttcactcggtattacattatctgaaaccaaaccctcgatggaaatattggagtcatttaatcggaaactgttggattccaaagcaccacgactctactttgtcaaaaatcccgtccaggtaaacatagattcgcttaacatcgatacagttgagataagaaatcatcctactcttgacatgggtaagaggttaatacgggtgggaaatataatttatatatctaacgatgatgcaattaaactaaaaatcggagatacattaagattaatggacttatgcaacatagaaattctgtcaattgaaaaaaatctcaatatgaataatgacggtgtagatggccgcaacattattatctatgcaaaaaataagggaaatgaaatttctcacaatattccaaagattcaatgggtctctaactctgactctcaaaattataggatcttaagaccactagcgctataccatggagacaaatacaacgaaaataatttaatagaagattgcggattatcagaatcccatatatcaaaacttgagctgggaactgccattcaatttgttagatatggattctgtaggattgatgatagttcaactgcaatatttacacataggtgatttaaaaaaatgaaaatagcaagaattagattaaaagattcagtagaaacatacggcattgtatcagaagatggaaagaagattattaccaaagaacagattcaggaaaagactggagtcccaataccaccgcgaattaaagaattcttatttggcggttggctttcagaaataaattctgttggatctggacttacatatgatttgcccatagatgaggttgatttattagctcctcttcccaatccgcctaaaattatatgtctagctttcaattattatgatcatgcccgtgatgcaggattgactccttcggaagaacctgtaatattcttaaaaccaagaacagcgttaaattctcctcacggaaatgtcatctctccttcctacgtaaagcggctagattatgaagcagaaatagcagtaattattggaagacaggtaaaaaaaatttctgagaaagattcattagatgccgtatttggttacatgatattccacgatgtttctgcgcgagatatccagtttagggataaacaattcacacgagggaaaagtattgatacgtttgctccttgcgggccatggataacgactaaggacgaaattcaagatcctcaaaaattacgtattacaaccaaggtaaacggggaattaaggcaaaattcatcaagtagcaatatggttatccctataaggaaaataatatcttcattgagtgatcttataacaattgagcctggagatatcatatcaactggaactcctgctggagtagctatgtcaatgaaagaacctagatatttgaaacatgatgatatagtagaaatttctattgagggattgggaacgatcagaaatcggatcatgtttaattgaatagagtaaaacaaccatccagttttcccaattaaggtatcgctttgttataatcatttgtaattattattcaatcatgatttcgcgattcggtattcttggattctttgtccaaagccatttttagttcatattctaataatccacaataatgcttgtacgtttctaccaattgttctctaatagtagctaattgcattgacaggttaagcgtttgtacacaactctcaagtgatctctcagaagcgaatacttccatctctaatttaaatttctttactatctctctctgctcatcactgatttcttcaatcgatttaatgattgactggatattttcatttaattgcctagtctcccttttatcctcctcatgggggcgttttcgcagaaatatcaaactaaacaccgtttgtgcgcataattattatttatttactaaatcaaagtcgtgagaaaataatttattcaaattctccagcctcttatctagtatatctaggtctggttgtaactacttgtaacccaactatgtcctgcaaatatatttaatcaagaatatggtctgtgcatctactttgaatcaaggtcggatgagtagggtgttatttattagaaattggatcctcctatacgattattaaatgaatcataacattaaacaaagaaatatgtataataccccttggagaataaattattaatttattgaaatatgacattgcgatagtagggggaggaccagcaggattatctgcagcatattctgcttcaaaacatggtgcaaatgtgatccttttcgagaaggatccttcttttggtcataatattaggaccagtggtgttacctggatcaaggagattgaaaaatttggtattacagaggaatactataatcctatcaagaatttttcctttgtatcacccactaatcaaatcatgatttcaggtacttttaattccgcatgtgttctagatgtgaggaaaacttatcaatatctagcatcaaaagcagcatccgagggtagcaatctgcttgtgaaaagccaagttattgatgttcaaaaaaattcacaaagacattcaagcatcctgaaagtgaattctcctagcggatcattggatgtggaggcgactttagtaatagatgcatctggctttagtagttttgtttcaaggaaattaggatacgtcgactcgtggaagagatatggcattggagcagaatatgaatgctattgtgatagtgtagatagagaaactatgtgccttatggtgggacagatttattcggaggccggatatgcttggctttttccgttatcagaaaatcgagtaagaataggggtgggcattggaaaaccaaattcaaatactgacccattagctaaattgaacaaaatcatgaaaagtctgttgcctccattagataaacttggaaaaattcaacctttggagttacattacggcatgattccaaatgaaggattgcggttaaatagtgtttttgatggattgattatggttggagataccgtaggtcaggcaaatccacttgtgttagaaggcataagatatgcaattgagtttggacgtttggccggaaaggtaggagctgaatctttgaaacacgattcgtcgcaagattccttgaggccctatgaagtagcaaataaaaccctccttgaaaaaaaaataaaatcagcattaaaggttcaatcaagatggcttggtctttctgactcagaatgggacaaagaaattgaaataataaaagaattgtcaatagatgaatttttagattttattaaatcagattttacatacactaaaatgaccaaactagctcttaaccatcccaaactgattgttaaacaattgtttaagctcgtactaaacaaatagtctcttctatgagcatcaaataagaagatataaatatcttctattgtcagccactgttaatttggcaggagaaaccgctacgcaatttcttccaatattatatttatttggatttggaatcttagctggggtcccttcaatagttttgtcgaggttgttgatgacaagaagaaggtacaatccagtaaaatttcttccaatggaatgtggtcaagttccttcaggagaaggacgatctcattttatgatgcagtattattcttatatcctaatgtttgtagtgttcgatgtaatgtctatctttctgtatgcatggggtgttacctttttctctatccctaaagaggcaacattgccaatgataggatttttgggtattatgttcgccgcaatggggtatgcattgtttttggccggcagaaaaggaatctggtaatcttgttgaacacaataggtattaataacttgaatgtaaatatttatcaagtgtagaggtatgttaaaggagctcgttaaccctaccaattttaatgttttagtgtctaagctaggtgatgttttagtcaaagctttggatgaaccattaggctatgcaattaactggggccgagtctggtcactatggcccgttcacttggaaactgcttgttgtagtgttgaatttggtgctgtttctagtccgcgctatgacgctgaacgatttggaatactggaagcatttggatctttaagacagtgtgacttgatagttgttcaaggaaccgtcacaaggaaaatggcacctaggctcagaatggtttatgatcaaatgccagagccaaaatacgttattgctatgggagcatgcgcaataacaggtggattgtatctagattcatacaatgttttacctggatgtgatagtattttgccagtagatgtgtatgtccctggttgcccgccaagacctgaaactttgattcaaggtactatgctgttgcaagaaaaaattaaaaggtcgaaaattaaataatggaaaacgccgaaaccaaaaataatcaaacaaaattactggaagttaaagaagaagcgactcatttactatctaatagtctcattaattcagtcattactaattttggagaacaagttaaacttgtgtataaaaaagaaaatcgttccaaaataatggtgagtcctgaaaaccttgtagaaacagcgctttatttgagaaataaccatggatttgatcatgctgaatcggcctcgggaactgactaccctactgataatcaaattgagattaattatcatctaggatcgtatagtaacaccgattattatccttatattgtcatactatcgacgagagtggatagaagcgatcctaaatcaaatagcttgataaatatatttccaagtgtagaatatcatgaacgtgaaacgtatgaaatgctgggtgtttattttttgggtcatccacgtaatgagagatttattttgcctgaagattgggcggatataccacctcttagaaaggatttccgcataaaaggaagatgattatgaaatgagcagtctggaggacaaaatcgatgaggcaaagaaattatcacttcaaataacaaaggaaactgaagatgaccgattaatgactctaagtgttggtccacaacacccagggtcaggccattttagattcgttattaaagttgatggagactatatagtatacgtagatcctgaccccggctatgttcataggggacatgaaaaaatgtgtgaatatagaaatcactttcaaaatataccccatttagaacgcccagtgattcatgattcttgcaatattacttattcttacagtctggctgttgaggatcttgcggatatctcagttcccagaaggggacagttcattagagcactcgcatcggaacttagtaggctatcttacacattgtattggctagcaatatatggtatattcttaggacattcaacaatgttcatgtggcctgctggagatagggaactgcttattgatttattagagcgattaactggggccagaataactaatgcattcaatattcctggtggagttagaaatgatattccctataattttaaagaaaaatgtctgtctcaggttaattattttgaaaaaaggcttaaagaatatgacgatattttttttaataatccactgttaagacaaagaactgagggtgtaggagttttaaccaaagaagatgcgattaaactaggtgtgacaggttctgtcttgagggcatcgggtgtaccatacgatataagaaaagtggaaccatatgacgtttataatgagcttgattttaatgtccaatatatgaaaacatgcgattcatttgcaagagcatatgttcctatgctggatatgcgtgaatcctgtcacataattagacaattactggataagatgcctgagtcaggagacgttagagaaaaattgcaatttaatcttaagagtccccctggtgaaacatacaagagagtagaatcaggaaggggagctttggggtatcatgtggttagcgatggatcaccaaaaccctatagggtaaaggcatcggttggttcatttaggaatttacttgctttacctttcctgctaacaggatcaaaattgggtgatatgcctgcaatttattggtctcttaattattggccggtggaggctgacagataatgggttcactgactccagattttagattcgggaacttcgtaggcagtgtagtttggctcctatttgttgtcttagcgttagttaccttacttattcttccgataatcttttttacattgttttatgttcctttgcctgaagtcgacggacaagtcttaacaccatatcttttcttttcgatgatggttgatccttccagaacgcttcctattgttcaattttttgttcacaccgacctgtttagggcagctgtttttccagggtttggatttgcagctttgatagccgcagctacaatatttgtcgaacgaaaattgctggccaaaatgcaattgcgtgtaggaccattatatgctggtaaagttgaaggtatcttccaattattggcagacgggttaaaacttcttacaaaagagattatagtaccttcaggcgctgacaaacccatattctggttggcccccataatgtttgtgtctactgctgctgcggtagtagcgctgattccagtagcttcaggatgggtagtcgctgatgttagcgtagggttattagctgcttttgcaatattgggcttctttccgttgattgcattactattttcatgggccagtaatagtaaatatccatttttaggaggattaagggctctccaccaaatgattgcctttgagataccttttttcttatcggcgttaccggttgttattctatcgtcgtcacttaatctctcagaaattgcgagatcacaaaatgctttctggaatatctttctactcccgatcaacgcttttgtatttttcatttcttcactagctgaattagaaaggattccgttcgatttacccgaagctgagagtgaaatagttgcaggctggttgactgagactacggggatgatatacggattaatacaacttggtagctatttgaaattgtatgctctagcaggattatttgtaattctcttcttgggtggatggtcgggtccccaaatttttccccaagaattaattccaggagctcatgattctaattttccattactgcaaatgttagctttagatggtctatacaaccctataacagtaaatagcatattctggttcttggtgaaaacaatagtgattatatttctaatgttgattatccgaggtatcaatccacgaatcagaattgatattttgcttcatactggatggtacaaactgatagttttaacattcataaatctgttcgtcgtattaatgttgatttacggtggaattattggaccggagggagtgatttcgatacgatgaaaactgcaacaggtttcataaaagcactggagtctggaactaagcatatacttttaaagagatttaccctccgttatcctgaagaaaagctgaaattcgtgggtgacggataccaatttgaccccaaaaaaggagttggaattgcggggacgagaggtagacatattttgtttcatgacaaatgtaccggatgtcaactttgtgctatcgcttgcgaaggaatagcagaagcaataactatggtaaaagttgatgagcaatggaagcaaaataaaaaatctataatgcctcaaatcgattatggaaagtgtgttttttgtggtctgtgtgtagatgcatgcccattttatgcattatatatgaccaatgactatgagttatcctcttacacaaaatctcatttaatatatactccatcccaattggccgtcaaaccaaaatatgacggcgatgtagaaataaaaataggacgccgaggtgcttatcatggtagatagcgtatttgtgggattgtctgttatcacgattggttcagctatcttgtctcttgagagccgggagttactatacggtggtatagcactggcaatttccatgctagggatagcgggttactttattattttggacgctcctttcgttgcaatgtttcaaatagctgtgtatgtgggtgcagttgcggttcttataatatttaccatcatgttggtaagagcacagaataccgttacgaaaaaagaaactaggaaaagaaaggttgcaggtatcttacttggattagcctttcttattttagccggatcgattttaggaaactcttctgtaaaccagctgaaatttaacgatacagttcccatatttgatgtccaggctatagggaaagaattaatgacatactattcaccggtattgatagtattggcgctaacactggcagcagcgataataggtgcattggctttagcacgaagagaggatattgaggaaagaaatgaaccagccaattgattttctctatatagctgtaattctattatccattggaatttatggattagttgtaaaaagaaatgctctgagacttatattttccatagagctaatagcaaacgctgtaaaccttgcacttatcgcattttcgagaatgctgcctagtcctcagggccaagtctttgttcttttttccattgcaatctctgctgctgaagttgcagtaggcttaggaatcataattgtggcctatagattctataaagacattgatgttaccgaatataagaaccttaagaattaatttttatccaccatatttatttttttgaaaattcaaccgtataatatataaaaggagttaatgtcgttgaggtaggggtattcggagcaagagaatgtagatggtggattcttcctattatctaatggtggcaacatttatgcccttgatattatcaccggtagtatattttttaggtaaacgaaagggaataaacattacgacgtggttgacatttggaattttagctatctccacaatattggtgattatcccatccatagacctaggttctgggggatcatatcaagaagtctttgattggagtcaattaggtcatttcgggttaaaattagacggtttaagcattccttttgcaatttcgatttatttgttatcaactattgtagttatttattcaaagccatacatgacaagaaaaattctccttcaatatgaacaggttaaaaattcctctgatctggaaattaaggatgctgaaagccagttgtattcttttgaggacggaaaaactttgtcttcattaattctctcagtagagcaaaaatcctatttgaatagtcagatgggcttgtattattctctctaccttgtatttgcggtgggtatgcttggcactgttttagcaactaatttatttgaattttatgtattctttgaacttatgttagttccggctttctttttgattgcattctatggatacggaaaaaggaaaagaacttcattaatgttctttttctgggcccatgtcggtgcagtaatcctactattgggtttaatggccatgggttttctagccggtggatttgattatgacacagttaaggcaaatgtatctcaaattccacatgcatggatagccgtcattgtggctgcacttgttatcggatttggtgtaaaacttggtgctttccttgtgcacatatggttgcctgatacatatacggatgctccaacaccaattacagtactgatatcatcagtaatgactggaataggtgcatatggtctgatcagaatttggattgaactgttggcgggccctggaaactatactgattatagtatttacgtaagtctatggggggttgcaacaatgatttacggcggtgcaatgtccctaatgcaaaaagatatcaaaagagttttggcttactcaagtataagttcgatgggctatctgctttttggaatagggtcggagagcgttctgggtattagcggtgcaatttttatgtatgttactcatgctttgggaaaaggcctattgtttatgatggctggttcaattatcttacaaacgggaacaagaaacatggataaattaggtggcttaggtggaaaaatgccatacacagccgtatttgccatgattggaggactaacgatcattggtgtaccaattacaagtggctttatgtctgaatgggttctttttaacggcgctctacaaaatgcagtagttgactggagtactattaaggcgatatccttcgctttggctattactacaactatattgacttctgcttatattttgtggatgtataaacggattttttatggtgttaccccagaaacattaaaaaatgtacgtgattcgagtaaatatgttttagtaaccatgggaattttggcttcattaactttgattctgggagtatatcctgatttattttacaaaccaattataggatacgttgaaaatctgtatgagaattcaaacgagcttataccagtaaagatcaaacctggaatggctcaagtaaatgaaacacttacaaatcatacacaggccagtagtgctgctttgctaggtaattctgaattccagaggacacatctaatatcagataaccaaagcggtcattccattaatatataggtgaatagatctggctgaagttttaggttttgaaggactaggtgtaattgcttggttaatttggatgactccatttataggagctgcattcattcctattttaagaaaaagtagtgaaaaatttaaaagttacatagctgttgtcttctcaattgttagtgcactgttggcactgactatcttgcctttgggcttatcaaatggggaaatacatagtcaaattccatggttttcagctttaaatctggaagcaggtgtacttgctgatccccttgctataattatgagtaatttagtcgcttggatttcggcggctatatttatctattctgtatcctacatgcgcagagaaaaatccctgataaggtattggttctttatgctgttctttattggatcaatgcagcttattgtattatccgataacttgttgatggtatttttcggttgggaaggtgtgggacttgcttcctatgctctgataggattttggtattctgatagacggaaagattatgttggcaaggaaggacataccgcttggggtatacctcagtggacatctcctacccatgctgggataaaggcgttcttacttaacagggctggagatgtaatgatgctgactggcatgtttatgatctttatgtatgcgggtacttttggctttagagagttattggccgaccaaagctgggcaaatgagatgatgcagcaaaatctattggtgcctgcggctgttctaatatttggaggagctataggcaaatcagctcaatttccattgaatgaatggttattagaggcaatgactggacctacatctgtttcggctctcatccacgctgcaacaatggtaaaagcaggtgtatttcttgttgcgagaattggtccattattttttgcactgtctgtatttaatatgacgcagttttttgagatagttacctgggtcggagcgataactgctattttgttggctactcaagcaatagttaatcctgaaataaaaaaggttttggcttattctacaggatcacagatcggatatatgatgatggccctgggaattgcaggtctgtcaacaaactttgtcgacggatatactgctggattctttcacttgattagccatgcactgtttaaagcttctttgtttatggcggcaggtgctataatacatacggtacactctaggttcatgaacgatatgggtgggttgaaaaagaatatgagaaaaacttatattttcatgctacttgcaagtttatcactagcgggtgctccattaataacatcaggattctggagcaaagatgcaatttttgcttctattattgaatctaactatgaattctcatcgtatatcttttttattgctgttacagtagccgtaatgactgccttttatacatttaggatggtgggacttgtattttttggaaaatcaagccaaaaagtggtcaatatggaaaataaaggtcatcgtatacatgaagtaaataaactcatgtggcttccttttgcggttctggcaattgcatctattgtaataggagtcgtaggatttgcttttgagggccaattgcatcatttgtttgcagcctatcttgccagtacatttggcatcatcgaaggcggagtcgtacccctagaaggctccgcagacccacagagccaacaagaagtaataaagtcagacacatcttctacccacggggctgaacaggaaggatggaacctcaatccaattgcggttattgcatctgtaacagcatttggcttggggggatttctgggctacttattttacatcaaaagaatcgccgatccgaagaagatcaacgacaacgttgtttcaaaggctttatggaagttcctttacaaccgatggtatcttaattccattctatactggggaggtgttgttgtacccctggcggtttataggcgaatatacaggtattttgaagatatcttaatgtatggaattaatccttcggtccaacattcaatggtgttcttatctagagtgacaaaagcggcacaatcgggtaacgtacagacatatctctatgtattctcggctggtataattctaattaccatgttacttttgagttaaggagtgaatgagtaataatgattgatatattttcaactcctgctttagtaaccattatcttaggaagcgtagctttattaattccaataatagatgccttgaataaagagcgaggcaccaaaaataaagtttatagcgcaatagcctttggggctctagctttggcgcttgtccttgtaatatataggatattttctggagaaaatcttcctgccttgtcattaacaaagagcggggtgatagcagatgacatttttggtgcattcttttctattgcatttcttatagtatctattatggtgacagtttcttcatggagttacatgaagaaaaaaagcaatcatgcagcctactattctttaatattattatcaagcatagggatgatccttatagggtattcaactgatttcgtaatgttgttagttgcttgggaacttatgtctattcctacttatgcattggcagcttttaacaaaagggatccaatctcaaacgaagcttcaatcaaatatttcttgtttggagccctatcgtcagcaataattgttttagcgatgggaattgtgtatggattaaccggaaccactaatatttacgattctattatcgcaatgtcgcagctgaataccgatttgatcccatttgctttactggcagtcggcctttttattgcgggctttggcttcaaaatgggtctagttccatttcatatgtggttgcctgatacatattctggagcaccaacaacagttgctacgctgcttgcagcaggaacaaaaaaagctggattcgcagctgccattagagtcatagttattggtttaatagcactcaatgtccactggacatttacacttgcaataatagccatttttacaatgaccctaggcaatctgggggctctaactcagaaaagtattccgagaatccttgcctattccagcattgcgcaggctggatatattttaataggccttgcggtggctccatattctaattatggtttagatgcttctttgttacaaataatgaaccacgcagtaatgaaatctgctgcatttattgctgccgcaggcgtgatcataaccctagctggctatacactagaaaaatacacaggattgggatttagaatgcctattactgccttcgtgcttactatttctttacttgcgttggctggagtgcctcctctgaatggtttttggggtaaatatttgatctttggtgcagccttggatagtggccaaatagtatggtggggaccctatctggcaatagcaggtgtcctaaatagtgcactatctctgggttattatgcttggatcataaggaaaatgtatatggaaaaaggcgagaatagagtcagacagaaggaaccaaagtcgatagttgctgttttgttatttgctttaggttttatgataatattcggtatatggtacgccccattgctggacctagcttcaatggctgttcctaatgatttgacacatttaataagtgccaaataacaaactcaaatttactatcctttaccttaactttttgtttcccaaatattgtactattgctacatctacatctacatcttaattgatgttactttttttagaactattaatattgcagtattattctatattttaaaacttctaactcaatatatgatcagaaatgattaaagaaactattactaataacattagatacattggagaggaaagttatttaataacctcatgatcaatatgattgaaaacccatcttgacattttccatcttttgatttttgcattgctttttctgttattatttaacatcttggcagttaaaaattgtctttacttttccttttagttaagttaaaaaaatctatctatactttggtcttgatcgttaactattcttgatagctctttgatatcttcaaagaaaacttgctttaatttgttattataaatagttgctgcagggtgatatgttataaagtattttaatggcggtcgattgattatttttccacgatgatgtgtcatatgttctaaaccaagtaacgactttagcgctgtggcgcctaaaatacaaataactttaggtgaaataatctcaatctctttttttaaatattgatcagtgcatattcttatttcttcttcagttgggattctattgttaggtggtctgcatttgaccacattcgtgataaaagtatcttttcttgctattcccgcatcgaccaaagcttgatccaaaattttaccggcactccctataaatggcatacccatttcatcctcattttttccgggagcttcgcctattaggattatttttctggtgaaattgccagttcccggtacggcattctttctagttactgataggtcgcataggatacatcgaattactttgtttttaattgattctaatgatacattgtgcgaatccggctcagtcataattataaaaaagtgacaagagttcttaaggattaatatttagattcagttactgactctgaggacaaccctccggtgttattttgtgcatctccttgggatgaatcattaactgtcaaatctgcaggacttgagctagaatttgtaattgcaacatctactgactctgaggacaaccctccggtgttattagagaagccagtattgttggattgagcaatcacggtgggaaatccgaccattagtagtggtaaaataagaataaaccatctagaactattcatatccttttctataatttttgtaatataaaataatttcgttaggtatgattttcatttatctgcgagtcctcggcttatagcgataagcatttcatttctgacatctgcaacttataatattcgtttaccactataaaatattaaaataagggttttgattgcctctgttatggatactaacatacaataatcatggcagttatcgaccaatattacttaattaacttaccaacattaggtttctttaaccataataccacttggtgggattatttcatcagatttttatatcatgatgatcaataatgtcaatatttttatcatctttaatccaaatgttacataaatataatgttgatagcgtttacttactgattattataatagaaacgataaaatggtggaaaaccattataataagaactaaaatgtggtggaaaaaatcaaaatgaatcaaaaattaattaattcgtatttatcagtcttatgccctttatgtaacaagcacactaatataattaccgatcagaattctggtgaattgatctgcactacctgtggaagtgttattattgacaacaccgatttaacaaggtctgaatgggcttcttcaaatattcaagaactagacttcagggatagaacaggcggaccaacttctttggcgaagtacgatcgtgggctctcgactgtgatagggaaagtagataaagatgcgtctggccgtcagattgacttggcaatgaaaagcagaataaatcggtggagaacctgggatacccgatctcaaacaaaggattcttcaaaaagaaatcttcagactgcgtttatccacctatacactatgaaagatgtgcttggattacccgaatcggcaattgaaaagattgcatatctttacaggaaaatacaggaacgaaaattagtaaaaggcagaacaattaagggtgctttggctgttgcttcttatatcacctgtagagaattagggatacccaggacactaaaagaaatagcaagaattactaatcttaaggaaaaagagattgcgcgaatatacagaaaagtaatgttggaactggatatcaaagtacctcaagtcgatgcactaaaagaaataattaagatcggaaatatttgcgggatttcagagagagcgaaacgacgggccgtcaaaatgatgatgactgtaaggaaaacggctatatatgccgggaagaatcctatgggtttggctggggctgttctttacttatcatgtaaggaatatgatgaggaaatcactcaaagtaagattgcagaagttgcgggcgtaacagaagttacgctaaggcacgatttagatatagtaataaaactaaccgagattaagttaagtaactaaattctatatctcgactacaattctaattctttttaaattcacaaatattaaataatcaacaataataaattttgcctaggacttttgaatgtagggaaagtcattccattataattaaagtatgaataatttattcaacgctactaaatattttgccttaaagactcgtgaaaaaaagtgatcccaaaaataaatatcaaaatctcagttaatctaaagacagtttttcacttaataatattctaaaggctttgatctaatttctaatttcaataattatttgaatttttaaaaagatgaattttaacagaacaaatgcaattaatccacatcttaattttatgattcgcaatattctttatggtcgttaataaacttgttattatatgataggagatctattatcagccaattccgtgtttggcctttctccattaccacattaatgtctcggtgaatggaatagaaacccgggacatcgttttgtatgttaaattgtttaacattttatttaacaatatgtaaattgaaatatgtactactttctcaaataagtcaaagtgagtacaaaactaaaagataatacctaaattgaaatactaattttgaaggaaaaccaaaagagaaattccaattaattggatcgtcaaaatttattcattaaacaacatccttcttatttaaatcaatcaataaccagaaattcggaaacctttttactggcagtccgcctaaattcgaagcataatgactttactatgtcaaatacactttgcttttgtcctatgagtgtatcaaaatatatctactctactgagtttgaggtacatttcattctaaataaaagtcgtcaaagatctgaggtattgtgtaggtgtcatttgaaggcccatgcagttgtagtccattgaccaattctttgacatttgggacactgtcttctattaacatattgttctacagattcgttaatttctggctcaataataatttgttctccacaatagcatttcatcatttcaagcatatacatagccaatcattcctaggtattttagtttattcgaaatccatttccatctgatttaataacgcttagtacgtgtcgaattgcatattgtattgagcaaccaaatatatctatacgctaagacgatcaactaatactgccgttgaataaggaatgtacatactctcaggatgccgcggctgtctattttttcgtcacctccaatttgcctccctatttgtattcggaggatgcttcttgtaattcataaaatttagcatacagatctttacagtattactagttgactacaagtgagaatgatcaattctatatagatcttaatatattttgttgatattttatgtatgaacagaatattgtcaaatgaaaatactgaaaatctcgaagaatctcaacaaaatcaaaaaaaaattggttcggcatcagataacccagaaaccgcaggtccttctgaaaatcttagagaggaagcgcttgaagaaacagataaagagaacaccgagaaggaacccgcctaatcttttttagcaaatcaatcatatgatattacattttatattcctttatcaagatgtttgagattgtaaagaattaattcaaaaaaaggatatgtgaatttaatggtccacttttataattatacataggatatttaactataatctgtaattcggtaactttgctttcttgaattaaagtatgttagcttggtaaaataacctctgattttaaatcttcatttatcggtcgagatatatatttaaataaaatattagacaaatgaagataataataattacaatgcttcattgttagagcataatttgtgtgtgattttagcctattttaatatccttcattaatccatgctttcctgactctaatggttatagttagggccagacagtgaggttaaatacaacagatttaaataaacgtcatttgatctaatgaaagataagaaatttttaacttagacttgaacaacattaaggaggctcaaagactactttcaagttataacatcagaagaacagatctaataaaatcggcaacattttctaaattaactggtaacaacgtttatcttaaactcgaatgccttcagaaaacaggatccttcaaagttcggggagcaatggtaaaaattcataatttgtcaaatgagtcaaaaaagaatggtgtaattgcagcttcggctggaaatcatgctcaagcagtagcttttgcttctaattatcataatatttcatgtaccattgttatgcctaaaaatgcatctccaagtaaaattgttgctacaaagtcctatggggcaaaagtaattttagaaggaaacagttacgatgaatctgctaattctgtcaaagatttggctgagaaagaaaataaaatcatcattcctgcttttgaagatttagatataatatcggggcagggaacagtcggtttggagataatggaggacttagaaaacctagatgaagtttatgttcctgtaggagggggtggtttgattgcggggatatccgtagcgataaaatcaatcaatccaagggtaaaaataattggtgttgaatctaccgcttttcccactatgaaaaaatcaatttctaccaataagataatgaaggctaaagaaggctacactattgcagatggtatctctatcaaaactcctggaaaactaaccttcgaaatcataaagaagaatgtagatagtattgtattgatagatgataatgcaattgtaaagacaatgtttttattgatggaacgatcaaaaatcgtgtcagaacctgctggcgctgcagctcttgcttaccttatttctaagaagaaaaacaataaacgaggcaagaatttggtctcaatcatatctggtggcaatgtggacatgtatcttttgggtcagatagtggcgaaaggcttgatgcaaacaggcaggttattgaaaatatttgtagatcttaatgataaacctggagccttaaaaaaaattgttgatgagatatcaaaggctagcgtgaacattgtcgaggtagaacacgatcgattgagttccaacatccccgctggtactgctggagtatatttaagtttagagttagagaataaaaaccaagccaatactttaatggatttgttcaaaaaagaaaaaataaattttgaaattgtaaaatagcgttaatatctctatttttaccttgtttacgaatagattactgttctatttttacaactaaactaatactgttccaccgtctacgactatggtgttgcctgtagcgtaggagaaatagtcatcggctaagcaggcagcgaccctagctacctcgcgaggttcaccccatcttttcatgggcgactctagagcggctctgattatgatttgctctgacattgaatctagtgtagctggtgtagcgatattacctaatgcgagagtatatgctctaatcccgtatctgctgtactctttggctatacttttcgttaatgtaatgcatccagacttagcaatggagtaagggaaacctcctgcatgtcctgaaattgcaggggtggaggaaatattaattattacgccgcccaccgcttctttgtccgtctttttgctgcttagatttacagtaaaagatttttgcatcataatcggaagtacaccttgacaaagtcttattgatccaaataagtcgacctcaattatctttctaagctcttcaatagatccctcatgtatttttttattccagatgatatcgtcaaatggataacctgaattatttaccaaaatgtcgattttctgatatctgttcataacgttttctataaatttatttacgcttaattgattggttacatcgacttggagtgcatgagttgcaccactcatcttagcggccgccgtcttcgattgattcttatttcgagaacatactatgacgatagctcctctttctgaaagctcctttgctatctcaaatccaatgcctctacttgaaccagtaacgactgcaactttatctagaagtgacatttcattatatgatgacgtacaatctttatatttgatggctctttattttcaccaatagctaaaaagtaagacagtgatcaaatattttaagttttgatcaactaaacttgttgtgaaattgatgatattctaagacgaatcaaatttactattattagtagcggtaaaagtatgtttaaatgacatttgctataaacaatcaatagaaaaggatattagaaataattgttcgactaatcaattatttcatatcaaattttagagcttcaatatagcttacactttcatggaatctgatagcgtttgatccaattgggtcttgaggtaaactaaattgatattaaaaatcatgtcttatcggacctagccttttgaattcagcttggaattggaattaggatatatatcttcctttgaaaaaatccattctttacgcttaaaaaaaactaataatactattgaaattaataccattgtcactaggactgtgactaatcctgggggaatgtcacttaatctggccaggtctaatccattcattccataaattcctgtaataagagataagggtaggattatcgcactaaaaactgtcagaattcgcattgtatcattaagttgtaacgatatatttgcgatgtataaatctcgggtggaatttatggtatcaccatatgattctatcaattgaatcaactgtcctatgtcgtcataggcaacttgtaaatatcttatttcattaccttgattttgcatatgtatcaaaaagtttacagcgtctcttgtgtaccagaaatgccgtcttattactatgctttgttttgccactacatctagatagttgagcatgctcttggaaggctttttgaataaagatttttgttcaaaatctgaaagagtaatctctattgaagttaaaagttgttcatatcttgatattatttccccgataattgtaaaatatagtgcattaatacttaatactaatagttttctattctttttttcaataatatccttaatggttgaaaatatttcaacctgagatgaatgtaaggtgattatccaattcttgccaacataaatataaacgccttcaattagcaattgtttaattgttttaaaacgaatatctaataatatactaaaggtatgattgtcgagtatccttatctgcggtcttttcgttttctgaccaataagccttagactgtcctcatctagaccgtattcttctccaatggatttcagatcttggggcgacggatcacttatatcaatccacaatttatcggtatctttaactgctggactattctgctcggtcttaattccttcttgattatagtagatatatcgctttgtttgcaaggatctaatttctgataatagagggtaaatacatttgatattaatatgtcgaatcttttttatgaaattatttgtgaaattagtaaattttccattatagaaattgaattttcaaattatccgcacaatgatatttgttacattcttaaaaaatgagttaattttgtcatgaagaaatgtagataatgagttggtatcaattaatatgaacatctgattagaaaatatcaataagggcttctttttgccttattgctagtgataaggctctgtacaagttctacaataaaactattagagtgagaaaatctggttggttcgagttaggaaggaatggcaacggaattaccaattcttatgcatcccaagtgacgtttaagaaagtaatccatattttttaagtaaggctatggttaaagatttctacaaaagtagtaaatcccattcataaatatgaatagataagcaagaagtaaaaatcaattcagattactttcagacaaatagagattaaccataatcaaggcaaatttactcatttatccatcaacaggagatatatcatgaatacattgtggaaaaaatgatgcatttatgataattgtcatcttactacttgaacaaaatccctaattaggtatgaaatttactggatgttaataaccttttttgtataataagaaggtatgagtttagttggaggaataatcctattaatagtaggaatcattttgtatgcagtagctggaatgttaccacccgttgccacaaaaattgctagaattctgggcattatattagcgatcataggtgtaatcttaattgtgttagcagctttaggagttgcatttggtttggctttaccattgtgagaaccactgtaaattaaatcaaaccaggtgtaaactaggcaattttttttatatttggcgcggaattctattaaatgaccttttcattttttttagattcggacataatcagttaatgttgaatatacatttttcggtcttttttcgaaccaggagaaaatagaattcggtagtgcggttttaacagatcattgaccaatatatagtacatgaagcctagttggctactattatcctaagaaagtaagatatacgcttatcctctgcggtgctttactacattatattatttctcagaatgcccttatcttgagccgctactagatgcaaattaataattgaatttagagaactattataaggcctgaattataattgctagtaacctactcaatagtaattttcgcgttataacgatcctctataatagtttcttctgtttgtataaaaccttttattattgtatataaatataaatattcaaccagagataaaacccaagaatcctcaataagagaaggaacatacaaaaaggattgtataggataaagggttactatttacctaattgcttatttattatctatcagaacttgtaatatgacaagaaaagcaagagatttcagagtgcagaaactcagaaattcaattaaattttacttaccaagaatagaaggatatctagaagttgtaaaaaagttatcgagcgagtttgaaggcatgactctgatcgagtttgatggatattttgaaaaaaaaatcgaacctacaaagtatgttagagtagaagtacataagaataaactaaacaaaaaaagcctaatcagacaggcaaatgagctaagaaaaattttaaagcaaaagagtattgcaatagagataaacaatgaaatgattttggtcgaagccgatagcggctaatatagtaaaataaccacagaatcttaagcaacaatatcaaatgatctagaaatgattttcaatttgttgagtcaatttcttttagtattcgacttataatgcttgttaacctatttcagaatggcttaatgacctaccatcattttttagtttctcctagatgataaaatatacgtgatcctagtaataattatatgttaattgatcaggacagtaacattttgaaataagttgttatatagcaatatatatataatagccacttgatttttttttgattgcttcaaaaaaagattgaaaaatcattaataaaaacgagccctttacttaaaattcagtttacacataggaattggtaactcatgtttgtgtctgttactttttatccactcaataactgtcttcacgttttttccatccactccacttatctcagggactggcgtattttttaagattttattaaaatttatttgatcaagaattttgtcaataatatcatatgatacacctatttcaccttcggcggtctgtcccttccaaagtcttgcactactttgctttttaataatatcattaggtacacctatgtagctggcgattttcctaacttctgttttatacaagtctgcaattggaaatatgtctgctccgccatctccaaattttgtgaaataaccaagttgcaattcagttttgtctgctgttcctactactattcctccttcggctgcagcgtagtagtagagaatagccatcctgagtctaacaagaaagttggcttttgctagcttattccgaggaaagttctttacgatctgatttttacccttgccaatatctatcaactcataattaatattcaatttttttgagatttctagtccatgctttacatcggtctttggcgttacagaatagtcaggaagtaatagaccgagaactttatcagatcctagagaataggctgagagataagcggtaagggtcgaatctattccaccgctaattccaatgacaacacattttgcgtttcttgactttacctcctttttcataaatcttgcaattttttctaaaatctttttttcattcaatcattactaccctcctctgacgcactaagtcgcatatgatccacactataattatttctaataatttaaattaataacttgccaattaatacaaagacgatcattatacttaatataccatatacacaaatatttatcctaattgaagattttgggatattctcgtattgaacttgtaaacatagcaatctcatcactatggtttcatagcaaaggtaaattgttttaatcctgttttaaaagagtactcgcggtctgatcataatagtctagtatttactataaatatgaaatagaaggtagtacctttaattcaaatgaaagattgataaacatccttcttgctacaagggcaaagattaaggaaaattttttaatttacccgaagtttaaagaaccttttcgatactcagtaatattcgacatataaaaaagtaaattttccaaaataataattatcaacttaaaccaataagttatccctttagagatgatatcacacggtgtaacttctctcacaaacaattaacaaggtcggaaatgttctctattatgagcttgactaaatttagtacctctagaagagtatcatttatttatgttctaataagttatcatcatgacagcaccaatctactaaaaattttgtagctgattgagtatctttaaaaacccttttcctttcaaattcgatttcatttggattatcataaaaatctgataattcaaggggtgtgttgttaagtgtaatgatatattgaatcttggcctttgcagctgaattaacacctagtggtgaattttctacaactaaggcttctgaaggactaaggctaagtttagaaagggccgtgctaaacggctctggacttggtttcccttcttccaagtcatcgccggatataattaaatcaaatttatcaaggttattttgttttaacagcgattcaacctcacttttagatgccccacttaccacagcttttaagcaattctcacaattaattaattcaattaattcggttactcctgaaaaaattgtcgctctttggtgctgttcaaataattcttttttcctattactaatactttcaacaagtttttcatcaggtgttttgagattatttctttcgaaaattttcttgatgaggcctggaccgggcattccctcaagtaagaacacgtctcttttgtctatctcaagtttgacaatttctttaaatgcaatctggaaagcctctgcatgaaaaggcattgcatctatcaggacgccgtccatatcaaataaaattcctttcaacttatagttgatgaatctcagttcaataatataaagtagagaggacaatatatcgtgccgtcctcttgtttttttgatcaaaaagggatttacctttaaaagtaaaattatataagaagagacgtaattcttgataaactaactttgatccggcattcgttaaataacatctgaataaatcagtcaatatgtaaaaaaattatcctgcttgcttcatcttccaaggactttaaatctgaaagcaattgatcattccactcctcatttttttttagttcagcggatttctcatccatcgtagatacaaatttacctgttcgtacttcatttgtaggaatatattatcgtacagaagatcatatcttaattccgtattcactttcaaattcgttgtctcctgttgtcgatgatcaacaataaaatcagtatttcttttattagacacagcataaatagcataaatagccaagtctatgatggtgagttactaactatgtgcagatatttaaattgtatcgaaattcattattctatgtgaataagagagacggctagataccatttggaagaccagatttattactatctatcccttgatcattagctaagtttagatggtttattccaaacataaaagcaggtcacttgtagttagtttctccgtcactttcttgcgctctattttgactagcagggttattccctcattactagaaaaatatgatcggctgttaccgtcataagatattagtccatattcaattaagtaaaacaagtattttttgatcaattcgcttgagatgggtaatagtctttgaatattaagattaatcatctgaattgatgagcctcttaaacacatcaataaaataggttggaagataactgcctccataaccaatatatttttaggtttttcttgatctttaattaatttcatttcgaaatccgccagcgattatttcattattcgcttgtccagtattcgtcctcaatataggtaactcataatacattacaatttttatactttcatcagttaaataggcgctaattttctcacatgagcgatcgatccctatcttagagaactgttgcattttagataaattgttatcatctaaactgatcttgaccatgtttaaaaattttagaacaacattctatataagggctgatccgtcttatgacctggtgactatctttataataatctcaaattactgaatcacagtgggctaataattgcaaacaaatccacacggctgttaagattttgcaaactaagagtaaatcgactccttgcaacgaaaatacaatgagccatatgtaaatatcaataaattaagtgattcacaaacgaatagctaaattttggggatggatcctaaatatgcctggtaaaattccgataggttctccatcaactgttacaattatattattttgaatttcagttatccatcttgctgtttgagactgaccataatagatatcatcctcattatcaatggcctcttcccccttttttatatttatcaatttatttaggattttgaagctatccgaattttttattactattgtatctaatagtccatctgccatgtctgccttagttgcaacttggaatccccctcctaaaaaactgccattagataccatacccatggtcattttcgtcaacagtctattacttgtaccgttgccttcaagtgtcccctcgataatttcacatatattgcttttgtaggtaggtaaagttgcaattattcctgtaacagtcgaaagtattcgactaccgatttgatctcttaccagtttagatttatcgataatttctgctcccaatcctatctcagcagcatttaggaataatctaaattcagattttggatattgctccctactggccatcactaatgcagcaataatatcaatctttttaatattattagatcctgttaggaccttacaacattcctcaaaatccggaggtaaacccaaagacttgaccaatacattgcgcgttcctcctggaagtatcatcaagaccgcgtctggattgattggttcgacatcagtaatcgctagcaactcgtcattcttgatatttttaaaatctgcagagtccagacttctattgatattttctttgaaaaatccattagtaacttcatttattatcccgtcaccacctattggtattatatgagtagctccttgctctagatgcttgcgagtgagcaacgtcccatctcctgttttaattgtgaatacgaattttaagtcattaccaaaatacttgcttaatatttgttcaatagagtcccagttttttcctgtttgaccaccattagaattaggattaactataacaatagtattgtctggcatgtagcgtaactaagcataagcagtagggaagattacatataaattatacaggatgtattgttttataaaaataaaaccgaaccctgccatttcactgaagttcaaatatatacgtcggaatcttattttttatataattttgtaaccgacaacgataggataattgtctgctagtcttcggggttaatatcgttaataagcttggatgattcaatgacacttttaatctgcatgtcatcactacctgaaatgatctttgatacagttggctttgcttcctttcctaatattaatgcctccttaccttttcgcattaccacaaccgtcatgttattttctgtcaatttacgggccaacttcttagccaaattcaactgcagttggagactagaatccttatcagtcattgtgtgtataaattccttggcgtcatctagtttatctaatagtttatctactgaactttcagtttcattctgacctcgtacacttttatcattataagtatcactaagattctctttaactaattcaaataattcaggttctaccatattaatatcaaatttgtttgattccttatcagaagtagcaatcatatctatagctaatttattctggattttaatatgtaattttccactttttactgttttaagagtttttactaacttgtcaattaagaaataactcggactctcaattgttatatcatcgatgtcagccaattcaacctatctcaatcatttgtgtggaagtccgtcgaatctagcttctcaaataattgaagctgcatgatatcaatgtatgacgtcattattgctttcatagcctcgaatatccactttgcttggcatttcataacctttctttccttcaactctaacattatttttcttatgaacttcggctgaaatgcgaagagtaccgtttacattaagattaccaccaccaatctggcgtccttcaggaccttttgctgtgggcatctctattttgaggttattaaatgaataagtaattattgcaccctttcctgttaacttctcaattaatcgttctaaaacaggtgcaccctcttctgaaattttatgagttatcttatttagattattatttaattgattcatcgatacaataatacaactacataaaacgttataaattgtatatattttatttcctcgctatctgcattaatgagaggataaatcaagttctaggaggaaaacataacccatggacaaattaagttgatatcgcatcaggatagtaaatagtatatgggggttgggctcagggtaataaaaaactgataaagttattatattagaataatcaaacttctgatttctcaaatgtagtttgctattaacactgctatatccattcaaagagtaaccagtcaataggatgattaaaacatatactacatccaatttgatagtggtagataagctttaggtcgtctatactatcctgagaaacaaagaactttaattggataaggtgaattgtttcaatagttgatccctgagcattgttcttttgtatcagaaggtaataaatgccctcttccacctgaatttattatcgaggtagaagatgagatagacgacagtacatttatgataggattaacctgttctgaccacagagtcatattagagaataaatttcatttactccaaaaagataacgctattccttcgggcaaaataagattgacaaatataaaaattattcacacggactgtatcaaaggcaatcaagaagataaagaagaggtcaggagtaagaggctaaatatatagtttttaataatatcgtcattccaataataatgccttgtcttcctggcctctcagtacgtgaattatgtttgaggcagcaatttccgccattttatttcgagtatcaaaacttgcactacctatatgtggtaatagaactacattatgcattttaagcaatggattgttactccgtattggctcgtcctcaaagacatctagaccagctcctgcaatcaacttctcctttaagccgcgaatcaaatcttcctctttaacaattttgcctcttgatatatttaccaaacaggcattatttttcatcaatttgatcttttcataatctattaagtgatagctgtctttatttaacgtacagcaaattatgatatagtctgaatatgaaataagtgtttgtaaattacaatattccagtttgtcgagcaatttgtcatccccaatatcattttgattgaaattcctttgtgtgaataatattttcatcccaaatccaattgcacgcctacaaattgctctgccaatttttcccatccctatgactcccagtgttttgtgatgtaagtccattccaatcattagatcgggattccagccatatttccatttaccttttctcagatatttatcggcctccactagtcttctcccaacacaaagcattaacccaaatcccaaatcagctgttgtttcggtaaggatgttccccgtatatcctatctttatttgtctcctgcgtgcttctgagacatcgatatgttcatagccagtactgaaagtgcttatcactttaagtgatctaccagcaatatccattatttgcttgtcaatcttatcattaagaaagcacaaaattgcatcaacgcccttcgcattatccatcaattctcgatatcgaagaggtgcctttttttgattaatgattatttcacaatcagtctttaagatgtttaagcctacttcagaaatcggtcttgttaccaagacaatcggtttgttttttctcaacaaatattgtctatcgaggtaatgctatattatttcttaatcccctattcatgatcaagataaaaatcaagatattatgcatacacaacgactaaattatagtttatttataaccccgtgtcattcctaacgatcagaagtcttattctacactcaaaattctatatacattgctttgaacttaaattcacccatatttacatgagttttatatattaccatgttatcaagagaaaaaataaataaaattatacctccaaagagctgggaacttttcgacattattgtgataggagtgaactttcctatgataagggaatagatagaacgaagtcgaaaagtcttaacttgtaaaagcagaaataatgtacttcactttacaagcatatttttatagattactggttattaaatttcatgcaagatcgttctactgatgcgcaaaggaatgaaatgaattcaattagcaaaggtaaaagtcataagctcaaaaagagaatggaaaataagaatgatcctgataactcggaggtatttctgattgaaaaagatttcatggaattatcagaaaacttatttgcaaacatagttggatacgatgacattaaaaggatttttaaatatgcatttaattcatcgttaccagtccatatactgttagtgggtccgcctggatcggctaaaacgctattcttaatggaatgtatgaagctttctcgttcgtattttacattgggtagccatagcacaaaggcaggaatgttagattacttgtttaataacagaccaaaaaatctaattatcgatgaaattgaatatatggcgatcaaggatcaggccgctttattaagcttaatggaaacgggtatattaagtgaaaccaaatatgaaaagactcgaaaatcaatcatgaggacgtgggtatttgcatcctgcaatgacgaaaaaaaacttttaacacctttactttctcgtttctttgtgctttattttaagaaatatgattacgctacatttgagaaaatatcaaaccatattttagcaactgagtgcaatactgattttgaaatctcgactctcattgctcaattggtttggaataaactgaaatccagagatatacgagactgtatcaaaataggtcgaatttgtaataacaaggatgatgtttgcatgatagtaaacactctaaaaaggtatgacaatagaaatgctggtaatgttaagaatatttcatagaaaatgtatggcattctgtatttgaatttcttgtcaccttctgtatgtccaatcagtaaaatactttagtgtacttttttgattaaagcacaaaaaaatttgaaaatttttatctgtggtccaacgttatatgaaaaaagtcatttgggacatgcgagaatctttattttttttaattttttgatcaattatttcaaatatctggggctatctccaattgctgtcgtacaattgactgatattgatccgaaaatattcgataaaatgatggcatctgataatattatcttacctgacagtataactttacctcacctgacacaactaattaaggatttacaacaattaaaggttataaagaactttacattcacccgagtatctaatttccaatttcaaatgatgaaccaaataataaacttagtaaaactcaagaaggtttattcttatggagggaatatttatcttagaatagattcagatgtgcagagtccttttggcttcacagcagaacaattgaatgatatgccaattgatatctcgccaggtaaattaaatcaaaaagatataatgctttggaatgctgaaaatttttatgatctccctataaagggtaatgatcgcgctgaattctactttaggaatctagtaagcggaatccctggatggcattatcaagattttcaaatcataaaatctgtttttaacaataattacgatatacatggtggggccgaagagttaatgtatcctcaccacgaattcatttttaaaatatctcatcagatccaaaagattaatcacctgagtgaaaaaaaaccacagtggattcacataggcatattaaagatcaagtctaagaagatgtccaattccagaggcaatactatcactatcagtgatttcctaaacaagtattctccaaattccttaaaaattctgttcttgcttgagcactataacaaagaccttagtttcaatggtaggaaattgaggaatgcggttcagatagataatgaaatttcgtcatattttatgtcggaatcttttaaaaccgaaaatttactacaatcagtgaatgaatctgatacacaaaaattttccgagtttttgagaatcttgaacaataattatgacacaaaatcagcaatcagtcatataataaagtgtataagaggtctagaaagtgctagttacgtaaagaagatgaccgatctacttggattgtactataattgaaaaactgagatcaaatgaacttgaattctgtaagaattggagtgataaggcaatcgaattaaaaaattccgtccatattttagctaatggggatttaggagacgactattttcttaatcgtgtcttcttagttgacggaagtgaggattctaacacacaagaaaaggaaatattgtcaaacgtatcaagtttgaaagaaatttctaaaaagcagatacctactgtgtatgtacatatcgatgataactattcatctcataaatcaatattggaaaagaatggctttagggaaattgataaattgataggattagtccgagtggttaataatcgagaatccttttcaattaaagaatttggggcacaaaaatcactcttaaatggagaaacgtataaggtggtcgagacctcaggtgaattggatgaatggattgatgtttatatctcatcatttggaattgcgatggaaaaaagaaatattattcgtactattcttcataaagagaattttaggaatagcaaatttattttatctgagcaaaaatccatagataacataaatcagctgaatttagagccaatgggatgctgcatgttttttcccacaaataacgtcctaggcctttactgtttaggtaccaatcagaagtatcgaaataagggtatcgcttctagaattatagattttgcagtcgcatatgccataattaataatttgaattatctagggcttcaggcactatatagcgaccataagatagaattctatcaaagaagacaattcacaaaagtttataccaatgccatttattctctccctgtcagttagatttaatatatcatttggtccacttattaaaaatctattgacatttcttcaacgtatacaggatgacctgatttttccagtattcgtttatgaggatgagcatgcctacaaacaaagcttaaagtcaggctacatgaacagctcaaaggtattttcgaagaacttgaccattcggtttgaagagttagctcatcttaaaatcactaatttgttattatttgggattcctagaaatagaaacaggttgggaagtgaatcttttaataagaacggtgtgactcagagggcaatccaaacgataaaaaaaaattttgagaggaaatttaacattctctcagacgtatgtgtatgccaatacaatacaagcggtcattgtggtgttacaaaaatgttcccagagaatattaaacaatacaggattgaaacaagaatagataatgacaagactctagatattctcggaaaaatttcattgagtcactgcgagagtggttccgatttcatagctccttcttcaatgatggatggtcaaataatgtacctttcaaatttgttaaatcaaaatgggtttaataatgtcaagataatgagttattcagctaaacataattcttgtctatactccccatttcgtaattataactatcttaacgctagcttcatagacaaatcaggttatcaaagtaatttcaacaatcctaaggaatcggcaagagaaattctgcatgatgtgaaggagggtgcggactgggtaatgataaaaccttcattgtggtatatggatttaataagatcaattaaaaaaattatagacgtccctttggtggttcagaatgtctcaggagagtatgcattattaaaagcagggtcaaaaatagaccccattaaccagcatgaatggatagtccaatatctcaaaagtttaaggagggctggtgctgacaaaataatttcttatttaatgcttgacctgtttgttgagcttgattcgggtctgcgtttttaatttgaattctgattctgattggatttctctggataagagatcatctgaccacttgtagaatcgacgtagtattttgtattatttgccgtaatttcccagccataatgaataccgcccgttaagggctcaacggtattgcccagtattttgcctagttcgtgagtagttttatctgcttgatatacagttccattagcttttaccattacatatgtagatgtaaatttctgatcaagatcttcaaatgtgatatttcttagttgatccatggattgattaaaaacgtcgtgtagaattattatataagcttcttctgggatgagcttgccagaggtagaattgggttgacttaatgaataactcaataccaagtacattgcaaaagtaaatccaatggacaatagaattatgaatattactttattacgggcaatatccaatttcattaagatatattattgactaaaaaacactatatattcattgatttatggctttacgattagattatatatcatttctattaaaaattacctatcccgcggtagctcagcctggtagagctttcggctgtagttgttggcagattattgctaatcgtacatcagcctatcaggcttacattcaacagtaaccgaagagtcgcaggctcaaacaaaaaataagagattattttttggagtaaatcctgctcgcgggatacaaacaaatgaagatttttttaattaggatttattatggcccgtccaatgattttaccgttcttcaaatcatttaaagcctcattgacctggtcaagagagaatcttttatctaagactgtgcgtacttttccgtcagacgcaagggttaccaattctgttaaatcctgaaatgttcccgtataagctcctgtcaaagtatatcctctcaaaggaatcattggtaagttaagttccatcgatccaccaaataatccaaccataattagcttgccccttttccgtaacatgttaaatgaattcacagatgtaatgttattatttacaaagtccaagaccacatctgttcccgatccattggtaagatctttgacttcttttaccacatcttgtttctctttagtattaataatgttgtctgccccaagcttttttgcttctgccaatttttgatcattcacatcgataacagttattcttgatttgtaaatagcttcagcgacttgtacagccatcagccctagtccaccagcccctactattacaatattatgattatcttctagacttggtataggctttgctttttttaccgcattatatgctgtcaaccccgagcaggccagtgacgaagcagaatcaaagtcaagccgttcaagtttaatcagaaactttgaatctggaattaaaacatattgcgcatatccgccactttgataaattccaagagttcgtggattatcacataggttttgttctcctgatatgcaagcaggacaggttctgtcccctagccatggataaaccaataccctgtcacctaaattaaaattatttacagcattacccacttcttctattgttccagatatttcatggccgggtataagaggaaatttaacacctctatcctcaaccttcataaagacgccttttgggccggcatatcctccctcccataaatggagatcgctatgacataccccagatgctacgactttgaccaaaacttgattcccttcaggtttgggtttttcaacttcattaattactaatggttcatttgttttaataatttgagcccctttcatatcaaaatcaaggcctccttgtttaattatctttgctaataaatatgatattcaaaagaatatattaattcaaatgctaaaactattgatgtcaatgatgacgacgaagagccgtctgaaatttcatggtgacgaagattatgaggtactgagacatcaaaatttaataggatgaaataatagatatttttattcgctatctaaaatatcaatatcacattcaaaatataacgcaatcatattaatactgtgtccaacggcctgcagtttgggttactacagaagagtcaggtagtaccggtgtagatactattgcaatgcttggttggtttaaatttctagagcttacaagttactttgcaaaccgcttaataatcctagttaatgaaatatcaaaactcatgagatgtaaaattatatacagtgaagttcatgataaatcaaatttaatgaattcgatacaacgattcctactatgttcgatatatagtaataatttgatagataaccaaatttctaatcccatattgccatatttaactaaaaaattggcatttgatatcaccttttataaaaatcaattaacagaacttgaaaaactgggcttaattgttacaaaacaaattggatccgattccgaaaaaagtttgaacaatatgacttgcatacttacgaatttaggtcgtgaacagattaaggttgtgcttgtaggaggggtgtttgatctacttcacgttggtcatattcatacactaaaatctgctaaattattaggggacgtcctaattgttgtagttgcgactgactctacaattagtaccttgaaaaaaaatcgcaagatttaccatgacgaaaagagccggttagagttagtttcgtcaataaaatttgtagacaaagctattattggaagaaaaaaatccatttatgatacagtcgaattcgtgaggcccgatgtcattgctttaggttatgaccaaactcatgatgaaatagtgatgaaaaaaaattgttttgatcgtggcttgactcttgatgttgtcagactttcctccccccttccaaaactaaaaagttcattaattaaaagcgaattgggaaactctttttatgaattttaagtatttcccacagattctttaatctttacaacaacgttatctccattttttagatttgatgattcttttatgttcaaagggccaatgacctctattagattattgttatgatgagtcctttccaataaaagaacgtgaacatcatatgaaatatcagttgtttgcgattgggtcaagtcacgagagtatcttgtttcttgagatatagtggctgggtagcatctcacccagccaaaagtcctatccgaatttttgaaaccatcaatgaaaatagaggggtaatttatcaaatcttttcttgaattcatataattcttatcctcaatttttacgttaagcgttccaggaaatggttcataacccaatttattttgaaactgtttcttgtacccctccagtgacatgtaataagcaccttctcccatcccagtaacgattttacctttaaaaagcatggacttaatttgagatttctccatagatacttttaacaaattataaatattctgtaatatttcacagccggtttctgtcagtttcattccaaatttttttttattttttactctttctattaggttctctttctctaggtcgattattatttttgaagccgtttgttgggatctattaattatgtgacttatttctgtactcgtaatttctaaataactgtctttccctccatttgacaataaatgaatcattactaaaagatgaaaatagttaaagtttgaatactctttaaccatcattatgcaattatctactactgattggctggctaatcaaccccatatctgaaaatgtttgaacacgaacatctgggtttaccctttttagattgctcgttctatgacctattacatactttatacccgatttagctgcagcctcaacgagcctaggggtaattatgccgtctaatattagtagatttacgtcatttaagctagatattttcttcattatttctgatatcggaattttaactatccttttcattgacttatcaaaacccatcgcttctaaagtttcatttatttcttgaaatacttttttaacagtggagataatttcttcatcttctttcgaagtcgtgctatcggggattagcatttgcttgctactgtcataattattatttttgttgaagctttgattgttaaaatctctgttatatgggaatgtgttattttggtcttgattatttaactgattctgggaatgatccactctatgagtattcctaatttgttggacattcgatggaacggtgttcgtgtcgttgattctatctttcataagctgttctacatctttcaatatttctgaaatctccagcggggtgcactcctctacctccctaccggaaggagctctgtatactttctcaatatctaccagcccttgtaactcctttagtatcaaatccccagcacgatctccgtcaataaaagcaacagtccgttttccctgggtcaattttaaaatagtttcgtcaatttttgcaccttctattgcaattgaattatcatatcccgctcttaagagattgattacatctgcacgtccctctacaagtattatccaatcgctatcaaaaacgcctacaccgcatgctagttgggccttcccaaaagttgtcaatctgccgggtttgcttgcatcataaacatcctttaacatttcttctccttcgctaatggttttggttgcccattcttggacaatttttttggctctatctactattactttcttctttatcgctctaatgtcatcaattccaaccaaagaaaattttgcttggaaaggtcccactttatcaatactttcaatagctgcagctatcaaagctgctgtagaaatatcagtactcatgggaatcaaggcatctccacgtgctgagttagacttggtatctacgtttacttcaattcggccgaccttcgaaaccttctgtagttcgtttaagttcatctctggacccaacaatccttcagtttggccaaaaatagctccaataatatcggccttctcaactagtccatcaacatcaaactttagcttgacatgatattttacaataccagtatttggcatttttattacttcgttattaactttattgatcatatttcactgattatcatatctataatggcttaccttgattaagttttttgttttaaaatttttacgtgattaatgacacttttgaatttttacaatacaaatcttatgtcgaccataaaattatttaattaaactttttgttttatttaatttcttgacatactattgtagaatgattttaattcctcaacggtccttatttttcctcgtgtaatattcactattctgtatctgtaataattatcaatatacctttgatttaataacagcgagatttttctagtcattatttcaccactatgatccaaatctaaaagcaaaattaatttcttatatttatttctgaaattatctactaaatttacaatatttttatagttgtgaaatgctcgaatgtttccagaacaacctaaataatacaatgcttccaaatctcttttaccctctaccaaaatcaatgaatctgtggtggattcactgtttatttgattgacgaattctcttagttctcttaatttctctagtcgctgggtgcgatccataattccattccattatagttacgagcctactctcttcatttttgagccgcactttggacaggaagattgattatgttttgttccacagctcatacaatagtagcttacggaactcccattccctccgaatacagagcctgccatgcccatctttttcatggctctatttctaatgtaataactaagcaaaatgaaaactactattattaccggtaaagataacggaaaaggtagcaagaacgagattgcaagacttattcctaaggatataccaatccacaataattgttgagacaagaattgtttgttattatctatcactatctctcagtataataattaagaaacattatatataaaatgtttcccataaagattaaggcccacaatttagctatattctgcgtaatacttgtatctcttctccacttccttattcttcccttcttgaactatatcgatttcttttctcaatagtttcttggaatactcaataaatctaattccctcttctgtagttggaaatttgcctaacgaaaattgaaattggtccataaattcaattactttatctctaaattcttcttttgaaggattcttgtaactattgactttaaaccaggaaactgctaattgagaagcataaagccttgctatatcttcaactaatctgtcaacttcaaagtaatcagccaccaggtaaacccactttgataatttataagttttattcgatgtttctaaatcgttaaatagaaagataaaaatgtgaatgatttctaaaaaagttattatgccaattaccgatgtaacaaaaagaagtattgcgcagcagcgtcgattatttttcaaaatctgttttaattgtggcgcaaaaaatccaataggcggaactcgatgtagaaagtgtcacggcagtcaaatgagattgaagaatagaaccctaggtgcgaagaaataatctcttggttggcatttatttattgtaattttttagattttaaataagaaaactttaattatcttttttgattcctacactttgagataacaaataatatgaagtacccaaaggttgttcttaccgctgatagaacattaatgtctccctatcgaggaatttcacttgcatcattttttggatgtgctcctgcacttgatccaaatcgtagtcatgattctatttggtataagattttaggaaatcaagttactcctaaattgctttttgattttatttgtaaccctattgctaattcaaacggattggccgattacgcaccatatggcttgagaaaggttgaagcagcattactgagagatggatatgcaaaggacgatgtagttgtagctcatcccgatcatattgacaaattcattggaccaccgaccgaattcgtaggtacatatgaaatggacccactaggcatgggtccggttacgatgacatttacttatgggagaaaacaaatgtcctacgctgagttttataaccgagatcttcatcatcgaattaatgctgccaagcaaaagaatggaagcaaggcaaaagtagtggtaggggcctccgggacgtggcagtataattatgaccccgccaaaattgaagaatatggattgtatgcaatcgttgagggagatttgggaggcattggacctgaaattgatggagcaggagggaggttttttgatgccatgatcaataatgagttggaaacagctaatccatttaagaaatccgagtttaaagttgaaataaaggaattcgatagaaacggtagaaaatatcacggtagatttgttcattattcaagagaaccaagcgtagctgaaattccggatatagtcaatcccagtatgcatggaatggttgaagtgatgagaggatgcggaagagggtgcaaattttgcgatgttacacttcgaccattacgctattatccagtagaaaaagtgcaaaaagaaatccggatcaatatgaaatatggtggattaaagaatgcttggatccatagcgatgatatttttgtttatggtcttaatccaaggacaaccaaaaatatgcagccaaacagagaagcaattgaagaactattcaaagggattatggaaactggagtagaacatactaatcctacccatggaacattagcgggtgctattgccgatgagaaacttatacccaatctttcccgaataatcaaagctggacctgctaatcacattggtgttcaatgtgggttcgagacaggcagcatcagattgataggcaaatatgccgacagaaagttggctccatttagaccgtctgaatggcattgggtggtgaaagaaggtgtaaaaacactaaatgaaaattactgggtacctgcatttactcttatcatgggattggataataatgagactgctgaagatagttgggagactatccaactgatacaccagttagaaaaggaacaacctgattctaaattcaccgtaacgccattgacttttgttcccattggactgttagaaaagtctgacttctttgatatagggaacacaatggatccagcaaaattaggtgttatgtataaaacatggcaacacaacttcaaatacgccattcacaaattcatgcataaggttggccaaaatgatccaataaagaaattcttctttgcttcacttgctaggacgttaggaggtgtgcccttgaatgcgatggaaaggtatgctcgtaagaagagccctgaacacgaaaaagtaattgaaaaaatcaaggcacagtatgcatagagttgtctaattagtattctttatttctagtttacttaagaagggttcaatctctgaataaatcgggctagagactgatttttccaacttttccttcattgccttatttgagaaaacaatgatttcatatttttctttaccatcttgattgataagagatgaatgtaagaatcttatggccgtttcattatgtgaaacaacgattatagtggtttttccctttacccttttagataatttattgatataacgttgaaaatctatatcaaaaaagggatcaataacgttttcaacatttcctataatggtagaatttaggccatctcgccgtgtcaaaacatcaatcattatgcagataggtaaagattcgtcgtctccagatactaatacaagtaaggagttactgaagcttcgattactattactatttgttttaatattatttctcaataatctgaatgagtcggtaagattggtaagtaagtgaattttttctgtttttcctattttccctctgttatacaattccagaatggtattcaaaactgggaaacaaacatctgtgaaaattttcctcatattgatattccggttgataagacttagaactatattgtctgtgaattccttttgaccattgatgagggattcaatgatcttttgctgaatctcaaggaaattttcatccttcaaatctaaattgataattcccgggtctaaaaaccaaaagtttacagagccaattcttttcctgtttaggattttttgaaaatatagtatatcaagatatttggatatcgtaatacgattagttcctagtttgtttgaaatttcactactagacataggattattattttgtaagagatctattactcctttctgaatatcgtataaatcgtacttcttatacattggttacaatgatttggttggaatcatttaaaaagaatttttttgtgtactcgatttacaaacttcaaaattgcgatgccaattcataaatcttctcgtaccaattttttgactttacaatgctactagctgcaagtatcccttttgagcccaattcgactgcgattcttatgtcttctgatgaatttattccggcaccacaaattaactgcgaacggcttcctactaattttaaatgttgaaacgaattagttattaaagatggcctttctgtagcgatagattttttggttccgattagatctggaggttctatggctacatagtcgggccccatagaactaatatctcttagttctgccaaattttttgcacatacaatgctaagcagacccagtgaatgcaatctcggaatcaagtctcttataatattctgatttattggatgttcactatgatttattattgaaccgcctccacctgcatctttaataatctctggaattgaaaaacctgtacttgcacctggttgatgggcgtctacatgttgtgctattacacttaatttagtattttttgccagccatgctaataggacttggggtggcgaaaggataatttcagtatcggtctgctcgctaactcgttccgcttcttttgtaagagataaagccttatcacctgagatctctagatagtttttaaaattgatgatgagcggtccctttctcgttgacattggggtttgtggcaatttatttgaatttttcattcaatttagtcattctagcttcgtatcctttgttatattctaattcttcaggcacaagcgttgctggatgaataaatccttgaactctcaacatcgttgcacgctcagatgctaacctacgttgatattcccaatcggctgtcccaaatccgtcatggggaccagtaagccttccattgtgcatactgaataataggcatgaaactatagggattgaataattcaaacttgctgcagagtttagcgaaacgggcataaatggcatgtgatggctacctcgagtatttcctgctactatgtgaggatcattaaaggcacttcctgcttcttcggtggcgggaaaattcttttgagttcgtacgattgcaattggatcatcttttccaacatatgtaccggcgatattatgaagcctatcagtagaacttgacacaatttgttctcgctcgtgtgttaacacagaatgtaccacatatctgcctggatacatcaaagctgcctccagctctggtttatcattccataactttagatcagcaattttgcctgacatcacatccatgatcctaaatattacaccttctgcaagctcctcattaataatcaaacctgtattgcttctcgcgtcaacaaacattctccaaaagggaaaattataagccccgggctcagttttatctgctgcaaatacgcaaaatacttcactgggtctttcttccatttctatctcggcaactcctgggcccattccttttacatttccagagaatgagtctttaagtaaatcttgccctgctccgtataaaccctgttctttagctatttttgtcccctcggtaaatgcatcccaggcaagtttgtgaatctccttattatctgtgcctagcgtatgtgtcatcacaatatggatatcatcgccggtatatccgatataactatcaatcaacattccttttccattttttaggataaaatccctaacagtttgaaccaatttatcactaggtctggtgtgtcctccgattcctccaatgtctgcttttattgctgaaacagtgatcctcatactcaacttggattctaagtgatttaaaaatttttgtttcgctcgaaattacaatacttaatctatgttcagaggattttgaaacaacaagcttgttctctttggtaaaagaagaaaatataatgatttgttaaagttattttttactaatgactaaactattctgtgattaatatcattatttgttgccaaaaaaagtaaccaataaatatccttagcattactttactgtcatgcgtgacgcaaatttaataaaaataatgatcgaagaaagagctttagtgaaattgataaagactatcggagaaaaggaatattcaacaagagacttattgaagaaattgggggcctatgggtatggtcataaattactcataaaagctgaagataaaggattagttgaacgaagtaacgtaaaaaacaagacttataataaattgacgaaagaaggtaaaaaaattataagattggctaaggagatcggggtatagttttattttaagggattgataaatcattctgatctgacgattctttcctttttatttcacaaagattaaattattagttatacaacggacgcgtattaatgaacaaagtaattctagctttttctggtggattggatacatctgtttgtgtaaaatatttacagaatcttcataaacttgatgtaatcacgcttactgttgatgtaggtcaaaatgataactttgatgaaattaaaagaatttcaacagaactgggtgctatcgaacatatttatattgactcaaaacaggaattcgttgacaactatgtaactccagcaattaaggcaaacgccctttatcaacaaaaatatcctcttgctacagcactagctcgaccgctgattgctagtaaagctgttgatatggccaaaaaatataatgctatgtctatttctcatggatgtacggggaagggtaacgatcaagttagatttgatcttacaattagatctctggatccgaatttgaatataattgctccaattagggatctgaaccttacaagggataaagaattgaaatatgcaagtgagatgggtattaaaataagtgaaatagctaagaaatatagtattgatgaaaatctatggggtcgagcgatagaaggtggactccttgagaatttagagaacgaacctttgagtgattcacttaaatacgttcatcatgacaatacctctcctgaatatataacgatcggcttcgaaaaaggaatacctatttctatcaacgatcaaaaaatggatctagaaatgttgatcgctgagctcaataatattgcaggatcgcatggagttggtataattgatcatattgaggatagaatagtaggcataaagtcgcgtgaagtgtacgaagcccctgctgcactcgtattaattgaggctcacaaagatcttgaaaaattggtattgaccaacttggaacttcgtttcaagcttttagttgatgatcaatgggcatggctatcgtattcaggattgtggcatgatccacttttatccgatttgaatgctttcatcgagcgaactcaacaaagggtaagcggcgaaataaaggttaaaatgcataacgaatcctatcgagtagtagggagaaaatcgatgttttcactttacaataatgacactgtaacctatatgtccaattctaactttgatcaaacattagcgagaggatttgtagcactttggggtctacaatctaccgtagcaaattcaaaaattatggaaaataaggagtaaaaatggtaaaattagatatcctatttgataaattacgattcgaagaaaaggctctctataatactgcaattaagaaaggaatcaacgtacggttaattgattcacgaaatatcatcattgatacggatgatttagattcaaatgaattggaatttgctgatgtattgttgcaacgcagtataagccactttcggggacaatttctgacctattgtctagaattgtgcgggtataacgtaattaataattcaaaaattggagaaatatgcggaaacaaactactgacttcaatgatacttaagaaaaacaatataccgacccctaagtcttatttctcatttaattctgattctgcctttaactttataaatactaaagatttggaacagaacccattagttttcaaaccagtgattggatcttggggacgtggtgtatttccagttcggaataaagaaatagggaagataattgtggaaatgaggcaagaaagtcctagccctttctccagtattttttattttcaagagctcattcataggcccccaagggatattcgttgtatagttgttggtgaaaaattaattgcagcagtatatagatattcgtcggacggcgaatggcggacgaatgtcgctaaaggcggtaaggttgaattaattgaatctacatccgaattggaggaattggctttaaaggcagcaaaagcagtaggtattggtgttttgggtatagacatgatggaagatcaaaagcggggactagtggtacatgaaataaataacacagtagagtttagaggagccagtctagctaccggtattgatgttgctgataccatcgttgaatatgcaaaagattgtggcaaaagatagaaaaaataatatcgacaaaaaatttaaatgaggattattgaacgatttattatttatgaaattcattgttgctatatactttttatttgaaaaagaggtaattgaatatacattgaggaattctaaatgaaaattggagttataggagcttccggttttgtgggtggagagttgcttcgtctgttagtgactcaccccaaggtcgaggtctcgatagttacgtcaagacaaaaaaaaggcgaatatgtacataggattcatccgagtctcaaaagttttattaatttaacgttttctgatcttaatcttgataaattaacagacacatgtgatatagtttttgtttctgttcctcatggtaaatcaaataaaatcgttaacgagctttataagaggggtatcaaaataatcgatctttctgcagattttagattgaagaacccagacgattatgtaaaatggtatggatgggaacatccttatcctgaaatgctgtctaagtcggtatatggagttccagaatttcatagagaccaaataaaaaatgcaaaactggtttcatgtcctggatgtatggctgttacgtcgatcctcgcattaaagccgctaattgagaacgatgtgatagataccgagcaccttgtagtggatagtaagataggctcatcaggtgcagggggacaggcgaattcagcaacacaccatgcgatgcgctatggagttattcgaccttataagcctgccaaacatcgtcacaccggggaaatagaacaagagctaagtttgttgggtggcaagaaaattcatgttagtatgacccctcatgctgttaatatggtaagggggatattgacaactaatcatgcatttttaaagaaggatctaagtgagttagaactttggaagatgtatagaaattcgtacaacaatgaatttttcgtgaggttaataagggacaagaacgggatttacaaatttccagatccgaaatttgtaatagcatctaatttttgtgatgttggattcgacttggatgaagacaataaacgaatcgtagctatgtccgcttctgataatctgatgaaaggtgcagcaggctcagcaattcaaaacctcaacgtaatgtcaggatttgatgaaatgactgggctaaaattcactccagttactccagtatgatcgttatcaaaataggtggaagcatagttgagggattaaacccttctatcttggatgattttaatgaattagtaaaagaacaaaaattggtaatagttcatggaggcggaaaggatgttaccagtatcgctaccagtatgggaaaggaacagaaattcataacatcgccagctggtaagcagagtagatataccgataaagaaacggccatgatttatacaatggtgatgtcagggaagattagtaagaacattactgcgatgcttgaaagtaaaggcatatcatctgtaggaataagtggcattgatggtgaaaccataaaggcataccgtaaaaagaaattgatgatattaaacgaaaagggaagaaaaatgataatagatggaggttacactggaaaagtctcaacagtgaatcccaaattaattaattgcttattagacaacgattatgtcccagtcgtttctccgatagctattagcgatgagtttgaatttctgaatatagacggggatcgcgcagcggccaatgtagctggagccttaaaatctgatgtaataatcttcatcaccaacgtgaatgggctttttatgaatgataaattagtatcgagtatttctctagaagaagcgaaaaacatgctccccaaaattggacctggaatggaaaaaaaagtgcttgcttccaccgaggctttgtctatgggtgtaaaaaaagctataatagcctctggttcggtacaaaatcctataatgtctgctcttgaaaataagaattgtacagtgatctcatgatgcatgaggtagagaatgaagagtcctttgtaggtagtttgtatcagaggtttcctgttaatattacaaaaggaaaaggatgcaaagtctgggacattagcggtaaagaatatcttgattgtatgggtggatatggagtagccctagtaggtcattgcaatgatcgggtcgtaaaggcaataacgagtcaagcccaaaatttgattacctgtcatatgtctgtttacaatgacgtccgtattgattttcttaagaagttctctaaaattgctccgacgaatttacaaaaaacctttttcacaaatagcggaactgaatctgtggaagctgccttaaaattttccagaaaatacactagtaaaccaggcgttttagccttaaacggtgggtaccatggaaaaactttcgggtctctgtctgtaacctataatgagaaatatcgaaagtcatttttaccattattggatcatatgcaattcatttcttattctgaatctaacatgatttcagagatcttgacaaagtcggataaaaagataggcgccgtaatagtcgagcctatccaaggcgaaaccggaatcattatgccaccttccggttttctaaaagaaattaggaatatttgcaatgaaaatagcctcgtacttatttttgacgaaatacaatctgggctaggacgaactggaaaaatgtgggcaggtcagcattgggaagttgagcctgatattatgtgcttggcaaagggtattgcaggcggcgttccaatgggactcacagtcatgcgttctgaaattttagactgtctgaaaattggagaacattcttctacatttgccggaaatccattagcgtgcgcagctggttctgccaccattgattcaataattgaggataagctcgtgtcaaactctgaaaaaatgggtcgtatctttaagtcaggtcttttagaaattaaagaaaaatacaagattattcgtgagattaggggggttggaatgatgttgggagtagaaatgaggtttgatgtgaaagacattcttcttgatggtatcaaaaacggtattttattgctctattccggtagaaacattttaagattgctacctccaatagtcatgaaagaagaagaagtgaacaagtctctggaattaattgataagctaatttataacgaggagagaagacgatttggctgataatctgaatagtatagatgagaaaataatagggttgctgaaaactgattcacgcaagtcgtttgtcgagatcgcaaattctatagggatgtcagaatccgcagttcgtcgcagagtgaaaaacttgcaagacacaggagtaatacgaaagtttacaatcgacatgggtccttcaaataagacgagtgccataacgctaatttcagtaagctcagtagctgatacgtctaaggtgtctgaccaattattaaagctcaagggtattgaaatagtatacgagattactggacagtatgacatagcaactataatagtagctcctaccatattagaaataaactcgtatattgatgaaatacgtaaaattgacggagtatcggatactaatacggtcataatcttgagaacactgggaagcctaaattagatatggttagcacagtaaaaatgttattgtcattatccatctaatttatcagggaattactattaacgcttgatatctattgttttatcaaaagacattatatagttgatttaatttattttttaacgaaaacatacattaaataaccgattatagtaatattatatgtcgaatgtcactaaaaacagatgaccctaactattttgctcatcagtataatgattctgagagggataagaaaaaaatcagaatcctagactctactcttagagaaggagagcagcatcccggtgtatcattctccaataaacaaagaatccagatagcttggatgttggattcctttggagtagatcagatagaaattagtccgatagtttcacctgatcatcacgaagcgaccaaaataatcatgaagcaagggttaaaagctgacattgtagcacatgtaagagcaataaaatctgatgtggatagagcactagattgtgataccaattgggttgcaacatacatgggaatttctgatattcatttgttagcaaagcttcgaatatctagagaagaggcgaaacagagggcacttgaggtagttgattatattaaatctcatggcctaaaatcgcgctttactatggaagacgccagtagaaccgacccggaatttttactagaaatgtgtagagaaatgaatcagagaggaatagaaagaattagcattccagatactgttgggatcatgaggccacgaggaatgtataacttagttaaaatggtatacgataatatagacaattctaaaacttctttagatgtacactgtcataatgatgtaggtttggcactttccaatgcattatcgggatgtgacggtggagctgatcaaattcacacaactatagatggacttggtgaacggactggaattcctaccttagctgaaactgctgttgccttgaacttaatctacaaatccaataacagttttagactgcacctcttgaaggacctgtctcgaacaatatccgactacacaagcattccaatccatgaatcaaaaccacttgtgggggacagtgcttataaacataaagcgggcacccacttggcagctatactgagaaacccctcagcatatgaaatcatcgaacctaaacaagtagggaatcgtcgtaaaatagtgttcggggagttgtcagggaagaacggctctgcctatttattatccctccttggtttggattctaacaaagaaaatgcagaatgtttggccaagggtttgaaagagctgcggatgggtgatattttggaactatttttagacgaaaaattggagagaaaaatacttaatgaggattatgtcaaaaataataaggaataataaaatggcaaaagttaattgtaaggaatgtgatgcggaaattccaataccagctgactcgatgcaaggtgaaatcgttacctgtcctgactgcggagaaagttttgaattggtaaaatctggtgacgaattcagtataaagcctgcgcaagtagttggagaagattggggacaataaatatagaggaaggtgaatcttctctctatatcctttttgacaatatacgttgggaggagaaatccattatcgaaaaagcaaaacaaagcgatttggacctaaagcctattgattgcaaagaccttgtacttttcctaaatgaagatacgaaaagatttaaggagaaagtcattttacaacgttgtataagctattttagaagtttgcattcaacggccggactagaaggattgggtgcaagaatgattaattctttgtatacgtcattcatgtgcggcaataagttaatttctcatatagaactccaaaaaaatggaatacaaacccctaccgcaatatgtgcctttaatactaattcatctctagaaggcatcaaaaaatttggttaccctgtagttataaagcccactgtaggaagctgggggcgactaattgggctattaaatgatgaggaagcagtgaaggcagtcttagaagatagagaacatatgtttcccatttatcacattaattattttgaagaatttattaaaagaccacctagagatattcgggctatagtaattggtgataaagttgttgccgcgatctataggtattccgggaacaatgaatggaagactaatatggctttaggtggtcatgcttctccttgtcccattacgacagaattagaagatatttgtataaaatcctcaaaaatttttaagggtgacatagtgggagtggacctaatggaaagtgaaaaatacggattagttgttcatgaagtaaataatactactgaattcaagaatactgtgcgagtaactggtgttgacattcccggtttaattttggattatatggtaaatattcataagagataattatctaaaaaatggtatctccaaattttgctatagagttattaaaaaatactttggaaatctatactccatcaaggtccgaatctcaacttgccaatttcttgaaagatatttgtatggatttaggttttgagagcgctaacattgacagcgttggaaacatgatcgcagttagaggaaacggagaaccggttattctcctctgcggccatatggatactgtcccagggattgtacctgtcaggctcgagggagattatctgtacgggcgcggtgcttctgatgcaaaggccccgttaatttcaatgttattggcagcggcagacattccaaaacaagcaggcacatttattttcgctgctgtcgtagacgaagagggaaatgccacaggaataaaaaatctggtaaaagatactacattaaatcccgactatgctatatttggagaacccagcggaatagaaaatatcaccatttcgtataaaggtcgtcttgaaatccgtctgatgtgtgatgtcgatgatagtgcacatgcgagtgcaccttggctgtcattaaatgcaatcgatgaattatacaatgtgtggaatgatttgaaaagcgtatttcagagtaaggaattagctaacacaaaaagcaaagctgatcagattagttacagcgtcacggaaataaatggaggtacaagtcataatgttactcctcaaaaatgtagaataactatagatatacgtattccaacgaatttatcctgcgacaaagtattagagctgattgatatgcgcataaatgagattaaaaatttcattaaaggtgtaaagataaagtatcgagtagaggataaaaccgaaccctttcaggctaacgtttcctctccgttggtacgggccttagttttatccattttggaacaaagaaaaaaaagacccttattattaaggaaaactggaacaggagacatgaatatcctgggaaatgttttgaacattcctgtggtgacttatggacctggcgatcctcattcatctcatacagttgacgaaaaagtgtttgttcccgactatttgactggtgtagaaatttacaaagctgcattatttcatatggtcaggcttcacaaaaatcttcaagaaaaatcaaatacatacagctgatatgaggatcggtggcaggaaccatacattaatataaattagaataattaacgggaagaattagaaaatgttgtatataattggcatcggaattaatgagttcgaatccttatccttaggatctttggaaatattaaaaaacagtgatataatatatgttgaaagatttactggatttatttcagatgaatttatgcagaacctgtcaaatttactgcgaaattcacgtgattctaaatcaagaaacgatattgaaattaagttcattaagaggtggtttatcgaagatggacgagaggttcttgaaaatgctcaaaaatctcttatatccatcttagtatacggagaccccttagtagcaactacttacaacgaattacttgtgagggcaaaaaaacaatccatagaatttagagttgttcattcctcttctggaatcctttcactaatgggcgagtccggccttcaaccttacaaatttgggaagatggtcaccatgatggacgatccaatgtcttctattacagtatacaatacaatatatgaaaatatgtgccttgggttgcatacactaatacttacagagtacaacaatgatgatgaaaaaaataattttcagtcaatttctgatccattcttcttgtcgcccagcagagtcatggatctattactagagagagaaaaagaaatcaaactcctaaatttttctactgaaacatatggtatggtggccactaaaataggacatagggagtcaacctttaattctggaacaatcaagtcactattgaagttagaatataggggtggtcccaattcgattattattcctggaagattgcacttcaccgaggtagatgcgatcagatatcttactagtatgttagatgaaccaactgataacactgagcgtattcaccgattggctcacaggatgctgaacaagtacattcctaatactaaagccgctgttgataatatgtatcagcttattaaaagtgagttaaatgggctatcaaaagattacgcacctgtgattgaaaatgccgaaaactatttgcttgacgcacaaaatttttacaaccaagggaggcttgaactagccatactaagtgtggggtacgccgaaggtttaatcgattccattagatttcagaaaaatatgaatccttggtaggtttttgtatactaattttttatagttgatagtttagaattgttaatagaatatcttagtttaagatgtattaagtaatgtccgagagcaacagaatttcttccaatgatgatgacaatagcatcaatagtacggacgtcgatagacccaaacggaataagagaaatacaatgggtcatttgccaagtgagctccttaagtttgtcaaaaatgaatcatattcgttacttataaaaggtaaaccagggacaggtaaaactacatttgcactcactctattagacaatcttaacgatggtagtaactacttttatatttctacacgtctgtcattaaaacaactattattttattacccgtgggttgaaaaatttttctcgaaagatgagaataagtctggttatagatttgaagacgcgcgcctagatgaaccagaatcattatttgaaagaatcactaatcaattaatggatgtaaaatctccagtaataataatcgatacatgggacactattgcatcatttatggatcgagagtcgagactaaataatgagagagtgttgcagatttggagagagagggcaggagctaaactaatctttctaagcgaaactttcgatcttggaattttggattcaattgttgatggagttgttactttggataacagtatttcggattctactagcaacagacaattgacaataaataaactccgagggttatccattagatgtagcagttattcttattcattatatggcggcgttttttatacgtccgacttgattaaggatttaaacttattttcaactcttgaaaaaataaagcccttctatgagaggtcaaagttgattgttaataaacaatcaaacaagtcaaagtctaagacaattgatgactttgatgtacaagaactttttataaagaataattttatctcaatttttgtaggagataatattaataatgaattgttaatatcattattattaaaaccaatttgcttctggatgaacaaaactaacaacaaaataatgctaaataattttggaaccggtttcaaatatttgtgtgagagaatcttaagttatcacttgtctaatgaagaggttatagacaaattattaaaacaagaaattaattttacagactcattcggagtccttaggaacaaacatgagaaggaagaattaagtaactatgatatccgagctattaatgataagataaaacttacaggttcattaaactcgcagacagatccgaatccaaaactgtatgattctctgcatctcaaagaggaaacgaatatactaaatattttaaatgcatctaacttactatctctcttaaatgatgaatccttcttaaatctactacaacacagctttgctataaatgtaattgtcattaggccaccggaaacgaatatgaaattaggcttcttagagaaaggcatacacctggaaatgaacttggtcggaaaaaatattttgataagactttttgatcgtgatatcatattgtttgaaactatactcgatagatctcgcttattcgtggaatggcgtcatattctttgatcacattttatctgcaaacatcaataaatttaatttaatcaatgcataacattatcaaatggaagatctattttcggtttttgattatacccttgaagaaagtagactgctggtagaaaagattacctcaattcacaaggatcaaaaattccatggttttttttcagatgttggtatgatttcaggtgactatcttaattttcaaattccagacaatttagtcgtggtgggagacttacacggtgattttagatcattaaaaaaaataatgtacaagatcaactattatcagtatttaaagagcgagtcaaacatactaattttcttgggcgattacattgatagaggtaaatattctctggaggtattgcttttcctttgtagtattaaatctatgttccctaccaatatattcatgttaagaggtaatcatgaagcatatcatcgatttccattttcctcctttgattttctcaaggatctgcaaaacaaatttgatgattctggcaagacactctatatcaatacaatgataccatttttcgattcactttctggtatttgcgaaataaatgggttttctcttttggtacacggaggtgtacctgtgatacaggataatgagtttcttagaaattataaatttagaatgtctaacatgaattcagaccaagaattattgcaagaaatactctggaatgatcctcgggaatttaccgatagagaatggcaggtctcaaatagaggattaggtaaatactttggaatcaatactacaatgagttggatcaatcatactaagaccaagttgataataagaggccatgaaccttgtatgggatataaatttaatcacaacaacagggtactaacactgttctcatcaaaagatccatatccaaagtttgaatcctcatatctagaaatttcaaaaaaacaaattgaagcccttgagctaactcttgatattaaggaatttatccgccgaacttagcgtatttttttgttatagactaacttaaagctctgtctttgactttatttctttacatcttttccttaatgaaacagttgaaatttctgcaacttgacatatttctacttgtcttaagaattcattgcaattctgggaagctagatagattatagatcctgccaaagctcttggattcttgcctattgaaattctgttttgctggaccagcgaaaaaattcgtagagcttctctttttgtcttttcacttagttgtaagcggttacatattagcgtaacataatccggtccgtgtaagacaggcatctggagtgagagttcttttagtatcagtttgtagtgagacattatatctttggtggttatattgcaagcagttgcgatatctgtaattgttttaggtgtagcagtttctctgcatgcagcatataatgctgcccctaccaatcctagagttgaacgtccctttgctagtttcttgagcgctgcttttctatatatgtaagccgctccttctatcactgcctgactgagatacaatttatctccaaagttattcaaaagttttaatgctttctctaaattcctagaaacagaatcattgagttgagctctattgttccaagttcttaatctttggatattatttttttgagacgaatccaaagctttccctctagcgtcagtgtctccgattccaattaatgtcgaaagccccttgttatggattgcaagtgattcaggcatacctgttcttgtcctgtcattatatccggaattatttctaaaacttgccatcgagtcagaattggggtcttgacttgatacacaaccgcaagatgagcatacatattcgaaagatacattatcaaaaataacagaatcacttttacaaaattcacatactagtggctttgaattctctaccttgccttcgggatgcataaaactatattcaatcctttatcacttataacagttattatttatattttttccaaaaattaagtatatctatgttattagtaattcctctattaccgcaagtctgttttaataaaattctgataaaaataaacgattaaattattaaataataataatattagttatttaattgattgacaatgctgctttaatgatagctatgattctttggatattctttattccaaacgccgttaaattattctatagatttgtcagaaacaataaacaatttatagaaaaggatcttaggagaattcccaatgatccaaagattatattccagattactaccaaatctgctacaaaaaccagtgttgtaaaacgtggaattcaatcgattattgattcatgtaaatcgacgaaatactcaaagtacgagattttagttgtaactgaagatccgaaagatattgaaacattggaattcatgccttgtaaggtgctttgtgttgaaaagagcttctcacctgatgccatcaagaaagctagagcgctgcaattcgcggtagagtcaagaagaaaactaaaaaagcagaattcagaccattggatttttcatatggatgatgagagttatgtcgtatcacaaactattctctcgattttaaaatttatacgtgaaaagaagggaatagcaagtgagggcccgatattctatccactgaaatttgaaaaggctaataggataactgctttggcagaatctatgagagcttttggttgttttgaatgtgttactcatatgcatcatcccccaccaatacatatgcacgggagtaatctgctcgttcgatctgacgttgaggacaaaattggctgggagtttggaccaatcttggcggaggatcaaagatttggatatgaattatttaagaaatatgggaggaattcaatgggctggcatggaggaattctcttagaacaaccacctctgaacatcaaagatcattttatgcagaggaggcgttgggtaataggtaatttgcaaaatatagggaatttttcaaggctatttaagattagattaatatataaatgcacatcctttttccttggatttgtttctggagttatctccttagccttggccttttacattaatgttccaaaattaataagtgtattttcatatgcaagttttgattggaacaataacataagttttgacttgttcgtatggtttgatagaatagtgcatattaacagctcatataacgaaatattgagaccgctttttgatatacaaatttttgacggtacccttgctctaatcttactgttttcaagcacagtttggttattgtcttatcaagtaggactctttcttaatctaaaatataccaaaattgggagattgaagcgcatatttttacattttcaaaccttaatacttgctccttttttaggactgttggaatcgtttcccgccttctattcagtcatcgagttctatttctacaagttaattagacaaaataaattgaaatcgtatgatttttacgtcgtaaaaaaataatattctgagcgtgtaggtttgtacctactccgcgtgctaatccttggaaatgaatacttttcattttatagttgtcccgtcgcaaaaattaaaaatgcgatggaggaggtgggattcgaacccacgaacccctaaaggacgggatttcttaatataatcttgagtcctgcgcgtttgaccaggctacgcgactcctcctttgtaaaaataatgaagaaaactctgtattataatcttttgatctttgaagagtaataaattttggaacatgggtaagagccatcaaaaataaaaatgataaaattttatattaattagaattaaacataataaaagatgacaatgaagataaatgaactaacaaatgatatgaggcatgttacgattgaaggtaagatcgaaaaaattagtgaacctaggacagtaaatttacgtgcagggggctcggcgcttgtagctgatgcaatgatctctgacgacacggggaccataaaactatcgttatgggacgatcaaataaagatggttaaagaaggagataaaatatcaatagagaatggatatactcaagcctttaggggcgaaaatagtcttaatataggacggtatggaaaaatcgcagttatggatgaataaaataccttgacgtagcttatctttttctattttttaattgcattagatcgagttctatgaaccttttgtactatttcctaaatgattctttcaattgtggtaattattattttcattcgacctctttccatctatttagagttttgacttatttagtctaatcaataattgtgttgttttgatatgggggatcttgctcatatttggtagtctaaaactgctttcatagtatcgcaaaaaaattaaggattatccaataccaatcgggaaacgcattctcaaggattcagagatagtaactaggaaaggtatcattcttaagatgcagatattttcagtaattctataatagatatttggtgaaattctccagcctgagttctcctcaaagcttactatttcaacagtccatgtgatagaaatattatgactgggcagagccggcaccactgcaaataccgagtcaaagaaaaccaccgggaaaatctttcactgcttcaaatgaccttaatctgaatgattaggttatgaattctgaataagtcgataaaggattttgatatcggaatctgccgttattgcttgtgaactcactattacatttcattggaaagacttcttaaaaatttttcattattcccaagttttcaatcagatatgagctttggtaatgcttttaatgtctgtcctttactgttacaagatcacaccataatcttatttaaaatcataaccaaatgattttgttatgcaattattataaactcctatattttatagattgtttttcatcttgatgcattaccttaaatgttatggtattcttattctaattattccttcactatttttggcaggcgtattcagccctttatcttttggggcagttgataaaccccatattataactccaacaaaaagcatctgttgccagaatgatacaaatgccggctccgagcctacttccacttctcttgcaagcccattgaagaaaataaacacagatgagaaaaaaattataactccaacaaaaagcatctgttgccagaatgatacaaatgccggctccgagcctacttccacttctcttgcaagcccattgaagaaaataagtacaaaaccaatccaatcagatgattcagagaaaactcagtctacttccacttcacttgcaagcccattgaagaaaataagtacaaaaccaatccaatcagatgattcagagaaaactcagtctacttccacttcacttgcaagcccattgaagaaaataaacacagatgagaaaaaaattataactccaacaaaaagcatctgttgccagaatgatacaaatgccggctccgagcctacttccacttctcttgcaagcccattgaagaaaataagtacaaaaccaatccaatcagatgaagaagataatttagaacgtaaacttcatgaatctgctgagaaaaataatgatcggaacctttctgatttaattcaaactaatctggctaaactacttagtgcagatccagctgagattgaggataacaacaacgataacaacaacgataacaacaacgataacaacaacgataacaacaacgataacaacaacgataacaacaacgataacaacaacgataacaacaacgataacaacaacgataacaacaacgataacaacaacgataacaacaacgataaactggatgaattaaggtcccttgtaagcacagttatgtcctaattcattttaattagttattttgaattaattaagcattcaagaatcttgaacatgtttcttacttcatttgatggccctttaatgtctaacttgattccgccattaatggatatttttgctagatttaataacccacctttttctttgtattctaatccttgcaatctttcaattttttcacaaataacatcctcggatttatttatgaacccactttccctgtataataagattctcttgtttgtgataaacaagtcatactttttgtttgcatattcgatttctcttcgacagataaatttcacttgttcttcaggtactaagaaatctttcagcggcattttagaataatttccaagcagctatatattgaataaagtctatggatttaatctgtttagtaattatattttagcttcgagacaaaaacttgcttggttgatagcgcaagctgtttaggtcttgtcttagcataatgaatctccattttttttcaatacccgttgagatgccaatcctaatagtttgagagactctgaatcgattagttgaagaaagatactcgttctcctcgacatagaaatagttatttattgaatgatcggttacatcgagattgttatgtttgatggtaatcttgaatgcctgagtcaatcttcccggtcccgtagtcaaattatataaattttcagtcttcctgaataacttcattaaattaattccttcaaagggctctatcgatcggattaggactgctcctgccaattgattttgattccttgccacaatattgagacaatgatgattcccataaatgaagtatatataaagtcggcctacctctccgaacattgaggcatttctaggagtcatttttttatatgcgtggcttgcggggtcatctgtgtaaccatatgcctccgtttctgtaattattccgctgatcttgaaatagttgcccataaagtgcgtgtacttgactaaaacctttccaatcaaggaactagccaccttgggtgtttctttctcaaaaaatgattttttgagcctcaactattgtgttaaagtaatataaggtctgtatatttttttacctatggaatatagaattaaggatatttccttagcagataaaggtaaaaaaaaaatcgaatgggctgaagcgaatatgcccgtactattatctctaaaaaataaatataaagaatcaaaaccgctaaaggatcttgtggttggtggttgtttgcacgtaactaaggaaacagccgttttaactaaaacacttgcagcagctggagccaaaatagcatggtcgggatgtaatcccttaagtactaatgacgatattgctgcctcactcgtaagagacgaagaattgtccattttcgcaagcaggggagtgacaactagcgaatattatgaagatatatactcagtcctaaagttcaaccctgatattacgattgatgatggtgccgacctgacaattgaatttcataaagcatttgaaaaatatggaaagaatatcattggagggacagaggaaactactactggagttttaagattaaaagctcttgaaaaaacatcaaaacttagttaccctatagtagctgttaatgatgctgaaaccaaacatgactttgataatgtttacggtacgggccaatctgctctcgatggtatcattcgggcaactaatgtattaattgctggtaaagcagtggtcgttgctggttacggacatgtcggaaaggggatcgcaagcagggctagaggatttggtgcatcggtaattgttactgaaatcgatccaataaatgccttaaaggcaaagatggatggctttatagttgccccaatggaagaagcagcatctattggtgatttatttattacatcaacaggttgtaaagatgttatagttggttcgcatattgaaaaaatgaaggatggcgtgatcctagctaatgcaggacactttaatgtggagatttccattgaggagattaaaggtttggctaaaagttcaaagcatgtaaatgaaaatgtagaacaatttattttgaaaaatgattcaaagattaatgtaattggggaaggaagattggtaaacttggtagccgcagaaggtcatccctccgaagttatggatatgagttttgctaaccagttcttatcggtgcttaaccttgttaataacaaaggcaaatttgaaaacaaaatttatgagatcgatagggatcaagatttgcttatagcaggcctaaagttagaagcaatggggataagcatagacaaattatctgaggttcaaaataaatacctcagtgaatatggtgaaggtacataactgtctgagcataacgattcatttatcccctgaacgtaacgatgatccaacagccaaaagttaattaatcttcatattttaacactagaagggcattcatttctggatgggtagtctagcctggttaggatacctgtctcacacacaggtggtcgagagttcaaatctctcctcatccatcgccatactaaaactaaatatgaattaggtaaatagtaacattaggatatatacaacaaaagtaattgccaggaatacttttgttactagaaaagatttttccaaggcgtttgaataatcatcaaattggttgtttcccatgaccattactttactttctatcttaaaaatatcaaatgttgctttatttagagaaacttttgctcttttagctaacgattggaatacgtccaatatatttgactccggagtgacgtcacctaatgtataatagcctttagtatttctcttccctgatgtggaatgagtgtcagaagtacaaatttctatgatctctaaattttctgctacaagagtgtctacaattttctctctaaagccatttttcatattgttagaatcgatccaacatagcgagtagtctatgttattaattgaaatgatcaatagtccaaactggccgtgtcctaaatctggttgtcttaacaaatccttcttcgtctgttcctctatttgaaaactattagcatatcctaccttaaagtaaaattgttctgatcctcttagtctaatcaagcattctttaccgatttttatcagtacttttatatgctcttgttcgattttttccccaagcgaattatgagcgtcaataatcaaaatttgctcaaaaccaatttgttttgcatatatttcaagctctgttttcacatcaggtggtatgtcctccatccctgagggagactttgaaaataagattattacattttttccaagagcaaacccactgcagttacaatccttgttacgaattgtaatcggaatggaacatttatcacctgcctctaaatgactgtgctgatctaatgacattaaatatttttcaacctctttctttgaaggtatgtttaaagaatggtcggaaatactatgcatgaccatcgcagaatttgaataaaatttaaaaatatcgtatggcaaattgctgcctcctattgggttaaaaggacccggatggagttcaggtagtacaatagaaatttccttctgattatcaggctttaatcttacaattagagtattgactatcttaggacttgctttcgcttctgcaatcttttccatttcatctgatttattctcggtccatgcaataagaaaagcttgcaatatcttaaaagcactagtaaaattgggtctgccgatcctgtcgattatgattgtccataacacacctatgaacaagataaccgacccgaatacgtatactgcaaagtttgtgtaaaatatatggttaaagtaaaaaaaagaaaataaaatgaaaatgatcaacggttgaatgaatgaaatcgggatagttctctttaacgatgctccaaatactgacacaaaaatacctatacgtaggcctatggccataaacatcccttgcaaaacgaaattgatggtcaaactgtttgtattaataatgaattcagaaataaatccaccaattacggttagagtccaaagaagatttgcaaaggcagatacgtgcaagactttggaaaatctgtttagaggtgtgccacgtaatgaaaggtagtcaaaaacaagtgtgactgaaaatacagatgcaatgattggaagacttgtcaaaaaatcagtgatagagtgtggagtaattacgaaattaattaatgcgacatttgtaattaaacttaagattgatattagataagaaaatttctctgaagagggatttatatttgtaaataaccatcttttatgaagactggaaacactatcagactcaaaattactcattaatagtcaaagaaatttagactggaatcaaaatttttattgctattgaaacagcaattaaagctcctgcaattcctaatataatttccggctttaccttaactcctttggtttcatcctcaaaaaaccttaaaagaccagcactggatgcaggtaaaggtgcattcttcttcgccttcttactcatatttaaaaattcttacaatctaaataaaagcatttctgtatcaaaaaaaatgaaacaactaatctatttctagatcatatttaaatgatagtctttttactttaactagtttgaaacgagtgcaaattggggtgataggatacaatagtggctcccttccaattaaatcaaaaacgctcgatttagcctacgaggtggggagtattatagcaaagaaaaatgctatcttggtttgcggtggtttgggtggggtaatggaatactcttgtaaaggcgctaaagacaataatggtttcactattgggattgttccacaggaggattatgcaattgccaacaagtactgtgacgcggtaatatgtacaggaattggactgtccagggattttatcgttgcttactcttccgatggccttatctcagttggaggcggtgttggtacgttaattgaactttgcgttggatatatagcaaaaaagcccatggtatctatttcggatagtggtgggatttctgatgactatggaggaaaatatttagatgaacgaaagagagtcatgatcgaaaaaataaagtctccaaaggaggccgtagaatacatattaaaaaaaatcgtccacaataatggtagaatatgttgcatttaactcccatatcggtataagagtcgatactccgaatcaaatcataaggaaattgaaatcattttattttatcgaatacaaatattgattcgggtgataaaagaatccatgttttgattctaattctaataatttgtttatgatgctactaggtccattcttctcaaacaaatcaaaaatatcaattttaagacccatacccaatttcaatgcatcgttcaaatcctctatagtacaaacttcattatcaataagccaggcagcattattagctgcgacccctaaaattgaataaggatgatactttgacgccttttctggcgttaggtctatcctttcataattgctacccttgtattcataaaagccttttccagatttttggcccaggtcatgattgtcgaataactctttaatttttggatgtggcaaaaggactgtgttgtctcttaaatgcatctcataagaggctttatgaataacatcaaggccggtataatcggcaagttcaaaaattcccattggaaatcccaaattgaatttaactgaagaatcaattacctccatagaaaccttatctctatccatcgagtagagagcctcatgcaccattggtatgaaaactctatttacgataaatcctgatacatccttattacaaactactggatgtttgttgatcttaataatataatttgttacttcttgtgttactttagaatctgttctggtgcctggaatgacttcgaccaatttcattaattgagggggattaaaaaaatggacgccaatgaatttgtctggacggtctgttagtttgctcaactccgtaatgggtaacgtactggtatttgatgcaaagataatgttcttttctgccaaactattcaactcctgataaacctttttcttcaaatcataatcttcagggactgcctcaattattaaatcagccttctctactgctttttgaaggttgaccacaggtgtaatattattataaaaaatatcaacttcctctttggaaatcctattcttttccgcaagtttttgtaaagaccatttgatcttgtccattgccttatctaggaatttttgttcaatatcacgtaatactactttataacctgccatggctgatacttgagcaattccatgacccataattcctgaacctaaaacagttatattttttattgacacaatcagcgattagttaggatcaaaatatatcttttgttttctaccaatttaattaatctaaaattcatccgtgattctagtttgttttgttcctgttctgataattttactgcttttcttgccaactgctttatctaccattcttagaatattattatctctggtctctttagcataaatcagatatatccatgcactgtccttttcttcggttttcctgattaccctgcctattctttgggcaatctgatttatgttagaagtatttgaaagaattatggctattctgacttggggaatatcaaaacctatttccaaagtgtgaactgatagaagaggataaaaatcctctccccatttttcaagaattatcttccgatccttggtttttatctttgaatggattatctccgatctaatatttttcttattaagtatttcctgtaatgttataatcgaatctatagtttcactgaaaaccattatcttttcattattatgtttctgaattatagaaactgcttttgataattttagtttggacgaattcaataaatcctttctcaatcgtacttggttaaaccattcctttgcgtactttgaacgcataccaccttggtaaaggatctttgagataatggctgggtcataagcatttagtttgtaggaaatattcctaatggactcgctggtttttttatagatctctttttcttcgtttgtaaggctcacctcaatagaaactatttcaggtttggctaatcttccatcgtctactgcctccttgatgagatatttcttaacaggagggattatctcaataatttctttgtactttggatctaattcattaatcgtagctgtcagccctaaaatctttcttttcggatcggatgttattattttaaataatttcttgaaagagaaggctgtgttacttaataaatgaacttcatcaagaatgactagttttgcttgttcaattaatgaataattatttattgcgctttgataagtcgaaatagtaatttccttttgatcttttctttctccataatatgttcctacatattcttttggaatattgtatcttaagagtcggttaacgttttgttcaattagtactatccgaggaacgaggaataaaatattaaaagaatacctaaagtcatctttaacctgggactcactaattacttctaaacatgctctcctggcgctctcgtatgctatttcagtcttgccggtaccggttgaataaataatggatcctcggtaaccgtttttaatccatgaatcaactgccgcaacttggtctggttttaacgcaaaagggaatttaagtgagaaaatggcaggagacataccactatttgtgtccatttttatttaatccttacacaatcaaaattaaagtaaattaactaaacacagtatagaacaaaataacggtcttgtgaattattggtgaaaggtctgtaaatcatttaaacaaagttattgctcaaatgaattcgaaaatacatatgtgaacattttgagatattcctcaaactttagtatcaatttcgaaatattgtgatatattttaaatgcttttctaatctcagtactaatgtaatcttcaacctgatcattccaggtttaaaaaatcagtgactaaggaaggcttaataataggaattaggtatatcaagcattaatagatggctgtaatatgcaaaaaatgtggcctacctgatgatttatgtgcatgtggagagttagataaagaagatactcgaattgtagtaaggttagaaacccgccgattttctaagacaactaccatgattgaggggttagatccaaaaatcaacgatatacatacaattgttaaggagttgaaaagcaggttagcatgtggcggtacagcaaaagatggttttatacttttacaaggtgatcatagggatattgtcaaaaattatttagttgtaaagggctttaatgaagcttcaatagaagtaatgtagattaatcatattaagaaaagacttttgctaaacaaattatctttgaataaagttataaattggatagagggtaccctcatctttatcgttatcttggtaacggctttgtctttcgttatagggttctttttagttttttctacaaatcttggtgatgaagttcattggtatagtgatgttccccttgattttttgatatttggaatttttggacttaattcaatatatttcaacttgggaattactttcatgttattttggaccgtttatctggcttgttatgtgttctgttttctaaaacctattccaatccttagtttgtcttcagtcaaaaaatcaattcaaatcattgggcttcaggcgatcaaaattcagcggaataattatcttgctataactatttcttggttttcaggctattttgtgctctctattttaatagatgttatacaacagctatttggtttcaagttagggaaccctttaacaactaaccctctattatcctttttctatttatctgcagcacctctgaatgaggaagttttatttagagttatacttttaggtatacctttataccttttatttatcccatttggtaagggtttattcctttcaacacttactcatccatttaagaatatttcgtctagaaaaggaaaatacattacaatagcaattgctataataattgcattgaattcgctagcttttggattatctcatgttttatttgggggtggatatgaaataggaaaaataactcaggcggggctgggaggagttataatagcttggatttactacagacacggccttttttcagcgataacatttcattggatttccaactatgtgttttttgcatacagtatttttggatattttttgtttcaaactccttggaacaccgaatctgataatatatttttggccttactatcaatggtttttataataattggtatcgtatttttgtataggctttttgagcaattaattacaaagtattggaaaaaataaaaaaagtaatttttttacaatttcaaatgagttttaagtcccttatacctatttcggatagtaacttcagtgacaccagctgcttccgcaacatctttttgagttttattttcaccattcattacgcaagcgacataaagtgctgcagctgctagtcccattggatcctttcctgccgatatcttaccttcttctgctttctttagaatttctaaagcctttctttttgttttttccgtaagtccggccttgctagctatccttgcaacacattttaccggatcaaccactggcattttaagatccaattctctaatcagtaatctataacaccttgcaacgtccttcttttttatgttactggcatttgcaacatcttttaatgttctaggtgtttctgtatctctacatgcagcatagagcgcagcggcgaccagtgctgagatagatctacctcttactaaacctttttctaaagcctttctataaacataagcagctttctcaatcaccgcatcaccgactgctaacttatcttttaacctgtccaattcactaaatgcttgcctgaaatttctgtctacaggctcatggacctgacttctactatcccatgtccttaacctttcaattgtgctcttcatggaggcagacagaggtttacccgatgcatctttatctactggtccaataatggtagctaagcccatgtcatgcatcgccaaggaggtgggtacacctgctctacttctatcttcatgttcttctttggaaaaggctctccattctggtccagtttcttctattctctccgtaactacaaagccgcaattgccacaaaacatttccccggttgaattatctgtaaccatcggacctttgccacaccgtggacatcggtcaccaaacatggaaatatcttttaccaatatttatcaccataaaacttataaagtaattccacatgtatttatatctttccttacatataaatatatcggaaattatctaactttagaatttaatactttgctttagttctttttctcctctctacttttgcgtatttcttgctttcacttctctttgaactataagcatgagttctttttgcacttttattactcatgaataaaaataatgggcgattatttatatactatagggtttgctgctgagatgaaacgtactgaaataatgaatttataatgcactattccttctatattctattaatgaggaatatgatatattcgctgtattttttgatagtagttttcgtcatcgtttttttcatttcttgtgattctgctttttctcagttgaatcagactggcggctatgctgaccaagttaaattcataaggttttctaatgaaaatgtcgcgtatcaagaagtgagtaatggtcagcttgatagttacttttttcaaattcctctacaactggtagaatcagctaaaaaaaatccaaatttacaagtgtttgagaaagaaggcctttcttatggtttgttattaaatccctatcatagtaaccaaacattcaatcctttttcaatcaaagaaattagatttgcaatgaatttcttaattgatagaaactttattgtaaataatattttaaaaggatttagcaatcctattgtagagccatatggacccacatctccagaataccataatgtgttgcctgtagtagatccattgaaaatccgttatgatataacccttgctaccaaaagtatcgaggattctatgacaaaggcgggagcagttatggatcaaacaggcaaatatactctaaacggaaaacccgtacttgttaagattttgattagaaatgatgatttgataagaaaagcattcggtgattttgttgcatctgaaattgaaaaagttggatttacggtcatgaaagaatatggcgatttgacaaaagccaatagagttgtttatggatcaaaccctgcagatttagaatggaatatttacaccgaatcctacatatctagttcattctcaaggtataatccaacaactgtcagtcaaatgtatgccccatggtttggaaatatgccggggtctcagaatcctggcttttggcaatactccaattctacaattgatgatctaacacaaaatctagtgtttaacaactttacatccgaaacagaacgaaatcatttattacaacaagcagagtcagtaggtttacaagaagcagttcgtctgttttttgcaagatccttcgatccatacatatcttcatcaaaaattagtggcttaattaatgattattctgctggtattgctaacaaattgtcgttaataaatgctataaaagacgataccaataattctactcttaatatagggatgaaggaagtatatcaaggagcctggaataatgttaagggctgttcagatttctattgtagaattatatattcgcttattgctgacacgccaacgatatcgaatccctattctggtgaccctgaaccctccaggaatcaatggaccaatttagtttcaaaaggacctacagacaaggtcatagttccagatgatgctattacttggaattcacataatcaaagttggggtaaaaacaaaaatcagagtaactctgcattgagcaaagttacgatgcaacctctattctcaaaatggcataatggggaaatcatggataaatacgatctaatgtactcttattattttccgtttgaatggtccactgataccaaaaacgctgataaaacttttgatgccgaatattccagtttagtttttccaactctatccctgattaaaggtataaaattttatgacaacagtacttttgatacatatgtagatctttggcactacgataaaaaactagttccctcttacgggactttatggccttccgaaccgtgggaaattaccgcggctacagaacgcctagttgctgatagtaaattagcatattcaaaatctgacgctaatatcaaacagatagatcagttatcactaaatcttccagtgcaatccgaattgataaaacaagagttggtcaaaatgtctaatgaaaaatatatacccaatgctttgaaaggtttggtgagtttggaatatgtacttgaacgctaccaggcatcaatagattggataaatactcatcacaatgcagttattggaaacgggccttattacttgcaaacttttaatcctacaggaggagttgtaatcttgaatgcctttagagatactacctatccattcaagacaggggaatactctgactttaaaaaccctcctgaactgcgtgttgatacggttaatgttccaaggttcttaaaaataggcgatccttataattttgacttgcgggtaaaagtaaacaatcagtctaacagctcaaatagttttggtgcgatcattgattatttcatttctgacagaaataataagatcgtgatagaaggctcttatatagtaaataataactctaataatcaatctaatagtgaagttcaacctaaaccggatgaatccggaattgtagccgtctcattgaatgcaactcagacacaggaactcataccgggtccagcgaaaatgaagcttattattacctctacagagtcaccaaagcctctaatccaggaaatgacgttaattgcccggccttgaatagcgtttaatacagcgacttagacgaatttgccttgatgactttcttcatttaccttttaaaaaaaatttcgattttgatatcggttttaattattaccctattgattacaatattcctattaggatcgacaattgacaaaataatgatagataatatccgactacagataactaattctgtattcgactctttagctgaaaatcaaagactaaatcagctacaagacccgcaggaaaggcagtcaatcatcgataaacaagttagcattcaaattaaaagtttgggtctagacgaaccttggtattcaccaaaaaaaatcatcaatagtcttgttcaagtcatgacgttaaacctaggtaattctagattttttactacatatgatggctcaagcagcgtgaatgaattaataattgaaaaagtgcccaatacgattttattgtttactacctcatccataactgtagtagccataggagtagtaataggttcttatttagcaaagagagaaggaaaaatttcggacagagtagttgctgggcttgcatctgtcagccaaagtgtacctccatggtggttctcaatgataatgattgttttgttctcattcttactgcaaatttttccggctagatcaacccctttgatttctccagatactccaggatactttattgatttattatatcatatgactttaccttttattacaatggttatcctaggttttgcatcatcagtatactatgtcaaatatatagttctgaggataattgatgaagattatataaaagccctaggaattattggattgccttctagaaagattttactccgacacgctttgaagaacgctgggccccaattgactactatgctaggattaggtcttactgcaacattgggtggatcaatactgatagaagaaatatttgattggcccggcatgggaaacctgttctataatgcagttattcagaatgattcacccctaattataggattagtatacttctttacattgctttatttattaacaagattggtactggaccttacactttcaattctaaatccacgaattagaactggagacgaatgagttattggatgtgctctatttaatttgacgaataaaatgaatctttatttaaagcattacaagggtggtgtcttgggcttttgcctacttctggttttgatcggcatcactatctatacagttttttatattccagaaaaggaacgatcggaatggaataatcccttttattggattgatttccctaaaaatgcggcccctgtttgggttaattatttcttgatgccttttcaccagcaattaccagaacacaaggtatattctagtgacgaagctttactttcatcttattcggaaaccgactttaaagtgagcaatcttacatttttgtacgaatatatgtatgggcaatttccatccgcatttaatataccattttcattggagattggtgaaattcctccagcattagaaatttcggttaaaaggcctgatggattgatatttgtcctatattataactctttagactcattaccaaccattcaaaacgaaagtggcgctcaaccttctgaagaccaaatcgaaaactacgaattatctcaaagactttattcatcgtctaaagaggtaattgattctttaatgaaatattcaggtgtatttaacttttctttaactggtttacctgcggaaaaaattattttctctgaaactcattcaaatatacctctcaaaggaacatatcagtttatatttactacttattcatttgataatgacaccattctaagagatataaatctcataatagaaggtaaagtgtttggattattaggaacagatgaattcagacgagatatatcctttgggatcatgattgggactccagtagcactactaattggagttacagtagcatcatcttcgacaactattggtcttttatatggcttgatcgcaggatataaagggggaaaaacaggaacgtttatgttaatagtaattgatatttttctatcgattccaacaatggtattgtttataatattatcacttaattttggaaggagcctattatttttaattgggctttttgttttatttggttggcctggattggcattaattaatcggacattcagtgttcaaattaagaattatccttatgtcgaagcgtctaaattaatgggcgaatctgattttaaggtcgtattgaggcatattattcctcaattaatcccgtttacccttgccaattttgcactttcggtgcccgcagccatactggctgagtcggccttaagcttcctgggatttggtgatccatcatttcctacatggggacaaatgttgcaggatgctcatttctcatccgccgaaatactaggatactggtggtggatattacctcctggtcttatgatatctattactagcatagcgtttattctgataggacgatctttagaatacagagccaaaatgagcaaaaagcaatgaatggtaatctattttctcctctcaagcggtaccttccctaccttggctatcgtatgcatgaatattctcctcatcatagggatgacatataataatagagattaagccatagaaatggtttaggtcctcaagggaaggttgacttgaaccacttggatgagaatgagctgttccaagatactttaaatcgaatggtaattcgtttattggaaaccccgaataaaagggaccgtgtacggagaaaggagggatgactaaattgttaataaatatctctgatttttttctttcaccctctagaatcagtattccctcatatggatgatgcattttagcataagaaatcaatccattgattacattttgggttattgcaacaattttttttttatttatatgtctttcagaagtgtttttttttctaccactcaaaaacccaaaatccattatagatcttaagacctactaggataaaaaatgatatttggattcatttaaaaatcttaactaattcttttatccaaaaagtataaccttaatttttatgttatattgagcttgttaataaaataacaagcttttaatatttttggtaagtactatttctagtttgatttatcagatttccatcatgcttattttttctacctttataattattggtgggcttttttcaggtgcaaatgcacaaattctcccacaaaacaacaatcaagattcagattctaaaccaattactgctccttcgtctactactactatgataaaaaatccttacgggatcagaattacaaacccaacaaatggcgttcagttttttatcaatggtaccgattattttgatagtactggaaaaagactttctgttgaaggtttttctgtatcaaacaacggtaatttgactaactgtgatgtttcgatagtgactaatagcatttttccctatcaaaatgtgaatgggactggtcctctaggtaaagcggacttttctaaatggaattacatgttcaattccaactatgcaaacttgcatgaagggtcaaacaagatcacttcaaaattaagttgtgaaggaggagttgcgaaggcatattatagtgttaatataacaggagtaaaatttactgggacatttccagcttcctcttcgaatttgccctcgggtactgagggtatgacaggtaccagcttaccttcaaactcgaatgttgtaggtaaatctcaaagtaatttgagttcaagcgatatcaactcatctactgaaaatttaccacttcctgtgactggaattgcaatagaatcgccttccaatggagaaacaattaatattgataaatctataaatattaacggcacttcagaatatccaactaattatgattgtgaagtacttttaggtgatggtaatacggaaggcgtaattgcaccaactagcgctaatcattctaattttaagaaaactatacctgaaggcattaacggcactagtgattatagaaattggagcatggtacttgaacctggattaaataacctaaagaatggttcacaatccttaactgctaaattgcaatgctattccccgctatcctccgtgaaatttgcaaagataaatgtagttacaaatacttctaaacctttagaacttaaagcaatggatgttagtattgacaagactggtcaaggtacaaaccaaaaaatagtcataggcgtaaatgacgctacaacaaatgatcctttagtaggtagtgctattactggttcaattaacgctgatccgttttcggggactaccgactcgcttgggaaatacagcgtaacaataccatctgctgttttagcttctggcgcaaccgttagcgtatcggtttctgcttctgctgatggttataagattaaaaggactagtactacttttgaaggatcacctgcactctctgatgaaacaactccacctacgtccgatgcagataatcgagatgtaacaaacaacgaagaggaccttgcagataaaatattcgatgatgtgcaaaagcaattaagtgagcagggaattaatatccctcttccattcggatagcataagtacggttgactaattacatatcgattgaatataattaacaacttctgtagttagattatcaatacgatgtgattatgtattcttttttttgagcttattatccttttagattagagtttcaaccagaaaaataacaaagttattattctttatctcttaagttaacttgaaattagatttatgactgacaatgtgtacaaatttttggttcttgagttaggcattgctattgtagatgaaaagaatcaaatccagtcctttaaaaaatttcacgagcctgtacaatcccacttaaaaataaagaatagggactatgctgaaatctcggagagcttggaattttttaaagttaaaccagaattattacaaactaattaccccgagataatagatcatctaagaatcaattcgtttaattctgaaaaaatttctgcattagaggaaagacaatttcaggttgataagatcagtttatacacaaggatgtatgattctaatcaacaggaccattcagatctagggaggaaagtattagacgatttaagagaattctctctcaaatggtcttcaataagggttcaggaagcatcagagcaattagatttgcatatcagtcaatccatcaatgcattggacgaaattgacaagatattaaatactgttggaactcgtatgagagaatggtatgggcttcattttcctgaattagataatctacttcagaatatagtaacatatgcaaacattgtatccaaagttggaaagcggcaggaaattacaggagatttcttacaaagtttggaaattccggagaacaaaattgagattattctaacgacagcaaagagaagcaaaggaggtaaaattactgaagaaaatttattaatattaaagagtttagccaatgaagtcatttcattggcacaaattagaaagaccttggaggatcatattgatgtatccatggaagagatctcaccaaatttaaaggaattactaactgccactgtcggagcacgattaatagccaaggcagggagcttgaaaaggctagcttcattgtcatctagcactattcagattctaggtgctgaaaaggcattatttaggactttgaaaactggagctaatccaccaaagcatggcttactttttcagcatcctgttattcattctgcaccaaaatggcaaagggggaaactggcaagggccatttcttcaaaagctgcaattgctgcgcgagttgatctttatagtcgtaatcctgaatcaagcaatacattggcaagtaagttaaatgatcgcattagagaaattcaagaaaagtataaagaaccttcagaaattcaacagagacagcaacaacaaaatttcaaacgaggggataggaattcatatactagaaataaaggaaagaaatacgggagagatagagatagagatggagaaagagatagagattttaaatttaagaagaataagttcaaaaaaaggtttaataaatctaataaaaagtaatgatttgtatttacaacagaaggtatgatgttagatgaatcagttatctcttcttaaatcatttgacaatggatcttttgtgatattggtagaccaagcaaaagagagatacttggcaacccaaaatctagacccaggaaaaagtgtttatggagaaaaaataataaaaatcgatgatcttgagtataggatttgggaaccttatagaagtaaattagctggagcaatattgaagaatctcaaaggaaacccaattatggaatctacctcggtgctttatctgggtacatcaaccggaacaactgtgagtcatgtatcagacatagtgggaaacaaaggaagaatatttgcagtagaaccatcggtccgtgttgcaagggagtttttagaaaatgttgcctcgagaagaaaaaatataattcctattttaatggatgcaagaagatttttgcattattactcatattacggtttggttgatgtagtgtattcagatatcgcacaacccgatcaaactgatattgccatcaataactgtaagtgttacttaaaacccgaaggggaattgataatagtaattaagacaagaagtattgacgtactgacagaccctaaattggtaactcaacatgaagctaagaaactggaggataatcaattccaaattttacagattattaatctagagccttttgataaggatcattcattgattcatgcaaaatatctaggttaagtcgtttgatagataaaagtttttttagaaaagctttgtttgaacacattcgtttattagattttggacagggctccacgagaatctaatgtactctttattttcgttatcaaaaagatgatttcttaggtataattttgtcaatggatcagagggatatcctgagcctattttcttacttaagattgcttctattttcttaatctctctatccctagtaaccttggctattacagatgctgcagaaactatcaaattatctgtgtcagccttgtgaaagcagtatattttgacagacttttttgtcaaattttttaggattgattgtttgaatcggtccggctttacgtcacatgcgtcaataataatcttatctgcgttaatattgtccgcagtgattgtcatgaatcttgattccaaaacattcaattttttgtggcgcacataattgtcgatagtcatgggatttattctacatatgaaaatagaaacggccgattgtaaaattttagtatacattgtttctcttttaaggactgtaagtttcttagaatctgttataccttcatattttatattttctattcctgtagcgtcaaatgagagacctgcgattaccagcggaccaattacagagcctctcccagcctcatcaattccgcctaaaagcaattctatctactattgttgaattcattaatcctatattaatgaaatactctccattctcaaatgatgagtcactttgtctataaatataagcctgccataaattgacttcgtaaaatgtttagacttctcataactgatataaaattatctgtttctggtctctacatagaggatcttggggtattaaacatatacttctaatcttttaactttgagcaattatagataaggagctccatgaatctatttagagatataaacgtgttgaactgttatttttattctgggaatagatatggatacaagactgtttacagaatgagtgcccaaactgctaacagaatccgttccataaagcatttcattttcttgactaagattataggagaaagttaacaaaagtaaaattttttgatgttttgctcttccatgctttggtttgttagaatagactccatccatagcatgtaaacaattttatcatgaaagtacagagttgcgccataagttattgcgatataatactaaaaataccctttttactaattcaacatcaggtatatgctgatttatgtggagtagatttcatttagtgcagcagatttatgtgtaattagaagcagaatgttttgtgattaaatggcgtggaagtggattgaaatattcacacagaatgctattagggaaaaaatctaaaaatgttacttgggaaagcttttgatttgactacatatcggaacctcttcaaacaatcttttctgaatcctcaaacttttatggtcgtcattgagatagccactttttattgttgcaccgagattcacaattagaaaaaaacaattttcagaaaaataaggtcaaattgaaaataaaaaaaatcaagatgactagtgcttatcttctgagaggaaaaatatccattagtatgatactattttgctaagctagcattgagattgaataaatatgggctgtgtcttcctttattatttggatagaaaaaataccccgaatgattggtccacgatcaaagaaggtgacgtcacactgttggttccatccatggcattagcacaaaaagaacctcctaaatttcctgctttctttaaccccgcagcaaaatttaatcgagatgtttctgttttgatataccgacattaccttgatcagtcaagaaagaatatttccttcgttgattccatgtgtgggttaggggcaagaggagtaagagtcggaaaagagatcccgcagattcgaaaagtaatttttaatgattttaatatgttatcagctcaagcggcaaaagttaatactataataaataatgtatacaacaagtgtgatttttattcttccgaaatttgtagtttcctgtccgctagttccaattttgctaatcgcgcgacgataattgatttagatcctttcgggactcctgcgccttttttggattgtatattacgagcggttgaaaatgatgggatgatctcaattactgcaaccgataccgcggtactgttaggtgtttatccacgagtatgttatagaaaatattatggaatacctttgagagttatgtatgctctagaaattggtacaagattgttactctcttgtacagcactagttgcctccaggcttgatctttatattcgccctatctttgcacattcctatagaaattatattcgaatttattgtaaagtatcaaaaagcaattacttggctaacaaaatatctgacaaaataggacatatccttcattgttttgaatgtggatatagagaattaatgaaaaaaagtccttctgatattcattgtccattgtgtcagaaaaaaatgaggattggcggcccattatggatatctaatatattcgataaaaatttgatcgtcaaaatactgaccggaatacttgaatccgaagttagaaatgaaaaagaatcaaaacttggtattcaaaatgtcaatcataccaagaggttttttgaaatcgcttctaatgaattagatcagattccgtatcattacataagcgacgaatttgggaaactcatgaaaaatagcacccattcacttacaaaaataattgataaattgactatggatggatataacaccagcccgaccattttttcatcaacggggtttaaaacagatgcaaatctacaggaaataaagtctagcctttctaatctctgaaaattctctttttcagatggataaatgacaaaaatggggtgttggaaaatactaatattcccaattcagttatttgtttgaatgctcagatactaacccgtgtaatttccgaatttggaattatgatagattttgaatacttgccattcttctcaataattagatccaatgcatcctttatccttggtagtgatttcaatcctaatttatctagatagactcgaggaagagttgagattaaaaatatctcatgtttttctcttaacatattgagaaaattaatatgttccaaatgttttgtatattgatatttatcaagtccatttaaatcaagcctattttcaattagcttgagtagtgcaccattgcctactcctgctttgctttctgataatagtattatgattccatggtctattactgcgtggcaattattccataaaagattcaaactatttcctatggtcgtttggcatgaaaagtttgtgttaccggaaatgaatcccgattttgaagattcagcggttggttgtgtgattgacttaaacctttgaatggcttggttaaaagaatctgtaaggtctccgatgaagattgaatctattccttcgttatcggaaatcacatgtatcgactgaaaattaaacttagatgttatttcagttgctaatttaagagattccgtatacttacctgattgaggtaacgaatcaatgattgtagcatacacttgattcattccctcaggatagcattcccttagcaatctgactggtgctcctgtataaccaaataacggatcgtattcgattctatctattaatatgatgttcttaaatttacttactttatccaatacttcttggccggctaatttactgagactaataccattatcgttaagctgttgttttaatttttgaggaatagatttagaaagaatacggtactcaatattttggatattcaaagcttttgacttgttttgtatcagttctaacaatggtaatacaaagtaaaagggacttgaaatcagaatcaatgtcgattctttaatcaatattttattctcaaattcatttctcaagatttccatatttagttgattcattgagggccttggtatctgggaaatattctcatatttgatgtccaatatgatttctgactcaccgtaccctaaccatatttccggcataatagagtaagaaagtatgagtaacatataaaatcagagatcacttaataaccaagaattgaacgaaagtgatagagtccagcttgaggaagatattgtactatttttattcgatagaaacgcaattaaaatcggaaattttactctctcgagtggtaagaagagtcgtttttatctggatttgcggatacttcaaagtcatcctgtttattttagaaaagcaatcttcttattgacataccttattcattcgcaaatcggacttggaagttttgattatatatgctctgtaccaacttcaggaaccgtttttggttcggctctttcatacgaacttttcaagccccatatttacatcaggaaagatcttaagagctatggtatgcagaaaaaaatagaaggagaattcactccaaactcaaaaatattatttgtggatgatgtaattacaacgggccattcagtattatcaggaatcaaatcattagccaatcgttcaaccgtcagcggaatagttgtgttagtagatcgacaacaaggatctaaagatatacatgatcagttcgcaataaaaataaaaagtgcaattccaattcatcacattattaaaatcctaaaagacaataataggatcgataaaaatgagtacgaggcaataaaaaaagagatcaaagaatactaactttcgtatatcattaagttcttttcttccaaaagagtgtgcaaattagtaactgccctgtatacttcagtttctttttttgcgccagtgcaaaccagcttgccactggcaaacaacaaaattactgttttcggatctaacatcctatgtattaatcctggaaactgctccggctcgtacatacttctaggcaatattcttgctgctaactctaaatggatcttacctcctagacttgctgaggcaacaatattctgaatctcaattataggatcattttctacaggaattccaccctttcgtaacttctgaactacacttcttactgccttgattgcttgttcttctgattttgcgccggtacacaccatcttacctgaactaaaaattaaagtagcggttttgggggcttttaatctaaatactaaccctggaaattgatcaggatgatattctacgtcgggaaatatctgtgtaattaagtttaaattaatagtttgattgaccgttgcagatgccacaacgttttctatactcaccattggctttgtttggggcattattcgtttccttgggtatatatatactcgatataaatatacctttatgtgatattgtcaagtttgatcaataccacaacttcttaatcgcatttaacaaatatctcattattctaatcatttgttgaaatttattaaaatattagtcgatttatatcagtatttatttaggaaaaagctttatgatataattattacttataaatatacaaatgactttattctagccctatgacaataaaaggaaatcgaaataaagtgcatttcatttccaaatcaataacgttgatcgaagtttgcaagccttacgttatatattttaaatatccctaataaaaatgaaaactatgtctcaaaaaattagatttgataaggattcattaggtgaggtagaagtccctgaaaatgcctactatggtccattcactgcacgagcaatgaaacaatatcaaattactaaacttcgtccgcatccgaactttatcaaatccttcatactgattaagaaagcagctgctataacaaatcaagaccttggagtattagcgccacgaatcgccaaccccataatcagaagctgcgatgaaattttggagggaaaattgtctgatcaatttgtaatcgagacactgaattcgggagcaagtacggcttttaatatgaattgtaacgaagtaattgcaaaccgagccttagaaatacttgacaaaccgaggggttcttatgaaataataagccccaatgaccatgtgaatatgtctcagtctagtaacgatacctccccgacggccattcatatctctatcatctttaattgtttagacttaataaaatcgttggatctattaattcattcgatagaaaaaaaagcaactgattttaaggacgatataaaaattggtagaacacatctcatggatgcaatccctgttactatgggggacgaatttagttcatatttgtttgcattaacaaaatcaaagaaatttatcattagttctgtggagcaactttactatgtggcccttgggggcaccgcagtaggaacgggagcaaataccccaaaaggttatcaacaccttgtggtggaaaacctagcaaatatttcaagactacctttgaagccgtctcccaacttattctactctctacaaagtaagctcgatgttgctaattgctcctcttcaataaaaaatttggctatcgaattgacaaaaatgtcaaacgatattaggttaatggcttcaggacccacggctggattcgcagaaatcacaattccagccgttcatgccgggtcctcaataatgcctggaaaagtcaatccttctctatctgagaccatgaatatgatttgtttcatcgtaatcggtaatgatctttctgtaactcttgcatgtcaagcagggcagtttgaattaaacgttatgcttggaggtatggtcaaatcaatcctagattctacagatatgcttactaacttcctgcctatattttctaagaatatgatcgatggtatacaaacgaacaaacaaaaacttcaattaagtgtacaaaagagtcccgtgttggttacattattgaatcccatattaggatatctgaaagcagctgaaatttacaaagaagcaatgtctagcaataaaaccatcaaagaagtaatactcgaaaaaaagttaatgactgagcaagaattcgataacgcattatcaaaggaaaaactcctctcataatcgttatccttgttatatttattatttaaggggaatatttacaaatatcacaaaacctgaattgttcaccatctagatgattaaaatgtactccacaggctctacacgtatgatgagaatctccataaccgtccgaagctataaaatcgttactagttaaactaggactcttgcaatttatgcatctgcaattgcactccatatgtgtaatgctctatcgcattataaaaaatgtattgtttaaattatgtaaacgatttgtacatcgatacaattgaagaaaattattttctcactgtttacatatttagttttttctctagtgttgttatttccaatagtagataatgaatttggaagcgtactagcgcaacaaagggaacaaaatcaaactgctttggtatcggtgggaggagagaatataattgccactctgtcaacgactccagaatctcagtccaaaggattagcaattaaagattccatcaagcaaaacgaaggaatgctattcatctttaaatcggcgcaaaaatactcattttggatgaaggatatgaaatttccgatagacattctatggattgattcatcagggaaaatcgtccacattgaaaaaaatcttcagccctgtgttttcttgctaccgtgtccgtcctattcacctcatgacgattctttgtatgttttagaggttatttccaattttacaaataaatttgatataaaaatcggtgaccaggtctactcgaatgccatacaacatattcaaggttagatatttttactatgatttgaaactatcaactaacttcttatgataattgctgagacattgtaactgtgattcttggccttttgaaatgactttaattttttttaattgcttcacagtataaatggatttcataaagttaaagcaggtttcacagacatacatttgttacctacacaataggaaataggcaattaatttgttatttcatatatgatgcattcataaaattcacgaaacaattttgcctgattaactttgttgtatgttaacacttaaaaataggttatattgtaaaataagatattatggctgcccgcaaaagtactactagaaaaataagactattaaagaaaattaagcaaaacagaccggtgccagcctggattattattcggacacaccgacatgtcagaacaaatccaaaaagaaggtcatggcgtagatcagatgtgaatataggataagaaaaggagatgatgtaaaatgtcaaatgttgaggatacactagcaagaatttatacaataaatttaagtaaagcatggctaacaccgaagcataaaagaactgatagagtagttaacatgattaaagaattcgccataaagcatatgaaaagttctcaaattaaaattgatcaagagctaaatcgatatatttgggaaagaggtaagactaatcctccaaggaaggtaagagttagaattgttaaagatgaagatgatcaggttataatttctctatatgaggatgtcatcatagaatcaggttctcaaatgaaaactgaagaatcaataggaatcgaagagaaaggtgacggagttccaattgaagagagtggagagaaagaaaagaaatagcaatgacttaagctgatatagattttcttcaaaacaattttttataattaaaattatcaacaacttaagaattaaaaaatttctgatagtggattggtagacagatattattcagttttcatgtataaaattcaattactgaaccttctgttacttacagtaaataccgattcaatatcattgaaatatggtatttgaatatcatccattgctatctcaggctcaaaatctaaaatgtttttctttggaatcaaaaagttcagcggatcgtatcccgatacaatatctttatttgtcttgaccacaatatgacattttgtaacttcatttccttcttccattatgtttacttctttttcagcttcggaaagtaaattattagttgtctctataacattctctattattgagattttttccctaggctgatacaaatagagcgagcatttttgaatactattaatatcaattttttgtgtcaattgggccattgtatcaataaatgcattctttataccctttgtcgatttattcgaagtaacaaaattaaatttttcaggaaaactcttgttcatcgattgaactattatatcgaccatcgccgtattagtaatctcgtagcattgttcaatggaaatatcatttccatttcttattattgaattgttatcaatcacaataacactgttaacaaacttgcataaaaaagaaagagatactccgcaacggaataacttttctttctcaaatccaaatggaagtatagtcaagcaaattatctctcgattgattttattctttagtatttgagataaaacgggcaatactgctgatccaaacttggaagctaagtttccaataattataatggattggtatccattaacctttgataagatttcatcttttgctttcattaatgattttcttatctggtctaatgatggattaattctggatggaataattatttcaattttcttatcaacatgagatccgttcgaggaatgattttccaaaaaaagatgatctaaattcactttttccaatactttagttgttatctttatccctgcagttccaacacctatgatacatgttttcaaagtattagcattgttcaatggtcattaacaaaccttaatcgatagataaaagtgttgtgagatcacttttggtcgatagactatatcggtatggcgtttaacacatgatttgaaaaggctactactctgactctaattctcttacctaacaaaggattgtcaaaatatgatttgctgttcttatatggactagcttcgataaccttattttctgccttttgatccttgtaactgggatagaaccttgattgttgcatgtttgactgatagtccttttgtacattaattttcaaaaatgattcatcagatccgctatctaaaattattgatttgtaaaaatcatttctgcccttcagtcttccattttcaatttcgttaatgaggatctccccttcccagtctatccaccgagaatttctcttttttgctattgctttaattaaataatgtaatctttctgatctctctgaaattatatcttcatcgactttcttcaatttcgatgcagcggttccgggcctagaactgaacttcgatgaattaactatatcgggatcaataaatgatatcaaatcaagagtctgctcaaaatcctcattggtttctgttggaaacccagtaattatgtcagttgctattgtgatttctggaattttgtctttcaacctcatgaccagatctttggtcgtatttatcgtgtgtcctcttttcatatttctcaagactctttcgctgccgctttggatgggtatatggatgaatttaaaaagcttattactttctgaatataacgtggatagttcgtttatcattcggcttagatacattggattcatcattccgagtcttatcttaaattcttgctctattttttcacagctctttaataaatttaccaagttggtcccaatatctagtccataacacccattatcagtagatgttaaccaaatctctttacatccttcacctaaatcctgttttatctggttaactatttcaccggttctatagctcttaaggttacccttcgcaagctttgtttgacaaaaagtacattcgctaagacatccagttgagatttcaacgatactagttatcggactgattcgaagtttgggaatatttattttttcaatatgcgaattctctaatattgatacagtttgtccatccatcgctgcatgagcgacctccactactttatcaatagaatttggtccaataatgctagcctgagaattcgcagaccttactaacccctcatcagcagctggcagacaaccggctataatcaaaggtttattagtattactcaaatacctaattcgattcatcattttatgttcagtagaattttttaccgagcaagttacaatcaaattaatactggaattttcgggggtctcagccaatctgaatcctcgtaatttcagctttcctgccatcatttctagatcagcaaaattagcggaacagccatacccttcaatccagaagctgggtctttgctgataattattgctcttaggctctttatctgatccaatatcattcgtttctctaaagatttttttagcagttattcctgttctattcaaaagcttaatgtggtcgattaactgtggctttaaggaaatgtaatttgatgtgtcatctattgttctactggttttaatagatctcaatatcactttttggttgaatcaaattgagcaatataccttttcctttactaactgattagtatccttttctagggttgatattggttaatatataactctccaagccgaaaatatacgctagccatgaatattctcgataatttgtatgttgtaaccaaacaaatctttatcattgcatatatgacggggtatctctggttaagaagaaatccactgtcattaatattcacagctatttctcccttttctttgttgtttatattatttattgtaagtagtggtgaatatgtacagtttgccgtcgctggcagtctagttatggctctggtaggctacggattggccttaggccaggatatatcattttacaaaattgaatataagatgcaagatgtatttgttgcctctccagtttcgtccattacctatatgctgggattggctctgtcacaattactgtacggcctgcctgcgctactggtcttactctcacttgccatatatttttcggtttctatgaatttcctccctttgctattattgaatgtctttctcatttgggggactatgtcctcaataggattttttttatcttctcatatgttacatatgcgaaatgccactcagctaatatcattcgtcaatgttattattgcagttatacctcctgtcttttattcaatagaaaaactacctgtagaattacaattcatctcgtattttgttcctaccacccatgcttcattgatgttgcaatattcaatgggtttctctattccggaaggctggtctatctccttaggattacttgtccagtctgtatattttgttttttttatactggtagcaaaaaaaaaggcactgtggagagaaaattaagagagaatgtaaaagacttgaattactaatctcacgctttagtaaaattattgtttattttgttcgaagattcttctagttgattcgactaatcttgttacatctttgttgttatttgcgtttgaaaatgcccccatttttcccggcaagaaaaatatattatgcttagccattaaggctagattataattagttaatatctctctgtcagccagtgctgcgtcaacagcattctcaatcctctcagtctcttcccttaaaaaatgaaccataaacaaagaaccaattccagttacatggactcttattctaagctcaacgaataattttgctagttcttttcttgtaatttctccaagaatattgattttctcataaattcctggattttttctcaattgttttaaagtataatatccagctttcatagtcaatgggttagcagaaaatgtacctccaccgatcgaacaatatgacgatttattatcatccacagtagcatctgcccttttcattatctctttctttccacatacggctccaatgggaagtcctccaccaattattttacccaaagtaaaaaggtcggggtctaacttgaataaattcatagcgccattaaaggcaaacctgaagccagtcactatttcgtctagtatgaagaggcttccgtttctttttgcaaactcttgcaatccgagtagatatccgtcctgaggtggaatacatccagctccgcccaaaaccggttcaacaataatcgctgcaaggtcatccttaatagactctaatacttttatggatctttctaaatcgttaaattgtaaagattcaataaaatgtgcctcatcttcaattagtcccataccttcatctacttcatagggataattcaccgattgcaaaagatttgtattgaaaccgtgccatcctccttctaccttggcaatcaccctcttgccggttgaagccctagccaaacgaattgcatacatggtggcttctgatcctgtactacagaatcgtaaattctctgccagaggtatggctttattaatttcattacccagtttataactagctttattcgcggtaccgtacaaagtacctttaccaatttgtttcttcagcttggatgtcacaatttctggagaatgacccaggataagcgcccagtgaccattccaaaaatccaaatacttgtttccatcaacgtcaaataaatatttaccatgtgatttggctgtaaaaaaaggataaggtttaaagtatctaatgttgtgatttattcctcctggaaaaatacctctggatttgaaatacaaattcatagattcaaatgttttactcttgtacaaatccgcgtaatcttcatatttcatacctaatttattgtccatttacagaaacttttatttgtttttaaaacatattatgagacaataattgtttatgttattttactctgaataatcttaatgaatgttttaacttacattcgatcatacttctaagaatattcgagaacattaaggaaatttattatataccgcttacagcaacctctaagtaacaaaatctcattcattagggttttgacctaagaacaagatttatattaatatttttttgattgtaaatagaacgcatccaagacaaaaggcggcgtcggtaatgaagttggctaatgccataatgtgatttacagacctccaggtgcgctcataacagtttaaatatacaaacagggagattcgatcaaaaaatcagtgctgacctgatcgattgaatctgacatgggaatgatcagatagactagaaatctagatgcgatactaatcaagtatatagtattttttagtaatgattaagatcatttgctaaattactaattactaaatataaccttgaatcaaaagcacagaagacgttttgtcaacttaatgttgtctgactttgagaatttttatgttagttaaccatagtcacattagtctttttacataaatagacaacatacaaatctagtttttcgatcgtactctttctctttattgttaatctctaaaaaatagagctttaataataaagaaagaactcaataaacgtcctttcaaatcttattacttttccttattccttattttgtctacaatctaaaatctaaatgagataagaagtaagaagtaagaagtaagaagagaattggacgaattattatataaacacatacaagtaaacagacaaacaaactcgtaaaaaaaagttagtttgtttgtttatttatatgagaatcaaccgacgatttataataaagtaaataataattctacagccgttatttactttatttgactccggttgatcctgccggacccgactgctatcagagtgggactaagccatgcgagtcaacatagcaatatgtggcatacggctcagtaacacgtagtcaacatgcccaggggacgtggataacctcgggaaactgaggataaaccgcgataggtcatcacttctggaatgggtaatgacttaaatctatatggcccctggattggactgcggccgatcaggctgttggtgaggtaatggcccaccaaacctgtaaccggtacgggctctgagaggaggagcccggagatgggcactgagacaagggcccaggccctatggggcgcagcaggcgcgaaacctctgcaataggcgaaagcttgacagggttactctgagtgatttccgttaaggagatcttttggcacctctaaaaatggtgcagaataaggggtgggcaagtctggtgtcagccgccgcggtaataccagcaccccgagtggtcgggacgtttattgggcctaaagcatccgtagccggttctacaagtcttccgttaaatccacctgcttaacagatgggctgcggaagatactatagagctaggaggcgggagaggcaagcggtactcgatgggtaggggtaaaatccgttgatccattgaagaccaccagtggcgaaggcggcttgccagaacgcgctcgacggtgagggatgaaagctgggggagcaaaccggattagatacccgggtagtcccagctgtaaacgatgcagactcggtgatgagttggcttattgctaactcagtgccgcagggaagccgttaagtttgccgcctggggagtacggtcgcaagactgaaacttaaaggaattggcgggggagcaccacaaggggtgaagcctgcggttcaattggagtcaacgccggaaatcttaccgggggcgacagcagagtgaaggtcaagctgaagactttaccagacaagctgagaggaggtgcatggccgtcgccagctcgtgccgtgaggtgtcctgttaagtcaggtaacgagcgagatccctgcctctagttgctaccattattctcaggagtagtggagctaattagagggaccgccgtcgctgagacggaggaaggtgggggctacggcaggtcagtatgccccgaaaccctcgggccacacgcgggctgcaatggtaaggacaatgagtttcgattccgaaaggaggaggcaatctctaaaccttaccacagttatgattgagggctgaaactcgccctcatgaatatggaatccctagtaaccgcgtgtcactatcgcgcggtgaatacgtccctgctccttgcacacaccgcccgtcgcttcatcgaagttggttcttggcgaggtggtgcctaattggtactatcgaacctggggtcagcaacgagggagaagtcgtaacaaggtggccgtaggggaacctgcggccggatcacctccttagttattatattgtagtagtggtagtgggttagaatgggccttgtgctctttctaatctgcgagactttacaatacttatactaataaaataaataaatccctaatcttaatcttgatcttgatcttaactgtatcttgtcctaaattcataatataatggatgataaagataaggcagataagatggatgataaagattaagggagtgcaatcaaatcaaaactgatcaatcaattccttcatttttcatacggtttgaaaaattagaattgtatgttgtaattttgaataactgatacaaagacaaagattagaaaggaagtaatttcagtcaacagtcaaaacgtctgtgcaaataattgccaggttatccctttagagaaattaagatagagtaggtaattcaaatcttagaatacaattagtctatctgatcattccaattaaaaaaaatcagcaaatgtagtatcggatgcaattctttgtctcatgtaaatgagaaggagtagaagataaagaatgaagttgatgtagtaaacgtgagtttacaataatcatcatgtataggaaactccatttgaaaaggatatcaacaacgtgtagtaacacattatcacagattctaaaatatactttattcgcgtaataacaatatagtcattagaatgaatagagttattaatgattgtaatagtaagatatgtgttatagttgtaggtaaacagcaaataaccttttatacatataccaaccattgaattgaattagacttttctaccacaagtggaactaagaactaactagatccaaaggacaaagaaagaaaggaaaaaactccaaaaattagtttataataactactggactggtgcaaagacgccgattggtggatgactcggcttgataagcgatgaaggacgtggcaagctgcgataagcctgggttaggtgcatgcgaccgacgaccccgggatttccgaatgaggtctctctatacactcccatgctttagttagctagggagagcaaaccgtccgaagtgaagcatctgagtaggacgaggaagagaaatcaattgagattccgttagtagcggcgagcgaaagcggaacagcccaaactgaatctgttatggtaacatgatagagatgtggtgttacggatatgacgtataggatcctgtaatcgaagctaaagtgtactggaaagtaccggaatagagggtgatacccccgtaggcgaatgagagcaggattctgtcatattcagagtaactggccttggcagtggccagtgaagatgggtgaaagtagcatccaaggctaaatattcatcaagaccgatagaatactagtaccgtgagggaaagttgaaaagtaccccggaaggggggttaaaagcgcctgaaaccaatcggttacagacgtgtatggctcgaaaggatttctagagtcatacgttccgtctagaaacacgggccagggagattgctgtcatggcgagcttaacctttaacagagggaaggcgaagggaaaccgaatttgcgcattttttcatctgaaaaaagaggcaatggatctgaaagggtcttgagtcatggcagtaaggctagaaaccggacgatctagtcctggataagacgaaggtgagcgaaagctcgctggaggtctgcaagggtcctgacgtgcaaatcggtcccctgatctgggattaggggtcaaaaaccaatctagtccggtgatcgctagttcccaccgaagtggatcgcagtcctgccttagctgagattgcttgtacctgtagagcaccgatcgggcggtaagggctcgaaagagctcgccatccattcgaactccgaatgtgcaagcgtcgtagaagctaggaggcgggtttatgtggggtaagcctcataaccgagagggggacaacccagactaaagttaaggtccccaaatgtctactaagtgtcaaaccaaagggtgttttcgagcaaagacagcaggaaggtaggctcagaagcagccatccttcaaagagtgcgtaacagctcacctgccgagcgaaagccccgaaaatgttcggggctcaagtagactaccgatactttagaccaccgacgatgtcggtgcgtggtaggtgggcgtagtgtttgggtagaagctgggctgtaaagtccagtggaccgaactactagtgcagatcctggtggtagtaacagcatagccgggtgagaatctcggcgaccgcatgggcaagggtttcccggcaatgcgtcatcagccgggagttagccggtcctaaaaacaacctcaacagaattgtttgaatgggaaactggttaatattccagtgccttgaaagttcgttatacctcttctgtcgcttccggatagggtaagcagaaccgtcgttctgtctaagtactctagctttgaggagtgccgtaatggcgagaattaaagcgagataccaatggccttccgcaaggagggtttgcttgattccaggagacaatgaaagcagaaataggaagatactttcaagaccgtaccgagatccgacactggtgccctggatgagaagtctaaggtctatcgggtataccgtatggcaagggaactcggcaaaatagctccgtacctatggtataaggagtgcctgcagtttttacgaggagtagggactgcaggtcgcagtgactagggggtcccgactgtttaataaaaacacaggtggtcgctagtccgaaaggatgtgtatggcctctgtatcctggccagtggcggtacctaaaacctgggttcaactgggctaagggccgctaaacgccgggagtaactctgactctcttaaggtagccaaatgccttgtcgggtaagttccgacgtgcatgaatggaacaacgagggccccgctgtccctgcctacaacccggtgaagccacataacggggacgaacagtccccgaacctctgtcggggagagaagaccctgtggagctttactgcagcctgttgttgcgatatggtgtcaaatgcagagagtagctgggagccgttatggtcagttctccgggactgatctaggcaaaagtgtaacaccagccatttgttaccgtatcgctaacctgtttaacagggacatcggcaggtgggcagttcggctggggcggcacccccttgaaaatgtatcgagggggcccaaagattggctcaggcgggacagaactccgccggtgagggcaaagccaaaagccagtctgactggattcccaatgatacgggattcagaggcgaaagccgggcttagcgatccatcatgtcctcactattgggggctggtggtgacagaaaagttaccctagggataacaggctcgtcgcgggcgagagctcccatcgaccccgcggtttggtacctcgatgtcggctcttcccatcctggttctgcagcaggagccaagggtggggctgctcgcccattaaaggggaacgtgagctgggtttagaccgtcgtgagacaggtcggtctctgcctgacaggggcgtggttgtctgaggggaagttgcccctagtacgagaggaacagggcagcgcagcctctggtttatcagttgtccgacagggcaagctgagcagctaagctgtttaggataactcctgaaagcatctaaggaggaagcctttcccgagaaaagacaaccttccgtaaggaggagggcggccatagaagatggcgttgatggaatggaggtgtaattatcaagccttcgggcgagatattcagcctgccatcaccaatagcccaacgcacctgatctgtaattaaaaataaaataaaataaaataattacaaccgacagaaaaaaaagtaggtaaatgaatttctgcactataacatgttcagaagtgctattaacatctcttcaaaaactttgtccatgattgtattgtgcgtaaagaataatgtttattttggaataacttatttctagtgatttacttattgatatccttgtagttcagtggagttttctgatattgtgtcttgtctcgacatcggctattagatcttaccgattaattaacagtaaatgaggtgaaagtttctactaaggagattttaatctgttggatataaacatctaaatagcaaactgatactagaatctcgttatattgaaaagcatttgtatatctcataaggaagatgttgatgggatagtttccgcagcgttactacagaacgctctgaagattaggaacatatttttggtagattatccaaatttattaaactccttagactataccatatctctttgtcaaaagaataataagttctctagagtttttatttgtgatgttggtcttaacaaaaagaatcaaactatatttgtagataagttgagaatactacttcataaaaaaattgaagtgatttatatagatcatcattatcttgagaccgaaataaagaatgaactggaatcgattggggtgaaattaatccatgatattaatgattgcacttctgtacaaatttatcatgtgcttagggcaaaattaaacagtaaattttccttttatgcctctgccgcggcattgacggattatatggagtccaatcccaaggcaagcttattagttagtaaatatgaccgaacgttcttaatgctggaatcgtgttttttatcatatataatatcttcatcacaaaagaatattgattatctcaagtatatctctagagcaatatcgaaaggaaaaatgccccatgagattaagaatggattcagattagtcagggacttttgtgagaagattaataatgccattactataatagatgaacaatcaaaacacctaaataatatatcatactttgagcataatttggagttatcttcaagcatgattgtaaattttgttttgggtatcacaggtaagaaagttggaatagcatttaaattaaaatcaaatattaattcatatattctttcaattcgtgggtctaaagaatgccagactcatctaggagcgttagtgaacaatctatcggcggaattgaatggaagtggaggtggacataacaaagcatgcggagccgtcattcctatggagaattttaagaagtttttagataagttggatcagtcaatcgtctaaactgattcaaaaaactatttaattaatatttcattatagtatagattccaaaatgaccagaataggagagatttatcgtcgagttcatggaaggttagttgaacgaccaactaattttagttgggtgattcctcaaaaattagcaggtagcgggttgccatcatcttacgaccaactaacttggcttgcttctaataatataaagacattagttactattagagagattcctttaccagaaatctggatacaaaaagtaaattctcagaattatgagctagaaaattattttttaaaaacagatgattataatgctccgactgtagacgaaattcataaagtgatagattatatcgaaaaaaatattgaggcaaacaaaccagtattggttcactgtgctgcaggaaaagggaggacaggaactgtcttagcagcctatttaataaaaaaggaagggttgactccgtttgaagcggtaaagaagttgagacttatgaggccgggatcagttcaatcaagacaacagtccgtagcccttgaacattatcacagatttcttaaccaataatacttactattgtgcaaataattgtaatacttaaattgactgaaaaagttctatatttattaacgattaacatggtgctcaatacctatcaagattatcaaatgaaaattgataaaaagattcagtcgatcataatatttctgacatcattatttattatcatatgtctattttcaattaatactgctcattctattgagtcggttagcgggcagggagataactttactttagaatcagatcaaatgacagtcgaatctatgcctgattctacaaacagagattatagcaattcgctacctgacctatttgacaaggttgagaaatcagttgttcaaataactgaacctgggagtacccaggttaaagaatctaacccgtcaagattgggatctggatttgtatacgataagtcaggacatattgtgactaacttccatgtggtagatggatcaaagaataataaagtttatgtaacatttctcgatggcgtatcatacgaaggtgatattgtaggaactgatccttattctgatctggccgttatcaaacttaccgaattagataacagtgtcagttccaaattggtcccattagaattaggtaattcttctacaattagaatcggacaaaaagttgtagccgttggaaacccatttggattatcgggatcgctgtcggaaggtattattagtggtttaggaaggcttatgccagctggagataatggtgaatctccacaaaatccgtttgagaaaggccctattgtggaaccagttccttcattttctatacctgatattattcaaaccgatgctgcaataaatcctggtaactcgggaggcccattgatcgacatgaatgcaaatgttataggaattaatacggccattttctcgaatacgggcgtttattctggcatcgggtttgctattccatctaattttctcataaaaattgtaccacttctaattaaaaatggagaatatgatcatccatacattgggataaatgggtttgatattactccagaaatagcaaaattattgaatttacctgaagctgtaggatttttagtgatcaatgttacggagaatagtccagctaagttggctggcatacaaggagggaacaagagcatacagattaacggaatgccgattgaactcggaggtgatatagttactgaaatagataataagcctgttagaaaggtggatgatattttatcatatttggagaactataagcgaattggcgataatgtaaccctaacagtgctgagaggcccgaatcttgataagcaggtagtaacgatcccattgactgctagaccatccttggaaaccgatttgactaatccgtcattgggtgtaataggtttggatataactcctatgattgccaagcaaatgaatatatcgagagaaaacgggttcttaattaccagcataattggtaatagttctgcttctaaagcaaatttgaggggtagttacgtggtcactgaagtaaacggtaccgtattagagttaggtggagacataatagtaaagatggataatgtcgacgtacgaagccagttggacataaagaattacttaaaaactaagaatattggagattctgtgattattaccgtgttaagagacaataactatttaacaaaacctctagtcctcgaaccgataagcgaaaatcaacgaatattggaggattcctcaatgaccaatgataccctgccacctccactctcacaggatgatcttaaagaatttttagaaggatgtgtgaaagtattgcctagggaatcttgcgaatcaatgataatcataaaataacaaatttttcgtaatacatgatatatatcggcgttaaaatatagtaatagagaacatgatttcaaggaacgaagatgaattccatgtgttctgtaaacacgtgatagacctggaccctagtatacgttttgcgggtattgctgatgaagacggaaaattggaatccatcgctgaaagaactgggcttgtgcccttgttaactcctgaggagagggctcaatatgctattaccgctgccactaggcaatatacacgtctaaggtgggaatacatgttgggtaaaatacaatatgctagttcaagatatgaacgtctaattagggctaccataccaattaccgatgaaaatagtacccttgtcgtacgttctactattgtcatttgatcctgagattataaatgttcatcaaatcattactgaaaaaattattccattcataaataacaataaaaacaacttgacgaaattgcacaataagtatgactgaccatgtaggaaatgactactgtttttcaaaaaagtttttagtgtataaaaatattacaagaaagtctactggtattaaacgatgttgttatttgccaggaaaatctattcaatgatccataataagttcaatgtattcgtagttttaagtaccgtagcagcagccttatgggaagaagtcatggtaacaccagcagtagcacaagaaaacatgtcaatgccaatggatcatatgagtaatatgaacatgatgatggataattctaccaaaatgggtaatggtatgacgactataaactagaataaaatattaactcaaatattttttctagaattcatttgccgttatttttttcctttcttatttttatttgacatccatggcataatattgatgattaaataaggctaaatacaattatttttaatgacttttgacaatctatctgaatacctaaacgccttggaatcagctggagaattaaaaaagatccagacggaagtaagttccgaattagaagtcgctgagatcatgagacgtatgatgtattcaaaaaaaagtcctgctatattgttcgaaaacgtacaaggttttgaaatacctatcctaggcaatgctttcggatcgttgaagagattgcaaatagcattagacatacaagatttttcagaaatagggaacagaatagttgaaatgacacggatgaaaatgccatctggtgtttttaataaattaaaaatgcttccaaagttatcagagatttcagattacgggcctaagattgtggagaaaggtcaggtccaagaggtaatcgaaactaataacccttcattcaagcaatttccaattctcaagtcgtttaagcaagatgctggaagatttattaccttgggaatgacggttactaaacatccagaaactggtattaggaatataggagtttatcgtattcaaattttaaatgataatcaagctataatgcactggcagattcacaaacgtggagcccagcattttgatatttcaaaggattctaaaaaaccaatcgaagcagcaatagtgattggagccgatccaggtaccattttcagcagtatagccccagttccggagggcatggataaatttctgtttgcaggtatttctcgaaagaaaggggtcaaaatggtgaaatgtaagacagttgatctggaggtgcctgctaattctgaaatcgtgttcgagggcaccattgacccagaacacctagaaactgaaggaccttttggagatcatactggttattatacaccgcctgataaatttcctgtttttaaactaacaggtgtaatgcacagaaaaaatcccatttacctaaccactgtcgttggaaaacctattcttgaggatgcttattttggaaaggtaatagaaagatcgtttttacctctgatacagatgttccaacccgaagtaatagatttctctatgccggcagccggatggtttcaaggattgggaataatctctatcaaaaagaggtaccctggacaagcaaaaaaggtaatgatgggattatgggggttaggccagctttccttaaccaagatttttgtcgtagttgatcatgttattgatgtacataatattgataaggtaatttgggctgtaacaaccaaagcagacccaaaacgtgacatactaataatagaaaatgtacctactgacacattagatccttcatctccattggtaaattttggatcaaaaatgggcattgacgccactactaaatggagagaggagggtttttttagagagattcaggaggaggttgacgttgatgaggaaactaaaatgttggttaataaaaagtgggccctgtatggattacctacagaaaacatatactctaacgacttcgattgagaggacctcaatggattaattggttattaaattaacaacattaaaaccttatatttaggagtttggtataataggttactacgatagataatgtctagtaaggacaaaatcaagactaataacctccagttgaaaaaagccgagaaatgcgagagtttggatgaaggaacctttgcatttttgaattggatgaattgcaagtcattttatagtgaaggctatgatcagaatcctcctttggttttaaaatatgttgattttcctaatattggtttggtaaggttatttgacagatttttggcacaggacatttttgtggatatagttgattgcgtaccattatgtaagatgtgtacaacagatgactgttcacatgttggttttaccatttgcttgctccaattaattgagagagaaggctttgagtcaatggatgatattttaaagtaataaaaaaacgaagaccatatttcgattattatagcatttattactaatttataataaaatttttatattcatctgtctaacgtttgataatgactgagaataatgagtatgttccaaatgtagtagcactagaagtcttagaaaaaaatggtgttaatattgaaagattaaaggaattgctaactaaaggcgtgggggcggaatttactacctattattattatactattttaaggatgcactgtacagggctcgatggagaaggaattaaggagatagtcgaagatgcaagaattgaagacagaaaccacttcgaggctatggttccgcggctttatgaattgggtggcagcttaccacgagatattagagattttgcaactcaagcgggatgtccagacgcttatttacccgagaactggaaagacttgacttccattataaaagtactattagaagcagaacaatgtgctattagatcttggggagaagtatgtgacatgacctgggggaaaagatcccagaacattcgacattgcacagaggataatgcaggaggaaattgagcacgaagcatggtttatagaattgctatcaaaaagaccatctggacatttcaggaggaattttccaggacaatcgccatatactacgggtgcagggggactcagccacctttaacttataggtttaataacttcctatattattttttttagaagtgtttgatgaattatccatatccgtaggtgaaccaattccaatcctttcgtactaaataagcaatttaatgattttttcatcaagaaggaaatattttataaacccatagtaaaataatgataatagtattgcatttaacaaatagaaggaaaggggaaattctgatggctatagcaggaattggcttggccataggtgctattagtattagcgtaccacaagtagcatatgcaggcttgtgtataaccgggttaggaatagtatctatgttgtggagataaggctcattattgtattttaccttttagttctacagatatagtaggtcatacaaaactgaatcttgagcaattcaattattcaaacaatctgataccttaaatcgggatgctaaggggacagcagagctaatgtttcaacaaactcttgtacatatgaagatctcgtcctaatcttttggttaattatcactcgtaatttgagactcatagagctatgtaaaaaatagaattttgattaaatatcagcagtttttcagtgtgggccagaaagataatcatttctttgtatttattcatgtggcataattgtttggtaaatatagaattatttgaatcccaacaaaattctgcgctattgacctttaatgccatacagcggattggagttatacctgatgggcctttaattcttactacatataacgcaataatttattattttttcaaattctttagattttctatcatagcattgaaaacaccccagttgatttgtcctcagatcccatcttcattcacgttttttatttcttcagtaattagattattgcaagcaaagcagatctgacaatttgttctagtttttattgaatgtgaagtatatcctcatttttgtaaagtaaggaacttgaataatcagattttttctctatagtactaataattgattcgactctatcatcgtcccctcattttctatatttatatcgggatcatcattgttattttatctggctgattttcttttaaatagaaacttcgcgtttaggttaatcgaaattatgatattttagaattgaatttcgttgaatctagagcaaaatacttaatttttagaactgttcatttagtattattgtcgcagtcctactatgacatactagggatagatgaacatgcaaccattgccgatatcaaaaagtcatttagacttcttgccctcaaacaccatcctgacaaaaacaaaagtaatgaggctcatcaaaagttcctgcaaatagtagaggcgtatgaagtactttctgacgagaactcaaggaagaaatacgatttgatcaattcttcgtcaaaccggcattcaagttataatagaagttggacaccatctgctgatttatcgaaattttatagctacgatgtgataaagaattggcaagtccccagcaaatcaactggaggtatgtgggacataggggaaaaggaaaaccttggaatgtggaagaccacactggcattatttggatcattagcctgcgttgcagtctttattattattctctcgaattagttattgcaattatcaatcaagtttgactgtagaattaatcaaaattaacatatcatggccggttgccattctttagaaaatgaattttcgatctttgtattttgttttcaattttgttttggttcttccgtgtctatcttttaactacataaaataacaaatctttcattactaattttttgtactatccgcaggttcccaaaggtgggaaacttgttctctttccctaaagtaactaagaggtaattctaaataacataataaaagacacaatgaacctttaggatattttattgaattgatcataaattccttaattattagtgaaatggaagctttgaaatcaaattttctcgtcagctcttttaactgactatggcctcttaatgctcttactatttggctaaaaaaatcatgccgagttgttggaggattaaaatagattattgcatcatcatcataggtcaccctgtcgcccttttctagcactttacactgaagatagagatctattgctattattttctctggaatttctatctgtttggccaaatgagcattcaaagcgagtgctcttcccattgtcgtgtattgagaaaggccatgcattcttatcgatcttaaccaatatgcgataaaaatagatgcacatgcataaaaacttgtatcgttaattctaggaacagtgttagaagcacacaatcctacattacctgttattttattcgacaatttggagatacagttctcgccgatctcgatgtctgcatctaataatactataatgctgccttttgcgtttctgaatatggtattccatccttggcttgcaccttttctttggtcgttgtgaatgagacgaatattgtattcgggattttcagactttattttattgatcaggttaggagtttcatcattcgagtcgtctacgaaaattacctccgctattgtaaaattttttattagctgttgtgctctgagcgattcaaaaaattttaaaatattatgctcctcgttataagtaattattcctatagtgatggcacaagtatccattttattcattttaattcgatattctctctaattttttgagcaataccttctagctcctttatctgtgcaatcttacgcatgggccattgacctttaactttctcaatagagtatctgggaactatatgtacatgtacatgtggaactatctgatttgcagattttccattattctgattgatattgaatccgtcgcttcctaatacactagtgatggcctttgctatccgcggtactaagcaatgcatctccccaacctcatttatgggcatatccaaaatgtttctataatgctgtttaggcactaatagcgaatgtccatggtttatgggatatttatccatgaaagccaaaaatttttcatcttcgtaaattattgcgttaggtaaatttttcagtacaatctgacaaaaaatacaattgtgatttaatgtctgcatccttatcaagatagtaaaatactgaaatgtttaatttagttttttatacagttaatatgtcttgtcatgatttagattttatttttagttcattttaaatagctcgaaaattttttaaaagatatgactgaatcaattgagttagaaagtttcacactgaatttttctttcccatgcccaaaatgtgagtaccttaatgaaatctcttcgaacgaattgcataataatagtatagaatgtggaatgtgcgagaccatattcaagtttgagggtttggattctataaaaataacagcaaccttggactaatatcataatataactaaaagaattaagtttttattttatgattctaatctaaacatttgtaatgattttaccgagcagaaaaacagttgagggagcatcgcgtgcacctcatagggcaatgtacaagtcgatggggcttacagatgatgatcttagtaggcccttagtagcagtatctagtacatgtaatgaggcaacaccttgcaatattcatttgggcaaactcgctcaaaaatcaaaggaaggtgtaaaggactctggaaacacgccgcgggaattcactacaatagctgtttctgatggcattgcaatgggacatgaaggtatgaaatcctctcttatcagccgtgagatcatagcagattcgattgaggtgatggttagagcacatcaatatgacggaatagtagggatttcgggatgtgataaaagcttgccgggaaccctaatggctatggctcgactcaatattccctccatattcgtttatggaggtaccattcttccaggcaattggaatggtaaagcggttaccattcaagatgtttatgaggctgtgggaacatatgacgccggtaaaatgagcttggaagaattgatcagcctcgaaaacgtagcatgcccttcggccggatcatgtgcaggcatgtataccgctaatacgatggcatccataagcgaggcattagggatgtcgttaccaggaagtgctacaccgcctgctgaaagccaagaaagatacaaaatttgctttgaaaccggtaaatctatcgatcatcttttagtgaacgatttgaaacctagggatataatgacctatgaggcattcgaaaatgcaatcatgatggcaaatgcgataggaggttcgactaatgcaatacttcatctattagcattgtcacgtgaaaccggaatcgagctggatataaaggattttgaatatatacgaagaaagacacctcatattgcgaatatgagacccggggggaattatgtaatgttgaacttggacaatatcggaggcatcccagtaattttgaaggcattactagataaaggtatactaaatggaaatgtagagaccgttactggtaggacaatgaaagacaatcttgaatcctatgacttcagtaattctaaatctttttataaagcacatagaaatgagtatcggaatatccttcgacccgttgataatccaatacataaagaaggtacgttaaaaattctgtttggaaatttggccccggagggtgctgtaatcaaagttgcaggattgaaggaagataattttgaagggattgcgaaggtttatgattcagaagaatctgcatttgatgcagtttcaaaaaggcaaattaacgaaggcgatgttgtcgtaataagatatgaaggtccaaagggtggaccaggaatgagagaaatgctaggagtgacagcggcaatagtaggtcaaggattgggtgaaaaggtagctatgttaactgatggtcgattctctggcgcaacccgtggatttatgataggacacgtgtctcccgaggccatggtaggcggaccaatttccataatcaaaaatggcgataaaatcaagattgatttgctcaaagaaacagttgatctcaagatttcgaagaaagaatccacaagtcggatcaagaaatttaaacctattaagaataggtatcgatcgggagccttagcaaaatatgcaacattggttaattctgcatcagtaggagccataacctctccaataccaaagtatatgaaaaagagcttcacctaattttctatgtcaatagaatcaatgataccgtaaagtggaaaattattaaagtgctccgctattttattatcaaggaaaatgatttgaatcagctcgaaattattgatcataattattaccttgctattcccagttacaagtttattgtctgtaaataaatcaactgttccatccatgaatatggtgtcatcagtaccaaaaaacacatctccctcactattaaaattgttaattgtatgccagtgaaaccctttggcgtttgatgtaatcattacaaattttgaatcaaataatacaacttctgaagaattgacatttatcttccaattcccggaaactattgttgaaatattcttatcaaaggggccagcggaatcactagcgttaccaattttacctatggttggattccctttttcgatcgattgaatgataatacctgaaagcattgaaaccaaactatttgataagttatcagtttggtttaattgaccaaagctggtgttattcccggttgtgctttgattcgagttcagcattgaggacggattcgctgtgccgattatctcatcaatctgttgatcaggtgatagggttggatctgaattttcgaaattagtatcaagctctgaataagaaattatccggtcattttcacttgatccgttattggatactagcgaagggtttaaggtggagacgagggatccagatagagcaaatgtgttattcacatcaagtctaccgctctttgaattcgaaatgctttccttaacaacaatattatttgtttcggcaaaaacagactcgaaattactatgagcaaaatataccaagaatactagcattgttagtagaagaatttttgtcaaatccaataattgtaataagccaatttttttaataagtttctttccttataaaagttaatccaaaaatttatgaatctgaaataccataataatgaaatgttaaacaaagatcaattttttaatttcttaaaaataaataacaataaggaattctccaaagaagaaattatcaatcgctttgcagggtcttataatgaagaacaacgaatagaccaattactagctgaacttgaagttgactccacttatacggattcaaatctaaacgcatcatgtagatctgggaccgtatattacaaatggaaaagttcctaataggtttaaatggttttgatgtaatctgcaatttaatattcatttaccatgatttcctccaattccgcgtgaattaactcaagcacttcagagatagtatttaggtatgtaattccacaaactatgcatttgctatgatcagtataatttctattacgattcaaaaatggatccatcttatttgttgtataataatatgttacaagtaatacgtagtttccaagtaaattcttgtttatgaaaatctttttgctagttgatttagattcaattttgaggccctcgtcagaatccagaagcgataacgattccgcaaggaactcatctgtaggattcacgatcaaatggttacattgtgaattaccatttgatcaatttaaaacttataattagcatgtggaaagattatcaggttgaagttaatcaggaaaggtaaagtaaaggatatttatgaaacctccgagaacacattcgttttttctttttctgacagagtgtctgcctatgatgttatactaaatgatgaaattccttacaaagggaaagtcttgtgtgattttgctgttttttggtttaaaactataaaaggaaaaaaccattttaagagaagggtagatacaaacaaaattgaagtaactaaattacacatgattccgattgaatgtgtagttcgatcatatttatacggaagcttatattctcgataccttaaacatgaagtcaatattttcgggaatgagaagtcatttctaaagggggatttgccactagcttcaaaattacccgaacttattttcgacccaactaccaaatcctatcaacatgatatgcccatttccgaaactgaaatacttaaaaataagttaattagtcgtagtgaactatcgcaattaaaaaaactatcgttggacttgtttaatcaagtaaacgcgatcatatctacatccggttttattctctcagatatcaaatttgaattcggaaaagagcctaagaccggagaaatcatactcgcggactcaattgggccggatgaatttagaatatggaataaagatgattataaagttggatatattcaggatagttatgataaacaaatattaagagattggctggagagcattggtttcagagaagaagtggaaaaatgcaacaataataatacagttccagatattccaaagctacctcaagctataattgaaaaagtgtcccaaaggtacattgatgcctacgaacgcatcacaagatcaacttttaataagagttcatgatcagttaatcgaacaaatagagtaaaccttttattcaagccttataagcagcaatccctgtttcaatgggtccttcaataaatctatcatctttcttgggatgtgtatggcgctcaaattacaattcacacatagagtgcgattacaggtaaaattgctttttctaaaaacaatatcatgatcatgagtaagaagtagattctcatttccaaacccatgaaacataaacttaaacggttcaacaatcaattctatttctatgaaagagtgattactcttgatcttatttttcatttcactagataggtcggaacacgatttgtttgcattaactcctataatacaatcccccctaagtgtcaagtgaggatcttttgtaacctctatggtccttgcatgaagagaccgaatatttttatggccataaaattggatttcctctattaacaactaactgttttattcacttttttaagtaaataatcctttattttttaaataaggtaactataaataaagatttagaagtattctagttgatttgttaccagcagcagcaggttatgatagaggaattactgttttttcacctgatgggcgattatatcaggttgaatatgcaattgaaaccgttaggagaggcacattagctttagggatcaaaagcactgatggtgtaatccttgcagtggaagaaaaaacgagaaaattgcaaatatctaatgtaactcaaaaaatatttcaaatagatgatcatataggtcttgccgcagcaggatatattccagatgctcgtactcaggttgatcatgcacgcttttttgcccaaagcaaccgtcttatttatgacgaggtagttgatgttgaaggcgtcgcaaaaaatttagctgatatggcacaacagtatactcaatatgccggtgccagacctttcggcgttgcactaatattagcaggtgtagataagaatgggattggtttgtatctcactgacccaagcggtacatacattggatatgatgctgtagcaataggtgcgggaagtgaacaagtaaccgaacacttggaaaagaattatagaaacgatatcggtctcgataaagcctgcatactcgcaatagaatctattttcatggttagtgaagagaaaactggtactaaacatattagattggccgtgattgattccaaatcaaaaactttgcgaatgatgccattggaagagattgagaattattctaaacaagtgcaaaataaagaaagccaatcttagctggcattaagataaaaattacccagcttggttcttatgtgactagagtctttaaataattcttattttattgaagattgattatcaatggcgttagaaattggttccaaagcacctaatttgcaactttcgaaatgggtacaaggtactccaacaaatatagataacttgattggaaatgtagtagtagttgaagtttttcaagttaactgtccaggatgtttcctctatgggattccccaggcagtttccgtgtatgaaaaatttaaaaataaaaacgttaaggtaataggagttgccactgcattcgaagattatgacaagaacaccttacaaaaccttgaacttctgctttcagaaggtcaagtaattggagagacattgaaggctttaaaacagcatggtaaaatagttgacgaaaataaattatattacaatataccctttcctgtggctttcgataaggttatcaaaatgccagttgatgtttctgacaagatgatttttgattttataggaatatatttttctgatttttctacattttctgacaccgataagaaagaacttattgataaggtaagaaattatttacaaaataaggaattttccgcattgacttttgagacttttaggctgagaggaacaccttcttctatagttattgataaagagggaatattgagatatagtttttttggatctgaaggttacttggaaggagcagtaaacgaattactaaacgaacggtgatttatatttcaaatccattgaggtttgatgtttctatccccgattcattcctttatgatgtttcgacagaaagtgataaagcactgaaaatttttcaattatctagagctttatcgatttttaggattaataatctatttgtatatcacgacaaattactgaacccaggcaaaaatgatctgaacctaatgataacaattctggaatatcttgatacacctccatatctaaggaagaggctttatcctaaacttgaaattttaaaaaatgtaggaaagcttcatccaataagatcgcctcatcataaagatagaatggagataaggaacttgagaagtggcgaaattagggtaggagttgttgagaacagacatggcatatattttgtagatatcggattaagtattccaattgagtatagtggaaaatataaacaaaatggtaggaaagttaatgtaaagatattaaaacacaagaattacattaatgccattgatatagaaaagaatgaaataactgaattatattggggatacaatgtgcatcaaataaaagacttaaaaaatataattgaaaaatttcctaaatcaaagatcatccttacttcgagactttcgaaatactttaatccatatgacaacgagttttctagactgcctagttcttcaagcaatgattcaatcctagttgtatttggttcaccgaaatttggattaaattcgattttgtcaaatgagaaaatggatatttctaaatattattcttataacttcttcccaaatcagggtactcaaaccgttagattagaggaatcaatatacggtgtattgtctatcctgaacatatgttcatattctttctagtctattaatagcgataataaacttattaaagggatccgaaaaatttttgtatctatgggtcaccgaaaatatagcgcaccacgaagaggcagcattgcatttcgaccacgggccagagcacaaagcttagaagctagaatcagaacatggcccgataatattagtcgcgagaatgttggcttggttggatttgccggatttaaagtaggtcaaattcaggtaatgacgattgatgataaggagaagactccaaattatggtaaaccattaatgaatcattctacagtgatatctttaccccctataaaaatagtgggaattcgaggctactccgaagatggatacggtaagcatgcactttttgatgtatattccaaagaaagcgttaaagatttatctttaaagtacaaaacgaagtattccgaggatggactaaaaaaagcggaaggaatgattggatctgttaaacacttgaacgcagtagttgccgtatttcctaataaaattggaatttcgcaaaaagtaccatttatatacgaaattccagtttctgggactgacaatcaagtcaaattcgaattcttaagatcaaagctaggtcaagaagtccgagtaaccgatgttttcaaaacaggacaaaatattgatgttcatggcattaccaggggtaagggtgttgaaggtccaattacaagatttggcgttaagaggaaacaacataaatcaaggaaaagtgttagggcagttggaacattaggccctatatcccctgcggtggtaatgtataccgtcgctagacaaggacaaagagggtttcatcagcgtaccgaatataacaaaaggatactagttatgtccaattccgaaaatactgaattggtaaatattaatccaaaaggaggattcaaacattttggattggtagatggagattatatgatagtgaggggaactatacctggagtaccaaagagattgataaagttgaggcagcctataaggagcaaacaatcaaaaataagtgaacccaaggtattggaggtaattgtatagatgaagactaaactattcgacttaaaaggtattcagaccggagagatagatttacctcaattgtttaattttccatatcgtcctgagattattaaaaaggctttcgttaatttatattcacaccgtttccagaaacagggtagatatcctgctgccggcgaaattgtgagcgctgaatctaggaatactggcttaggcatcgctcgacttgcgagggcaaaaggtgaaggattttcccgtgctggtcaagcagctggagtagctggtgtaagaaaaggcaggcttgcacatccgcctgagtcatggaaggtcactcataagaaacttaacaagaaggaaaatattatcgctcttctctctgctatctcgtcgacccgtcaaagcgaactaatactcagtagaggtcatttaatagaggggataaaatcatttccaattgtagtaacgaacgatatagaaaatgtaagtaaaaccaaaaacttgctcgacgttttaggtctactaggaataggagaagaccttaaaagagttgaacaatcgattaagaagcgttctggtaaggcaaagaggaggggccgtcctaaccgtattggaaaaagcgcattaatagtagttggtcatcgcgactgtgagctgttgaaattaaataattctatacctggcataggcataaaatatgtaaaggatataagtgtcttagatcttgctccaggtgccagaccaataagattggtagttttttcgcaaagttcaatagatgaattaagtactctgaaaattccaaagaatgtaattctggagaactctatatgaataaatttttatataataaaaaaattgaaataaacgccgatattgcaagcaaaataatcctagaaccttacgtgaccgaaaaaacttttaatattatagaaaaagagaacaaactgagttttatagtccacaataaggcaactaaaggtcaaatcattagatctatgaagataatctacgaagcagatattagtgaagtaaatacttttaataccatcagaggtaagaaagcaattatgaaattcaagaatgcagatggcgcacgacagctggcaactaatttaggtttggtgtaaaatatgggaaattatgctcataatactgaattaaaagttattgataggagtaggtaaaaaaatggtacgcgaatttaaattcaaaggatattctggagaacaaattcaaaatctttcaattgaaacacttatgccgctcttaaattcaagacaaagacgatctttagataagaggctatcaacttatatgaatgatgaaaagagaaaattccgagaagatttgaaattagcccgggatggtaaacttaaaggtcaattaaaaactcatctaagagatatgattattttacccgacatgatcggattaacggtcatggttcacaacggaaaagagtttgtttcctacgttataaagcctgaaatggtgggtcattatctaggggaatatgctatcaccaataaacgagttcaacatggaacacctggtgttggttcatcaaggtccagcttgtatgtcccattgaagtgattaagatgccagattattcttattcttttcaaaagtatgaaaagtcaagacatgtaagggccgcaataagggataaatctatctcccataaacactctagagaaattgctattgctataaacaacaaaagtatagaaaaagcaagagaatttttggaagacgttttgataaaaaagatagcagttccttataggagatataataatgaagtagcacacagatcaaacatacgagatggattttgtgcaggtagatacccacacaaatcaacatcagagttcttgaaactactagacaatctagaatctaatgcagagtacaagggaatggatttggatcgacttaaaattatttccgttgttgtccataaaggaacaaaattaaagaggttcacgccgagagctatggggagggcaagtcctaaatatgatactctcgttcatgttgaaattgtagccatggaaggtaggtcatcttaaatgaatgcgatcaaaaatgtattaaaaaacaattatcgtaataccgaattagacgagtttctaaaagaggaattgaaagatgctggatttggaggagcggatattcaaaaatcacctctgggcactagactgaccttgtacgttacaaggcctgggcttgttataggaaggaagggcagcggtattagggatcttacatctaagttggaggtaagatttggattaaccaatccgcaaatttcagtagttgaagtagaagttcctgaactaaatcctaagatcatgtgcaacaggttagcacaactcatcgaacgaggcacggccttcagacgagccgcattgtggacagtaaagaccatagagggtgccggggcacttggtgttgaggtgacaatctctggaaagttgcgtagtgagagggctcattttgaaaaacattcgtctggaattattcctaaaagtggtaacatggcagataaagttgtccgtgaaggcataacacatgtcctaacaaaaatggggattatgggaattagacttaagattgctataaaaaatgctacacctcaagaatttgaactgattactaatttcaaagatcataacaatcaaataaatcaagctgatgataaaaacctgtcagactcaaatggaagtaatacccacggtcctaacgaaacaaaaccgcagaaagaaataatagaaaataaaggagagataactaaataattgtcaagaaacaagaccaaaactttgagacagtttaatgatgatgatctcaaggataaattaactgatttgaaagtcgatctagccaagcttcgttctgaagcaactaaaggcactttaaagaaagaagctggagtgattagatggaagagaagagacatagcaagaatacttactttaatgaatgaaagaaccggaggtaagaaatagaaaatgcagactcccaatcaaatatcctgtaatgaatttcttggtaaatttgttaaaattaacaaagctactaatgcaaggaattctaacagatcgggaatcgctgtaaatgaaacaaaaaatatgatattcttaatgaatcatgagaacagaaaggtgatgaagttttcaaaagcagaaatctatgattatgtaatttaccatgcgaatggaacgtgtatactcgatggcaagcgattattaggcagacctgaggaattagttaataaagtaatgtgattattatggttaagaatattggtatccaagtaaaagcaccaaagaagacatgcactaatagccattgtccgttttgcgggtctctatcgctaagaggaaaattgatagtggggaatgtagtaagtcataaaggtagaaatatggttgttgtagagcgagaatattcaagatttgtcgacaaatataaaagatatgagagatccaaatctagaatccatgctttcatctctgattgcatggatgtatccgatggaagcaaagtcaaaattgctgaatgtcgaccattatcgaaaaccatttcatttgctgttgtagaggtaagtgaataaacttgtcaactaaatcaagagccgtatcctcaagaggagtagaagaattcaggccttacgttacacgggcacttccaataatggcaaatcttgtctgcgcagataatacaggtgcaaaaatactacaaattgctcaagttacacggtataaggggagacattcaaggctgcctgccgccgccgttggtgatttcgtaacggtcactgtaaaaaaaggaccggctgaactcagaaaacagatttttggagctgttatagttagacagaaatatcctattaggaggctaaatggtgttcgagtatcttttgaagataatgctgcagttttggtcactactgaaggggaaataaaaggaacagaccttaaagggcctgtagctgctgaagcagctgaaaagtggccaaggattgctaacttagcatccatgatcatttgagtgtaaagaaaatgaaaagaaagtcaaacaacatatgttcaaatctttctagtaatttaaagaaggagtataataggaagagcctaagaatagtcaaaggagattcagtaaagataatgagaggcgaatacaaaggggtggaaggaaaggtagagaaactaaatactataaaaggaagattgagtatagaaggggttcagagggaaaaaattaagggcggacaagttaaagttcagattcatgcctccaatgtacgtataatgtcactacacctagatgacaaataccgaaagaataagataggaaatcaggaacaaattaataaatcatcaaggaaacaaacagtgaaaacacctgaaaaaaatgaggaaaatagtgaaaattaaatggtaaaaaaaagtggtagtactcggttaaaaagacaaatggcaccaaaattttgggatattaaacgcaaagactcacctttcattcttggaccaagacctggcccttattcaaaaacaaaatgctattcgatcggtgtagtgattcgtgatgttttacgtttgtgctcaaatttaaatgaagctaagagaatattaaactctggacaaattaaagtggatggtaaaattagaagggatatacgttttggtatcggaattatggatgttgtagagatagttccaaatggggtttcttatagaatggtaccgaaaggttccaaattactagtacctacacaaactactgaaaaatcattgaaattgttaaagattactagcaaggtaagctaccgaggaaataaaatccaatacgggtttcacgacggaaaaactttgatatcggacaataaagatatgaaggttggtgattcctgtctggtaacaattcctgaaataaatatagaacaacatataaagttcgaaactggatgcaatattcttgtagttcagggtgaaaatgcaggtaagatcggcaaagtagaagagattaaagacggaatgttttcgttacctaaacgagtagtgttaactttagatgaaaaaaccgtagaattacctgttggtatagtaatgcccgtcggtgtggaaaaacctgtattggaggtattggttaatgacagaaaataagattaacccgatgaaagaaattcaggtgtctaaggtggtcattaatattggtgtaggtaaatccggagatcctgttgaaaaagccaagaatgctttatctgaactaacaggtaaaactcctagtgtaaggggtgcaaaaaaaagtgtaagggattttggtattcacaaaggtgagcctataggtgcaatggttaccctaagacgaacagatgccacaaactttttaagacgagtaatagaatcaaagaggaatgtgataaagaattcatcatttgacaataatggtaatatatccttcggaatccatgaacacattgatattcctggtacaaagtacaatcctgatatcggtatatttggaatggatgtatgtgccgcattgacaagacctggttacaggatttcaaaaaggagaaatcctagtagaatcggcaaaagtcataaaattacaaaagatgagtctatagaattctttaaggctcaatttggagttgaagtcaattgaaaattaaaattagagattacgcacttacgggaagaaagaagttggcccacggaaaaggtacccggtggtgcaagagatgtggctcttttagcggcatgatttgttcttatgatctcatgttatgcagaagatgtttccgagaagttgccttctccttggggtttaggaaatacgaataggtgataattggatgcccgcattaaatattttatctaatctattcaccactttgtataacaacgaaatgagaaggaaacgtgaatgtatagtattgcccgcgtcaaaattctctagcgaagtcttaagagtcatgcaaaagcagaggtatattggagaattcgaacaggttgacgacggaagattgggtaaattcagaatacaacttctagcaaaaatcaataaatgtggaattattacccctagatttagtgtaaagaaggatcgatatttagattgggaacgtcagtttcttccatcttataacatgggcatattaatagtatctactagtaaaggaattatgtctcatcatgatgctgaagacgcaggactaggaggtgcactcataggttatgtctactaaaccggatttttatacaaatgagatcattattccagatggtgtatctgtaaataaagatcaaaatctcattacaacaaacggctcaaatggaaaagttcaaaaggattttacaaaaattcccgcattaatagaagttgataaggaaaagattacaattcgatcttatggaaatagaaaaagcgattttgcattggtcaatacagtgcatagtcttatcaggaatatgataaaaggttctaccacgggattcacatataaattaaaaatcgtctttgcacactttcccatatctgttaagattaaaggacagcaggtttacatcgaaaacttttttggagaacgatcatctagagtggcaaaaatactaggcaaagaaaccaaggtgactgtacaaggtgatgatattttgatcacagggccaaacattgaaaatgtatcccaaacagcagcaaatatcgaaacttctacaaggataaaaaataaagactcgagagtgtttcttgatggagtatacatatactccaaagagtgaatatccaaaaaaatctttttaacctttttagaataaatggtatttgatcaatatttttattactttacgagaaatcaaactagtaaacataacatttaattattctttacaatttttaatagcatagtgccgctgtagctcagcttggtagagcaaattcgtgatggattcattatgaagcttaactggctgttaaccagtaggtcatcagtccgagtctgatcagcggcgctttgtttaatttaaaacgaaactatgtctaacgctattgcatcggataataaataagtatgtctgttccctgaaacaaaattatttttaatatctattctaggaacccatctattagaagacgtgaacagtctttctttcttcattctgttttcaagttcttctatatctagttctttctcttctatctcctcagtttccaaattttgaactatcaataatattttcttaatcaaaaccctgtccccatttttggagaagtcacgatttctttcgtcttcctcaatgatttttattttaatctgttttcgattaaatgcatctctactcattagcattctgtcactcagatatccttcgtaactcattgaaaatcaatgtacataggttgttaataattattttaatcttttaattttgatttttgtaaattctaggcttaatttgttatctttaatactaactttggaaattattattctatcattgggaaaaacaagtttatcaacacttccaatcattcgtattcctgaaaactcgcctacaccgtaatagccgattaagtctgggatattggaaaatgatttttcaataaggactccttttctattgattttcctaaaaccagttttcttgaaacaggagttgcaatggtgattcggtggccagatatgaattttgcaatgaaagcaataggtggtaattaggatgcccttgttggcagtatcaaaaataatatccacaagggtcattctaatttatttttgaaggattattattgtggtggaagtacctgcagctgccatattatgaactaggccgttcatacaatcttttttttgtcttagacctgcccttccttgcagctgaattactatttcgttggtctgatcaattccagtcgccccaataggatgaccgcagccaagaagtccgcctcttaagtttgtatggagcgtattattgtctatgaattttcttccatctcccttaccgataaatccaatatcttcataggctaggatctctaaaattgtaaatgcatcatgaatctccacgatgtcaatatttttaggtcccaagtttgattgtcggaatgcatccctagctgcaatccttgtggataatatggaatcaagttgattcgaaatcgaggcaaaactagcgccttggttactctgggagatcccctttatccaaatgggtatttcagttctctttgccattgcttttgataatataagtaaggatgatgatccctcacaaggataacaacaatcaaacttttttaacggttctaccacaacttttgaatttactattgtcgaataggtaaaatgtttgtcatagaaaaacgcattaatatttttattagcattcatatgattttttaaggaaatacttgctagatcatcttcagtcgtcccaaactttcgaaaatggttttgcgcatatagtgatgcccaatgaattggcatatcgaattgtcccctggatatatcccaaatcagtttgtttccttgactattttgcttctcaactccagttactagcaccgcatgacataatcctgattttatcaatgagtaggccaacataacgccgctggtacctgaattacataaattttcaaccttggcagaaaattttggttttattcctaccatttctgaaactatgtttcctaaatatgtatcactagagctgctcgacactataaggccatctatttcatgcttttgaatttgcgttccaccaagtaattcaattacagatttactggctagttctgcaggtgtagagtctgaagccttggtaaatttttgtgtattggaagaatcaattgctacttccataaatctgtaaaatccttgtagttcaaattgtcgctagcgtcttttataggattcatctgcaatattggtaaatcgataccaattttccttactcgtttaatttgactattgcaatcatttatagaacctgctatgacaagatcattaatcatctcatcagtaatgtttttaattgactctcctagtccatactttttgtaatcattatagattttttcaacctctgacttgtatttggttttaatcaatgattcatagtagatacttccaactgatatataaaaggccaaagttctggcagctctatcaatagcctttttaggtgctttatttgatacggaggtaataattacaagcgccttcatgaaattctgattttgattttcaaatttgatgtcctcaatcaaccccttcaattcctctttggacttgaggtaaagaatgactccatcagcgtacctcttagcaacacaaatcattcctgaatttacggccgcaacatagataggaatatcatctctagagtgttcaagcagtttaaaatctttaatatttattgtttgtccataatagttaactttattcgattttaataacaactttatcgattggatgtattctttcatcctgactaacggtttttcaaacttcataccatgaaggttctgtactaaggcagaagtacttgtgccaaggcccaaaatagcccgtttgtttgatagattatccaaagtgatcccacccatagcaatcgtagcgggtgttcgagaatagatgttaacaatagatgatccaattttcattctatttgtaacttgggatatcgccccaagagttgaaaaaacttcctttccccaagactcgggggcccaaatggaatgaatattttcatttttgtccactatcgaagcaaattcaagaatctgtttagcctctaataaggatccaatgctaaaccctattttttccctcatgattgttttgaatttatccttgatagctcttttgatgattcttcaatgtccttgtgggaatcaattgatttccaaaatgatttttcaaatttctttgcttttaatttttgttcatttgccatagcaggcaatgctgtagtttctatgtttcctttatcgggtaagaagtcaaaaatttcttggttaaaaaaataaatacctgcattaatccatttatcgagtatattcggtttctctttgaatcccgtcacaaattgctggtcgttaaaatccacaatcccaaacgggctttttaatggaactactgctatagagttataatcattcttgtgggataggatgttaaattcgatgtttgtcaatatgtctccattgatcatgaagaacccatttttttcatcttttagaagagcatgtgtgttttttagcgcaccaccggttcccagtggttcctcctctaccatgtaggccacttttaccttgaatttgtttccactcgcaatatgatttatgatttgctcctttaaatagccgacacaaatgataatttctgttatattattttttgacaatagctttaattgccattcgataatgggcttgcctagaatttctatcataggtttggggcggttatcagtgatcggcttaagtcttttaccaaatcctcccgctaatattactcctttcaaaacaaattaactaatttgatttaaaatatattttttcctattatcgcattcaaatgtgttacccgtaataggaatttatattattcagcgagtatcaaaaaaaagattaccatgatactagtgttattaccattatactagtgttattaccattatactagtgttattaccattatactagtgttattaccattatactagtgttattaccatgaataaaaaataaatatttcaaaattcgagttatgaaataagactaaataagttttaattttttaaatatttggcgagatggtctaatagttcatagatttgatcctgactatgattactattgagtgatattcttaaacgcgcctcatttcttttaactgtaggatatcgtatggcctgtacaaaaaaatgttgtcgtaataatcttttcgaaatatctaaagcttttttttcagatcctattaatattggaattatgggactgtattcgatttttcgactgttaattttttgttcatttgctattttatggaaataatcaatattattatataatttaatttggaggattccctcctttgctaattgcattgacatcatagctatttcggccaaataatctgggagagcagaagtgaaaataaatggtcgtgatttattaattaaatactttcttacccactttgaacagctaacataaccaccgaaacaaccaagtcctttgctaagactactaatatgaatatctacggttctattaacgccgaaatagcttggagttccactataatcctttaacttgttattacctataataaagtctccatgtgagtcgtccactatgagtaaacaattattttcccttgaaatcctcgcaatttcacttagatctgccatatcaccgtccatactaaaaattccttcagttattattatttttcttttgtcattattcttttttataatcttctctaattcgatactatcattgtgggggaatggctggattttgctccgagacatcctgcagccatctattatacttgcatgatttaactcatcactaaaaataatggtttccccatcagcgatacaaccaagaactcctaaatttgccatgaatcctgttgggtaaagcaaggatgagctggttttcctatgctttgaaagagccttctctaggttttctaaactttctgtatttccactaattaatctcgagctacattgtgaaatcgctgaagtaggtagagtttttaacttttttactagtaatctgttcctagataagcccagatagtcatttgatgaaaaattcattacatcgggggcattaatcccctttactgtattagagatatctacaatagttcttagatctctgtataagtgctcctttcttaactctcttaacttgtctcgaaaataatgtgaattatttttgattaagcccaatctcttttagcattttaatgtcatcaagagctttatttccttttgtagttaaatatcctccactaattattccattagcacctgcttttagtactttcatgtcattctcttttaaatgaacttctcttcctcctgcaattttaagaataactctaggcataagaaaacgaaatgttgcaatagtcctaattatttcctcttcagtcagcaaggacttgttaaacaatggcgttccttctctacctatcaacatgtttacagggacttcgtcaggattcaacgattgtaaagcaatacccaattctactctctgttcgatcgattctcccatacctataatcccaccactacacaactccaatccggattctttcacaactttagcggtattaattctatcttcgtatttatgagtagtacaaatcttatcaaagaaacttttcgccgtttctaaattatgattatacctcttgacccctaatttctttagtatttgagccctatctctggtcataaaacccaaagaggtgttaacatctatatctagcctttcttttattagctttatagtatcgcatatttgaatgaaatccggttctggtggagcgcgataagcacagactatacaaaaactatttgccccattatcctttgctgcttttgcttgggctaatatctcctccgcggttaatagaggatattttttgatttctgtggtgttaaatgtcgattgagagcaaaaagaacaatcttctggacatcggccagatttggcattaactagggtttcaacatcaattccgtcgcccccgaatttctgtgtaatttgattagcacaatcagctagcaattcgagatcagtagtattaattaacttcatggcgtcatggaaattaatttttttatctgagaaaacgttaaacattttttcgtagataaaatccttagtcaaattactcatttgataacgcttttagataataacttccttatattagtattttagtatttcctcagtggtttttaaaaaacggaattcgtcttaaatgtagtaatagtgatttgtctataaaaggaccgattttcatacagtcttataatcagaccgattttcatacagtcttataatcagaccggtttttttaccattgttatttggattatcgtttaaacttttttaatacttactcgtattattttgactaccttttttttactctcagcaatgaatagaatatgtgaaatatgcttttgcttacttgcgagtaagtacggaagaacaaactgtattaaatcagaagttggcaatgcaagactgggcacagtcacatgactttcagatcttggattatttcgaagactcctcaattagcggaaaaacagccgcaataggccgcaaaggattccaagaattgttaaaaatagtagcattagaatctgtcgatgcagtattggtctatgaactttctcgggtaggtcgtacattttgggatactttggaagctatcaaggccattgaacagtattctcccttaatctcatgttctgcccgggaaactttcctccaaactactgaaccaagcattagaaagcttatgttgggtattctgacctgggtcgcagagcgtgaaagagaacttttagttcaaagaaccaaagatggtattatcagggctaaatctgtaggaaaacatataggaagacctagaaaagaattgaatacttctgttttaattagtcacctttctcaaaataaatctaaattaagaatcgcgaaggaattaggagtttctaaagctaccctttataaaaatttaagaaagcttgcccactagcgattatttcttccattaatatctttaacaatctccaattgagtatctataattttattaagagagtttgtgtcaattgctaaaggtggtataactatcattgtagctcctaaagacctaagtaaaactcctctcttaagtgattggttcataacaaaatagcttatggggatgttatctaccatagtaatgggtttaccattcactgcaagttcaaatccagctaataatccttttgctctgatattttttactattggaataaattgaaattccctcaacctcttcttaagttgtttggcatttgatcttatcttgcttatcagattattctcctcgtacattcgaagattttcaatgacagccgtgcatccaattgggtgtccagcataggtgtgaccatgaaacaggtgcttttgatctcccatagagccagaaaattcttggaatattttgttggaagaaacggtaagggctaaaggaaaataaccccctgttattgcttttccaaaacacgctatgtctgggacggtttcttgggcgatgtattctatcatatttccaagtctcccaaagccggtcgcaatttcgtctaaaataaacaagatattatgctttttacacatttcactaattctcttttgatagtcatttgggtaaatattaaccccaccagccacctgcgcaccgctttccattattagtgcagcagttttatttgcatttttctcaattaacttctctgttctttctaacaatagattcaacttttctgaattaactattccatcaagggacgtccttttaggattcggaattacattacatttgcacaacaatcttttataactcttaaagtatttgtcgacataacctaccgacatcgctccaatggtatcaccatgataaccgtcagcaagtgacaaaaatgatgttttcttcatatttccctgattgtaccagtattgtaaagctatttttaatgcggcttcaatagcggaagaaccattatcggtaaaaaacaccttattcagaccctttgtcaattttatgaaattattggaaagctcgattgatttatcatttccaattccaaaaatagttgagtgaggtatttgtttgatctggttgatcatcgcattggtaattcgattcttactgaatccccaaacattgcaccacatattagaaattccgtcaaggtatttgttaccatcatcgtcataaaaataaaaatgttttcctgatctgataattcttctctttatatatctggaataatcatgcatctgtgtataaggataccatatgttgtcactttttgacaaatataaattacctaatcttttattgattaataaattctttatgttttaattcttgaaacttatattgatagtctgcttatgtaaactgttaacctaaatggatatgaaggatttaatgtactcagcaatcgatcaacttggaagagattttatcaaaacgaaaatcaaagataacattttgaattccgagtgtataatcaatcaaatttttgaaaaatgtgctaaatcaagaggtactcagcacctaactccttttgaatgtatctccttagctgaagctttgatgcattatttacttgcaattactataacaccgtcacagagaaaaattaaaataaataatatcgaaattagcatttttgttcccagtgctggcggtttaaagtatggtggagataaagtattggtcatccaatttctgaaagagggtaaaattgaaaatgagcatactgtcagcagtttattggaaatacaaccaactttagataatatatggttagtttcccacagtcctgtagtaacccttttcccattgaaaaattttgtaataaatactcagttgattggaacaaatgaacttgtacaaccattctcacgattgatgattcagatcattgcctttctgaataaaattaattataccggttttcgaattctctaaaattgagtatttcttgatatttcataactcgaattttgaaatatagattggtttaaggtatatgaagaagtatagaattgaattctacgcatcaagagctgaatacactgaaataagaggttatttcgaaaaaatacctcttgaggtaataatggctggacttcgattttcaaataatagataccgggctaatataggtggttacttaaatccaggacgcaaaagtttagtcaaaaaggagaccgcactattgacaaaaaagcaagctaaagttaggttaaaaaactggaaaatcatgataaaaaaatatcgagaaagtggttatagctatccaaccatttaccgcataaaaatgaggctggatgccattgtcaatgatatagatatctaaatagagatagtttgttgtatgtcagtatagagagttactttctgagattttagaatccaatcctgtatttggtaaatccggaaatttatccttcatgttctgttcgacaatggcgctagcctcttcaattatttttaaagcatcctcgcttacagtatttgtgtttccactaatttcagaccccgttggaatctgtccagaatcattcatgataccatttaatatatctgtgatctttccaaacgactgtccggcttctggtatcatcgaatttaacccaccctgaatattcttaattaccgacatcgctggactcagagtaaccaccacatcgccaagctcggtgatagtatttaatctaagttgaatttgttctaaggcaagttttgcggatgttatcatcttattcattttcctgatttgcgataattcattggaaaggatttttgcatattgactatcatgattctgcattgcactaataattctcttaaatatgatttgatctttctcgtccatcttagatgacatactttctaattttgcgatctgagagtgcagcctcttttgtgcctcttcaattctaggttttaatggggaggggggttttatattctctaataatttcatacctacgttgctaatttcattttgtggtttgatccatttgttgctgaaagacatttaattttataccctctcccaatgtaaaattttgtatataaagatgtatttttctccattgttgtaaccgaagcgacaacaatcaatggttacaaaagctttgcttcaatattaaacaggataagcgccgcaagtcttacagaaactgccattccaaataaatatggtgttacagtgcgagcatcttttagatttcataatttgagaaccgatttcatgaaatggagcgtcaaaaaattttctatatatgcggtaataaaataaatgctccttattccttattaaaaccctttcgttttttgcttttgtgaaccctgcaagaaaatcttcatcggtaatcctcttttctaaataaggcaaaaccttgattatgcctgagccactttctaatgcttcctttcttctccaagcaatctcttctcccagtatttccttaaaacaatttctcaaaaaaaattttccataaattataccatgatgggtagcgattttctcgtttactgataatgactgactgaactttataattaattcgtcaagaaatggagttattatcctcagattatatttttttgataattgaaatgatataaactccatgttttgacttatttcatccaactttgtctgcaaaatctctggagactttatgtatctactcaggaaattatatccaccaaagagttcatctgctccatcccctaaaatgattgcatttgcctttagtcttgttgcctctttaaatcctaaaagttgaaccacactattttttaaaaatattgggtcgaatgtcttaaaatctcttattagctcctccagattttcaaagacttcttcgattctgggcattacgatgtaatgatttttagaatatttcttagcgacgaccgacgaatatctataatcggatgaatatggatcgatagatatggttatggcgtctctgggacgcatataaaaaaggagcagagtgctatctaaacctcctgatagtaagattgattctccatggacccgtttacatactctacgaagaagttcttgaaattcgctacataaatttaacaaatattatgatatcaattttacgtttataaatctaaatcgttaaactttaaaccaaaatggaatttagagcaaaaaaaaaatgtattaatccttcatgcgggaaggaatattccatagataataatatttatcaatgctcttgcagctttcttctagatatagaatatccggatgtaccgaatagaaatcttactgaagtattttatcaacgacgcaattttgggggaaatatattcaatgaaagtggggtatggcgttatagggagttactaaactttgttgatattgacaccgaaaacgtgcaagaatgtgcaaaatttctggtttcattggatggatcagagggtagatcatccagaccttaccaaatgagtaaagttgcaaagtacgttaacttacctaccaataatttatttctgcagccagaaggttataaccccagtggatctttcaaggataatggaatggcagctgcagttacacatgcaaagttactaaatgttgaaaaaatagtttgtgcctctacaggaaatacttctgcatcagctgcaatgtatgcctcaaatgagggaataaattgtgatgtttacatcccaaagggtgaaatagctccaggaaagttgggtcaagcatttcagtttggcgctcaagtacttgaagtagatggtaattttgatgatgccctggcgctatctttagccatggcctcgaaagaagggggatacactgtcaattcgttgaatccatttaggattgaaggtcaaaaaactataatatttagaatcatggaatatctcaattggaacccacctgactggattgtatatccgggaggagctctaggaaatatatccagctgtgggaaggcgcttatggagctctataaatggggatggataaaaaagatacctcgcgttttggtcgtcaatgctacaggtgcaaatactttttatcaattagtaaatggtttgtttgaggatactaaactaaaatggaatggcggtaaagttgatacaggtcttattgaccgattctatcaaaaacaacaagaaaagaacattctacctaaaacacaagcaaccgcaattcaaattggcaagccagcaaatataattaaggcactgagaaccatcgattttacagatggcattgtagaacaggttgctgacatcgatatgatggatggaatgaccatcgtagggctgaatggatttgactgtgagatggcatcaggctcagtccctgccggaataaagaaattatgtgaaaaaggattgataaaaaaagatgagattgtagtaggagtattaacaggtagacagaaaaatccatcaattgttattcaatatcatttactcaagtctaacaaatattcaaaaccaccacgtgaattacttaattgaagccttagtagtggctttttcgatcgcatataatgttgaaagaactgcatgggacttgtcttcggtttcttgatattctttgtcgggtattgaatctattacaattcctgccccagactgcgtaaacgccttttctttattaagaaagatcgaccttatggttatggcgaaatcacaagattgattgaatgaaaaatagcccatagcaccagcatatggtcctctactttccggttctagctcatttattatttccatcgctcttatttttggagctcctgaaatggtaccagctggaaataatgctttaaacgcatcaaatgaatcatattttggatctaacacaccctgtacatgcgatacaatatgttgaatatggctaaacttttttactttcatcaattctgaagtgattaccgacccaaattgacaaacctttccaagatcattgcgggctaaatctaccaacatggtgtgctcagctatttctttttgatcttttaatagttctcttcgtaggcgttctgtaacttccttatctttagaaactggtcgcgagccagcgatggggtatgtttcgacttggccgccagtgatccttagtaacatttcgggactggatccaagtaaaatcctagaaccggttttataataaaacatgtaaggagaagggttaattttcctgagctcatcatataattgcagagggttaccattaaaagtaaactttattttctttgataatactgtttgaaagacatctccaacaaataggtgatccttgatttgattcactttatcttcaaatgtttttttctttatacttctcttggggagggaaaatgtcgagtcatacttacctgctaacttacttttgccttttacaatctttctaattgtctcaattcttgatttttcataaaaaaaatattctagtttcttttttgtatgaatggtacactaaaccatcatcgaaatacccaaattcaagaaggggaaatattgtcctacttttgacattgattttctcccaatattttatagcctcataggaaaaataacccactagtccaccaacatatctgtaatctttgttagtgattcttggaaaacaattttttaatgtgtacagcgggtctgtgattgaaatttttcttataattctattattgtgatatactagtaacgtattagtattgcatttaattttgtatttaggaccaaatcctattattgaagattcggctaattcctggggtccttctaatgattcaaaaatgaaaagatcgttgaactcataacttatcctcttgaagatatcaaatggatgcatacttgtttccaaaataataaaagtaggttcattgtcaagcttgaagagtttctctaaatcatttgacactaaatatccctatctaacgtaaatctgctaaatcatcattattaaaagtgcctctgactgaaagtggctttctacccataaaaccctcattttttccatgccaaaatttaattttatcctcacctatcttccaacacaaccaaacttcctcgttaaaacgttttgaaggaaaatctaataggccctcctcaaaactcttaatcaatatacctaatccttcaagctcttcgatatctttatagagttcgataagtgctttgttcactagccctttcttcataaaatatgcttcatgtgatgattctagatttaatatagaattcagttcgacctgaagttccataatattatttctttgattcagaatcttgacaaatttagcccttacttctggtaatatactgttagctttgatcggggtaaataatttaatcataatagagaaaaagggcaataaatatttatttttatttgagaacaaatatggattaataatagaattactcaactgaattcatatgggtatcatcaagaacaaaggtgctattcttagatatcataattgtaaatcattacgtgattccctcaatgctttgaattatgctttcaaatattgtgatcctcaaaggctcgttaatcagtctattcgcatagattcagatgtgcaaatcaccgatatgaataatagggtacatcaatttgacctacctaacaaacaatcgacattagtaattagcgttggcaaagcatctgaaaaaatgttagttggattgattgataaaatgagtgatagaataaagaatgccatattgattgtccctgttggctatgtaatacataaaaaaaattttaaaatattggatcaaacatcgataatccactcatctcatccgatccccaatctaaaaagtaccttggctgctagaaaagtggttaaggaattgcaaaataaaaaaggtatcgagttaataatcttcctaatatctggcggttcgtcctctctaatagtatcacctgttagggggattactcttgaggataaaaaaattattaataagttactgataacttctggtgctaacataagggagataaatatagttagaaagcatctgtctcaaatcaaggggggtaaaatattgcgcgaaatagacactagaactccggtcataggtttaattctatctgatgttgtaggtgatcatctcgataccatagggtcgggtttgacagcttcagacaggtcttcctttagtgatgcactttctattttggataaatattccattttaaaccagaaatctaaatccatcaggaagataaaatttatactagaatcgggagttttgtccaaaatacctgagacagtaaaaccaaaggagtttcatttaagagctgttaccaacataatcattggaaacaattcaagattttgtcaactcatccaagaatattttgaaacacaggggtattttacaaattatatgggctccaattacggaatttcaatatccgctttcattaaaattgcatcgaaaatcattaatacaaaactccaacctaaaacctgcatccttttaggtggagaagtcaccaatacgatatcaggtagaaatattggaattgggggtagaaatcaggaggcaatttgtaatatgttgcagttaataaagagttctgatcatcatgatttttccattatttgtatcggcactgatggtattgatggaaactccacttctgctggcggattcatctcaaaaaagactattgagctattgaaacgtaaaaacctcgatgttggtcattaccttaaaagcaaaaactctaacgtattgcttaaaaatttacattcaacaataaacacaggctatacgggcgcaaactttaacgacgtttatcttttcgttagagataaatgacaataaataaatgacaatagtttctctaatttctggctatatagtccattctataggaatatcttgatatagtccatttggaagtattctcctaatagaaataggcaaagttttcttttccagttcgtattttgctatcatgatggtatctgtaagttctgggggtatctttgttaaaataggggctcccaatgataattgcaacgatctggctcctgtaatcctagctttttcaaatctagttaatctagaaggaccaatcaggattttatcattatcatatgcaatctcctgtaacttgaattctacatcggcgtcataagtcttgtatactattaccgtatttgactctatattacctgctgctcctagtttactagaaggatcttctgactgtaagttagctttgatcccatcatcatttttttctaattccgattcatctttcgtcactgaagttgatttcttttttgctcgcttgaccgccactactatgcaaaaagattaatttatataattaaatgttgctgaaagttcatatttataaaccttttatcgatatttatgtcatctgagtttcagagtgtttcgagaatacctataaagatagagcttaatcaggcacgcgaattacaaggcgaatttagaagacatctatcacccttaactataaagaaactaattagtgtatttccattatttggtagaattaacaggtacgatagtaaatttgtttacataaagttagaattacaactgggggccgaaaaacctactggctcttttaaaaaaggtgatatagcattttctccattgggaagttttctttgtatcttcacaagtgatgccgcattggaccaaaaactgaatctattaggtagggttacttcgggtaacatcgatatattacaatctttcaaagtaggagattatttgagcattaacaagtcattaaaataaaaaatagttattttgacttttggtaaattctatgtccgctgtatccgccaatcacttttatgatgttcttgttttctaaattctttaagaaattattggctaccgaaatttttacacctgatgtccttgcaaaagaatgaactgtgatggctttcatcgaatcaagtgtctttaatccttgggcttcttcaatcaatacagagagcttttgtttctgctgacttttagaagatggagtcttttttacctcctcttttttaccacctttgttatcttgggattttgaagtactagactgacttgactttttcttattaccgcccattgctaaacaaaatttctatatcctcagataatttatatctttaaaactggctttactttgagtgttattctgaaacacgtaagaatatccttgcatctgttacgtatagtcacttctgttactccagctaatcgagatatatccatctgtaatatattgattccaagtaggactgatgctagatacagataagcagccgcaataccattaggagatttgccatctgatagtagatgattgtccgttttctttgctatctcaattgccagacgctctatttttacgtcaaactttgctgtgttcgccaatctagaaatatactgatttatgttaattgattgcatatttactattgtaaaactctgtttgtttctgttttggatttttggatcttgatttataaaatcggtaattttattttgtgtttcaattctcaaattggtatcatcgttttcacaaatcaataccatcgaacgataatattttgaagccaacttgaggttttcactagggtcttcggtgttaccattatatttcactatttcgtttagtgatctgaggactttacaaattttacaggcatagtatatagcagctgcagccatacatgctgatgattttcccttagtatcgttcctattctcataattcctatagattaatgctgccgtttcacatacaacttttgggaaagacataagtgaacaagtctcattaatttttgataacacgtttgaaagtctcctgtctttcgaatttgagattcttataatactattccatttcctgaggttgactaccgactttctgatatcatcattgaagtgtttgccagaataatccttacattggttatctatctcagtatgaagaccataatcatgatacgcaatactatttactccactggctcgcaagttattcgatttatgtccagggtcgctaacaaaagcatcaggaccttgatattccaaattttcttcaaccacatatccacatgtactacacacaaattcgccttttacagtatcttgcacgaggtttgcacgacattcagggcattcattctgaagatctaaatcgttcgaaatcactcttgtcacctactttttattattcttgattttccttttatttttagttttgaaattaaagtctctttttcctgtcatggcaaaatacacttttaaaccagccattttactcttagcttgaacgaatggaattatagacgcatagggcgacttcaccgatcctatcaattccgcaatcttgccaaccttcctgtcattattatctaatactatcagaccagatttcacatgtgaatagttatcctcaattcttactatcaagcgaccgctcttagaaaagtgtagtatttctcccagcaattccatagtcaaaattcgataatcactattacttacatattattctgtcaattaaagctatcaaatcaatcaattattattacaaaatggttaatcatccatataggtcatgatgggatttgaacccacgacctaaggtttacaaaaccttcgctctgccaggctgagctacatgaccatgattttattatcaattaaattctgtaattaaaagcttttgtatatataatgaagtccctttttttaacaggtatatatgactgataacaaaagaaagaaaatattcctcgtaaacgtgagcatcgagaacaaaccttttctcaacgacccagaaggagaaacagtgcttaacgatcttatactcaaagagaactattcccatataatttcagtcaaatcagctaaatccttcttaatcaagattttatcaaggaacgaggctgaagcgatatcggaggtaaagaaaatgtgtgatgatttaaggatttataatcctattgtaagtaattgtgaactttcgattaagcaaaacacaaaataattaattatttttcatttacatactatcagtataaaaaaacttaaaggttagaaggaacttttttattgcaaggcatttgaaggactatgacaatgttatcatctggttagattattataataagaatttttcaagagggaaaggaagaaagatatcaaaatcgatggcagtctatgatcccatgatatcagagttaattgctgctgccgaatccctggggtatcaagttgaagaagatcagatcaatgatagtgcaaggtttcctaaaagaccgcacatcaaatcaggatatattatgatcttaaagaatgaatcctcaaaaagcaaaattttaaaggatgtcgctgaacaaatggtgctaaacaggaccaaatcaaaaggcaggtagcataacaaagtagatagccactttttaaaaatataaataatcataagtagatacgtagaatatctgaatttttacgacatgttaaataaattaaggaaatatacaaaaattggcccatgagaatattgaaaaaatcactttgcgtgaaagaacaattccattaaaggaatcagacagtgtcataaaaggtgataaaggcaattcactacattctgcttccctgagttttgcagaaaagctagaatctcaagtcatacaatctatccctagagaagcccagataacaattgtcaggtgtgaagccgcaaatatagccctatatactaagaatccgtcatttgcattgagtgagctatctcttcatttatcggccctttcaaaatcgatgaaaaaaagattcataattaggactgatccatcaataagactttcagaggacgatgcgcgtaatgccattaataagatactgccaaaagaaatccttttaactgtaatattttgtgacgaagcgactggcgaagtcattctagaagtaaacaatccagaggggataactcctgagatatttataaaaatagcaacagaaacgggatggattgcacatacaaggcggtcgcctcatatcccttctaacagtataaaaaatatacattccatattaaaaaattcatccaaagaacgcattagcttttatcagagtttgggaaagagaattttcaggcctcctttattgtcctcatcattactacataatggtgaaccaaatgatcagactgtgttgacagctaagaatcaaaacaataatgctagaaatatttcagaaaatctgggtgattataaatcgatatatcggtacagcaatctaaaagaggtcacaatttactgtttaggtggtgtcaaacaagtgggacggtcatgttttattgttgttacgcctgagagtaaaataatgcttgattgtgggattaatcccggcgagaatataaattataatgcttatccaagactcgattggttcaattttaatttagatgaattagatgccgttgtaattagtcatgctcacatcgatcatcaagggtttttgccagcgatattcaaatacggatacaatggtccggtctactgtacagagcctacgttacctttaatgactttattgcaaatggattcagtaaagattgcacagagtaatggatcatacttgccttatgaaatcagagacgtcaacgaggtaatcaaacattgtattcctcttccttatggcaaaccaactgatatatcgcctgatattacgataacactaaataatgcagggcatatcatgggcagcgctactgtccacattaatatttctggagctcacaatatcctttatactggagattacaaatatgcaaaaacacagttactagatggagctttggctaattatccacgagtcgagactataatcactgaaagcacatatggcgcgagctcagatataatgccaaatcaatctgttgtttataatacattcactgacagtattaatcaaaccctaaaaaatggaggcaaagtgcttatacctgtacctgctgttggtagagcacaggaaataatgttggtcttagataaagagatgagagaaggccgattggtagaatcccccatatttattgaagggatgatatcggaggcaagtgccatccatatgtcttatgcacattatttaggctatgatgttagaaaatctgtatccgaaggcactaatccgtttttgtcttcttattttacggttataaatggaattagtaaaagagaagaagtctttaacgatgattctcctgcaattattatggcgacctccggcatgttagaaggaggaccatcggttgagtatttcaagcaaattgctcctaagcctcaaaacaaaataatttttgtatcttaccaaataaacggcacgctcggtcgcagagtcttagatgggaccatatctgaagctagcatgatggacaagaatggtaaggttaaagtaattccagtgaggtgcacaaaacaaaaaattgacggttttagtggtcacagtgattttaatcagatattaaactttgtttcaaaagtgagacccaaacgggtactagttaatcatggggaaaaatctaaatcagagaatattgcaggtgtgatttattctaggatgaagattagatcaagtgtccctgataatagagaaatcataaagttaagataaatttcgataggttttttcgtgtgtatgatgttcttaaagttgaactgatttggccataagatacagatgtattaattgtaatattgtgttgagcggagagggtgcatcgcgacattatttagcaaatcctaatcataaactagaaaagttaccaccaccacctaaaccaggcaagccaagtacataaaaatctataagagtaattactctcttatactctctaacgctgatacaacttgccataagctcgtcctgatatgtgattgcatttgaggattttgggttacaccatcaagcatactaattgcatttgcagctcgtactgatatacttcctcctttctcatccttaagaatggccaagacctctcttatcatatttctgatatttctttggatattgacgttttttattagagaatctaatgtagatactgcgttatttaatctctctatattttctttttgttttaattctttctttgtaactgtcaattgaatcacacaagttaaattttacttatttcatattaatagctttatttatctgattgtctaaaccggacgggatgaaaaattttaatatgaatctcatcaatagctgtatgtttgaaaatgggactagtcgatgaataggacaatcatgattacaatattttggattgtaggctttattggagggatttctatttattcacttttaccatcaattatgaatttttttaattctttcatacccaacttattttctaagtatttctttgaagctttgatagcaggaataattgggtcagggttgagtaccatagctgtactatattgggttaacaagtcatcgaaagaattctgattcaaaatgatcctcattaaatatccgcaaattagttataacttgtataaatgctaatagatgttttaattgcttttgggatttcactagtagcgggtttaatcggttcaatggttggtataggaggaggcataataaatgccccttatcttagttatctcaattatattccctcgcagatatcatcaactagccttatcgcagttttctttaccagcatatcctcttcatttcaatatattagaaaaggcctgacggacaaaaaaatagcagtgatcttggccttttcatctattcctggtacattcatcggtgtttacatctcaaattactttactttaagtgagtttagattctatttcgcgcttattttaattgctacttctctttatttattattcagatcaaaaatactaggtcaggagaaaagaataccgtacctctcagataagcaccaatacttggaacccaggaggttatcgatcttggttattttttcattattggctggcactttatcgagcagttttggcataggaggtggtatcatatttgtgccttgtttaattatcattctggggcttaacatgaagacagcttcagctacttcccagttcgctctcatgtttacatctcttgcaggcttaacattattcgtcattgaaggaaaacctgactactttatgggattcatcttgtcagtaggttctataataggaggcactattggtagtatgctaactggaagaatgaaatccaccatgttgctcaaaatatttagcattttattactagttgtatcactgaaattgatatatgatggtttaagttagtgctacagataatttcgatcacaaggtaagagaccttgtattcatctccttcatacggtatgggtttggtctaaaaataacaactagtctctgcataaccggtgcataggtttgtcaactccgagtatagacattatacattaactatggatacgtgattttttacaattgtatcaatcaattaataaattgctatttttaatactaaatgtttgttgaattgataaatttagctataatgatatctggacggggaagtaatatgaaagctattcttgaatctattaggggagaagaggttcacggaattggtaaaatattagttatttccaataaacaggatgctttgggattgaaaattgctgaaaaagaatttggtatcaagacctcgactatattgtcagacaaaaaagatgggtcgtttgaaaggaggctggttaatgaactaacaagcaataacattgatccagataccggtctaatttgcctggctggctttatgaaaattttaagtccatcttttgtggatttatacaaatataggataatgaacgttcatccatcactgcttccatcctttaaaggtctacgtgcacaaaaacaagcattggtggctggagtaaagatttcgggatgcactgttcattttgtggataatggtgtggatagtggaccgataatattacaataccctgttccagtatatgataacgatgatgaattgtcattatcagaacgcattcttgtaaaagagcacgaaatctatgtcagagccataaagttgtttactctaaatcaaatttcagtagttgaaaacagggttattcaaatttaaggatcatttaaccccttatttttttatccatatcaagcatgaacttggaaatctcttctttattcatattcaaatattcctgaccccgttctcttaatctgctgttaaacaaccgtaattctctatgctcttcaaaaaagttatctagaatcagtgtaccgtgcaaaatcgggttcaataatttatcaatattttgcaataatgactttaagtcacctctctcagcggactctgaagattcatacaagattgcactgatatctttcaattgttgagtagaaaagaaaacctctttcttgccttctagaggttttgtatgtgagtttcgcttctcaactccgatctttgatatcaattctttagtgagctcatattgttcatcctttcccgtaaacgatgtcttgacgtttttaatcagtaaccccttattggctagtctagttgtagcatcttgaatttcctcacgatccaatccggtaatccatactatcttacccaaatgatcatttccctgtctgatggattcgagtattacaacctctataatccttttataatcttcctccatcctggcattgataaagtctctgtcctttactgctttttttgcattagcaatatctaattcaatggatttttttagagcttccatacctttcgttgcccttccatctaacgtcaggtaacaggcaaaattataccaagccatggagttgttaggattaaaatcgatagccttttcgcaacattctatagctttttcgtaattttttgatttgtaataaaccaaacccttcaagttccaaacttcaggattattgatatccctatctaatacctgatcaaaaatgctaatcgccagactatactgttttaaatggaaatgtgaataacccttctttattaaagcgtccacgaaaaagggatctattctaagggaaagatcaaaacatctaatagcgtcttcaaatttttcttcagacatcttgttaagccccttgttataaagattgacttttttgatgtcatcttgagttattttataaccgctagcagtacgggaagaattttcgtccttcttttctgataaaagtttcctcccaaaaatcttttccattataattaattatacttatcgagaataaatatatttatttttaaaacaaaaagatgataacgaagcccacgtatcttaaactagaatgtgggaatgcttgtattggttacctttgctacgattccagtgaacgcaaagttgactagcaagaaccatccccagagaaatacctgacctggtactttacaggggccttgtttcagttcagtgtttgtactattcgtagtttgaacaggtgtgtctgtttttacattatcggcagaacaagtcaagtacggtatttcgatcggggatagtgccaccgtttgaccaaatatagccggaaaaacaaatatccatagcataaaagaaggtatcatatatagcatcataggtctcatattttgctgctgcatctccatgctcatcttttgcatttgagattgtttcttttttagttcctcaattaactgcttatctttcttcctaatggcctcagtgtatttttttctccattctccagtttccttcatcacagttttcattttttctatattggttgtctttcttctcaataatgccattcctaaatttaacccaatggcgattatagcagcgacaattgcagacgtgaacatatcgggaaaaattggatgttgagtataactgggagtcaatcccggaatttgtaataccaacttttcagacaaattgaaaagatctatcaaaccaaaagaaaatgattttctgagagttattaatctttttacttgctattcggttacattctgttcaaaggagttattcctattatgtccatacagcgcttaagaatttctaggctagcattcaatattaatcccctgtaccacgccaaaccttgatctttttcctttaggatcggtgatttttcataaaaattattaaactgtgtagcaagctggaaaagatattttgagagtgcctttgggtctatattatttgctgcctgttttagttcaatatcatatctactaatgtgtttaatcaaatcgatttcagcagtagaaaaatccaatatctcggacgggttttcaaagttaatttgtttatttcggaggctaccctcgataatcttattttcaactcgcttaccccgtgcgtacgcatattggatgtaggaagcagtatctccctcaaggctaagtgactcattgatatcaaaagttatcatttttccgaaatcaaattttataaaaaagtatctaattgctgagatggatatctctttggatatgaatgctatctcttctgctgagatgtctggatttctgtttctcgtttctgcctttgcccgttgttcaagaatgtttagtgcagcgtctgcttcaatgaaaatacctttccttccggacatgtgtagtgaattcttgtcctttgcagctatacctagactgtctaaggaactttggcttaaaatgacaggctcgtatcccagatatctatattttgatgaatccattcctaattttcctaatatctcgaccaacaaattttgaagccgctcttgtctagaatcgataattgttattaccttacttattctgctaaagtcacttattgatgctttcccagaatcagaattggattcaaacgggtcattcaggcttttctcaatatttgttttgtataaaatagaagagtcccattgacgggtataaaagacataatcaaagggattccgcaagtagcctaatttccaaaccgcaaaaggaatatccttggcgaaataggttaaagtcgaatcactacgcactaacactttgtctccttctttcgctgacttgtacacccagcaaccagcgtttttccccactttttcatagtaaattatttgtttatctctgaggattgaaaaaatatcgttccatagattcgattggactatttgtgactcaaaacatagtaaatcatagcgagatttcaatttccaacatgttttaagttggtctatgagaactctgtcaactatcgatttggtgaatagtgaggtctctgattctggattctctaattctttcaggatgatatttcttttaatctccaagtcaggcctacttttgtaaagctcgttcgttttaacgtaaatttcattgccacagtaatgatcaaattttgtttctttctctgataatttttgatcatctaatttagtggaaaatccaacgtgtttaaatcctacaataatatcggctacctgaactccagaatcgtcaatgtaatttatcaccttgacatcttttcctgcttttctaagtaatctaaataaacaatccccaattatggcatttcttagatgacctacgtggagggccttattgggatttacactagtatgttctataagtatcatttcattagaattaaaattgttatcattttcagtttcggatgttggactattgataaattcttttaagaattcactcacaaagagtttattgtcaatcttaaaattaatgaatcctggtcttacgaatgaaactgcctctatcaaacgttttttatctattaatattctactagagggtagaataaaattcacaacaaactccgctatctcatttggcgacttttttaatttcttggctaacaagaagcaaatgtttgtagaaaaatcaccgaaattctttacatgtggttcagtgatttcaaaattgacttcggatttggttaggttataataagataatacctcttcaagagattcgtttatttcattgataacattttcaacaatcattaaaatcactagaatgcttttcctctgattatcagatcaattgcatttatcaatccttctcctttggcgcctccaaccaggtgagttgcactattttgcacatcctcctcggaattttcaaacgtaacgctatatcttgattgtttaaacattgggatatcggtcctactatcgcctattgtaaccacgtcatcgacattaatatccagcttcttcaataagaacgctagtcctaatcctttattgattttattttcattgatatggaatgcataattactatctatcaatgtcaaatctagatcattttcttgaaagattttatttccttcatttatatcaaacgttctctcaaggactatttcagtcattctttgaaaaacaggtttctgtctgacttctttaatttttttggctattaaattgaatcccaccaaacatcttactttatctgccaataatgtatgttcaataggcgaagtagtaataactcctccattttcacctattgcgataggagttgttccaccaaagacagacaaagcataagcctcaagggacgatctgcctgttacataaattactttatagcctaatttaactagatatcgaagtttagccaacgcttcaagatttagtgctccatttccgttaagagttagggttccatctatatcaatggcaaagaattttacggacttcaaatgaaatcaaggtaataacaacgttacataaaaatctagatttagggctctgtcaacttatcgtcgcacccatgtttccacgaagaatgtaaaaaagcgtcatacgggctatcttataaataaattcaagtaaaaaaaataatatgtatttagaacagtatacagtgttttgtttattttgtggtgaagagtttgaatataagacaagttttgcagtagagcatctaaaaaagtatccaacacatataggttttagaacagagttaaaagagaatttgtaagtaaatcggttttatcaataatttaatggcctataccaaaaaatccaagtagcttttatacagtccttacacaccgcgttcatgaatcggaaatccgtccaatcaatactcattcgtagactgagattaggctcagtatgtattaaatcgggagatataagttgcaatttatgacctcaatgactgcatcctaaatttacggtagacatagaagcaatccatttttcatatatctaaccttttctaacaattacccatgagaagagacttggactaacttctcacaggtaagggatacgtgaaataccttaactatttcggtattattctagaatttaagttttaattgaactaaattacaatataaatagctatcaagaaggagaacgtatcataaactcaggatttggagggattaactccaatgatactgagggtgatacaaagtcctagaccagcacctaaaaacaaaacaccttcaagattagctcgtccgctaatttatcaagggggaaagtgattggcggttgacttatgtctccgttaaattctgcgttaagcattgtccttccttaaccggaaggactatattattctttttattagtaacgatgcatatttattgggggagtaagttattttttccttaaaattatatggtcttccctatctaaattaactatgttagtgaaaaacggggacagcatttgacttttgtcctgtattggagtctgtcaattttttgaacaacatctccaagttcacttactattaaatccaatttattttgcaaatatagacgatttgtgtaaaggttggttatttccattaagatttccgttctgaatggaatattgactaatatttcttctaatccatgcgttattaattcattattcctaccaactaggaaattacctagaagtaaataaccatttccattacgacttaaatgataacgggaattaaaatcattttgaagtaatgttaaattttctgagagactaatttcttctaatccatttctcagaactgtggtaattcgatctagctgtaagttcaaaaaggttctataatcttcattataataaaatccttgattgggaaatatagagacttctatacccattctcctaacatcattttcaataaataattgtgaattattcataaactctaaaactttttgattatgggattctatctcttctatgaattttggaatatgatttaacaattgaggattatctcgttctaaatgatattgcacaaaatctgttggaacaaatcctatagtcggatttatccttatggtcgataaccataaaggtattccgttaccttcggttgggataaagttaaaagattggtttatagagagtaaatcattttttaaaatatttctatgtttttcaagttcattttttctttctttattggcgtcaataaaaaatgcttcattatctgaataattggccctattaaaggaagatattgagtatccattctttgaatttggattaatataatatttaaaggaatagttagtatccaaagctttttctataaaacatattatcatatttagctttgctgttccttgccaatgtattaattgaagattggagataaaaaatctccaatgacataagatagtgacttttgccaatggctaaaaacaggatctatatttttgacaggactgggtgttgtcatagccattctacaaacatcgaatgattgtaattcgtgcaggtagataaaatcccagagctaaccctctgggatttgattatattataggttaaatattatttaagtcatctgacggttttttacaacccttgactgagcgtcaatatgacggtaagttgacacagccaggtttagtaatacatatattgaataaaccatgacacatagtagaatagtttgagtttagaagtcgttttgttggaggataataacaatatattattaaaaagacgtgagattaaatcgattataaagaatgctactgggtctattccacgggaggaagccgcaaacctaatagcgggaaagattggtgtaaacaagaagaatctattgcctatttctttaaaaagtgaatacggtaaccccgatgttttgactataatgtattattatgatgatttagaagttgcaaagaaacagttgcctcgttaccgaattctcagaacaatgacaaaagacgagagaaaaaaaataattgatgaagaaaagtcagttaaactgaaagctaaacaggcagcagcagcagcagcaaaatctaaaaagaagtagaactgccaacactaggttaaggggagaaatgcaatgagtaaagaaaaaaaaacagaagtaagcatatcaaaattttataaaattactgacaataaagttgagagagctagaagggagtgtccacgatgtggtaaaggtgttttcatggctgtgcataaagatagattaacatgtggaaaatgcagctatactgaatttcaaaaggaacagacaaaaaaatcaagacaacaatgatgcattaattaactaaattttaaaatttctttttttatggaatcctccactatggtattagccagagcagaaaatggcaactttatgaaattgtcaccgatcatgattttttggataggtaactttttcttaatccataataattcggtttttttatccagctttaaatcattaaatccgtttgcaaattttttctttaccaatttctgaagataagcatctcctttgaacaccttattaagatcaagagttttttcattatccgtaaatgaattttcataaagtgtattggaaatattatctgacgatatgtctaaatttataatattttttaatatattcaaatagtgtaaaaactcatgggcgagcacagcgtgaatagtccctttcaatccatacattatcaatggagcagaaagttggatgactattcttattctattttcagaagtacaaaatggaatcgtccttgcatacaatatggaatattgctggtactcgatttccgaagttgcaaccagtagattaggttctacaaaataagatgggtaatctatggaagttatcctcttgatcctttcgacaccttcttcgattacattcatcctgtcaatgatgagattatgggtgctatcgtccaatttcttttcattaaaatatttcttgattaaaactaatgggtcaaaaactttcatcttggttcattaactatttgtttaaaataatatcatgaatgtcaaaatatatgcattcgcattttgtcttgagagtgttagagagacaaggctcgatgggttcgttaccccctacaaattgctttataggtattccattatccatgtctagtgatatttcaaggttgttctctcttgcatttattaactttgcattgtaaatatttctagcagtttttctgttcttgactctaaatgtcacctcaccctttaatgtcttcacgagattctcgaaatgaccaatattaccaatcttctcagttaatttgacaaatatagtaacaagtattctatattggcaatagtaatcaatttcctcctgtttaatttttctaaaatacaattcaacatccttctcaaggactttcatttcatctaagcctttgaatttaggattaatcacctttacaatgaacggtcttccgctaccaaggaccaagctatatttatcttcgctaccagtccaggttattttcatgtcttctgcattatattctgaccaaaccgattttctaatcgagtcttctatcgatttctcatatttatctgccaatttacaaaagttttgacgatcctttctactccaatttttatttttttgggttatgcctctgtctaattttatatatcttccaagaagatagaattctctcgctttgcaatttatgctaaagctcaagtcattttcaataataacttcaaatttcaaagctggattcaagtaatccacagaatatttcttgctttttcttattttctctctaatcaataagttgatttgggtttttattcccaaagtacctttaatttggaacatagaacgaatataatcctcattctcgtaaaagaaaaaaggaagccttgttcctatgtcaatagcaggaatacccgtggttgatttaaacatatcagagttcaatattctatcaactatgaatggtaacgttactcgaaaaaaattcctacaaatataacaaacttttacgtctgtttttataaccttgacagaaactctatatttcaccaaagatatctcatttttagaaaagtttcgatcataacaaaatttacagaggggtatctcaagctgatttgagtttaacatttttttattttttgaattttgattctccatcgtttttagccaagcccaaatctccgtaacaatccttgcatctgacggccttttgcttgtttcatcatggtcttggaattgttatactgtttgatgaggtccttaacatcatgttccattactccagaacctctagcgattctctttcttcttgcctcattaataatatctggattcttcttttcatgagcagtaaacgattggataataaatctccacttctccattttctgttgcagaacatcaagatggtcatcttttacaaagttagagagccctggcaaattttcaattacatttcggaatcccatttttcccatattttccatttgggaataaaagtcctcaattgtcattttgccactcataagcctctttgcttgattttcatcagattgtatttctaaattccgtgccatttccagaagggcctttatatctcccatccctaataatctgcccacaaagcttgtgggggaaaattgctccaagtcgtcaattctttcaccagttcctataaaaaggacttttgcaccagttgcagatgaagcagctatggccccaccccccttggcagtaccatctaattttgtaataatgattccgctaatttttgcattctcatgaaaaatttttgcctggttatatgcttgctgtccaattgtgccatcgattacaagaaacacctgatcgggagtgactatagaatacataatacgcatttcctcgagtaacccttgttcctctttgtgccgccctgccgtatcaatgattatgatatctactggttgatccttaaaaaagactagtccattcttcactatttctagtgcatcgttgttatcttcctcaccatagacttgagcattgatcttactacaattcatttttagttgggttaatgcaccaggtcgccaggtatctgctccgatcactcctatcctataaccgtgttttgaaagccatcttgctaacttggcgataacagtagtcttcccactaccttgtatcccgagcatcaaaatagtgttctttttatccgaattgaaatttattatattttcatccatttttttcctgtcgatgtttttaatagtttcaccgctatatcccagcatttttgatagttcgccgtatagaatggttataatgtggtcttttttagacaagccctttggaggagcttcttttaaagatctttctttaagattttttgttatttctaatactaatcggacatttacatcagcagctagcaacgctcgctggagatccttacataattcattgatcaattcttcattaatatctgaagctccaacaattttctttaaagccaatcttaaattatcttttaaactatcaagcatggttctctacttttttattaaatcaatgtctaatatttcaaacattcccctaattccatcccacgtaatggtgtggtctttaacgctaagtcttttcttatatagtggacaatctaatactaatgtttcagcctccccaccttcaaacgtgatattaaatttatatttaagacttaatttttttagaatagaataactatctcttgtaattttctttccaagccaactcttatctaatcctagtgccgctactctagtaatcattatttcaaatccccggtctagcaactgttggtaataataatcattgtttatgttccacaaaggtgatattagttgtatgtttaacttattacatatatcctgaaagatgtttaattgaaatttactagagatgcatccgtgtactaatccctcaatggaaaattcgtctactgcagatttaaccagatgggttaattccttaacttcatagtctttctctgctatattgcagtggtgttcaataacagggacatcgattactttagaaactttgcctaataaattcgtggtagggtaatggaataataagctattatcggtacttggatgcatagtcattatacagcataggtcatgtttttgtaaaatacttttgaagatagcataggtgctatctttacctccagaaaataatcccccaattctcaatgactaaccgtattttccttcggatataatctaatagtttttataatagaacacgatttttagttttatgctaatgctaaattctgaaataatagcgggggtgtctatatttctactggggtttctcttcttcatagctggactgttaaattcaatttgggcaaccattatcattgtggattaccttatcatggccatcggcattgcgacgataggagtagggttttggactgcgatgtatgagaggaagaataaccttcgtcatactgaacatcatcattagtacaaaaagacattattcgtctatatacaagattaaattatttttttgaacttcctgagagcttaaaccaatcaaagacctctcgagtttgtcatagtcgggtaaatctccatttatgttccctggtaacacgagagataggtttatgttcgaatttaatacatcatgaagttcttggttggccgtagtgacatatggtcttaatgctccacgaaaaacttctgaccttgcacggacctcgccccctatcttcttcccaaccggtgattcaggacccacgattacgatgtttcctttagatcctttaaagagtgatgggtcttctaatgcctggcgcgtagtcattgataatactgattcggttgttatgaggtgagggatattaatgaatttatttactaatatgtcccattgtttgcgatcaagcgaacttaatttattgtcatagtcgtaattaccggtaaaatgtattaccgaatctgttctgccgtatcgtgaattgattgtattgaatattttcttgaccgaagtctcatcacctaagtcaatagcgtggtggtgaaatccttcaaacattttgctcacttttggtgattgttcatcattgggtgtaaggacaatcagttgctttacattaaaattgccaagctcatttgcaattttcttgacaaagttcaacaatttttcttctgtggaagttgttgtgattaaaattgttttattttctaggttcttgtccagttcaatatctatcgtcctttgaacaattggttttacagggtagaaaaccctatcattaggaatgacctttccgttcaataatttgctaatttcatcacttgccaaagtataaaccatctcagccacatcgtcctgagacaagaattcattatccactatcattttcttggtattattctgtaccttttcagcgatttcttgaattttagccaatagtttctttgccaagtcttgagtcttggtaggatctaaatccttgtatttttcagctaaggaagttgctatttttttcgattcaatttcgattgtttcaggttcatcaccaagatatggtagtaaagcagctgatatctcttcgatttgcttatggttcaaaccagggaaaccccctactcttaaaaattctgatgctgctttagggtatacagttttatatattctgtccgagtgaacaggacctggatttgttgcgacagctttgatactcttctcaactagttcccatgcaagacactcggacaatctgttctttgctccctgagctgctgtgtacggtgttctaaacctgtatggcctctgatcatatttattttcctctgtgaaaaaagtggagatggtaattatcttgcctgtattgctcaatacttctaatgctttgatgcttgtccaaaaggtaccagttagatgaatagaaacacaatctttaaattcttgaaaatttgaattggtaaatatcttaaccggcccagagactccagcgttattgacaacaacatctatttgaccaaattcagtactaattttatcaaacatagaattaatggcttcaaaatcggaaacatctacacctgaataatatgtgacagatgattcatatttctcgtctataattatttgttttaataaatttgatgcatcgacaagtggttcttccctcctacctaaaattataatattgtaacccgatttagcaaactttctcgctacagcttgaccaattcctgttccactcccagtaacaagtattgttttggcatctttgttcatttttacatttaatgagacataaatctctaatattaattgtttatcggtcaattcattattgaaagatttatttatataatttttggataatgcttcgcacttgaagcgtcataataaaactttataaaataagtttatttcagagatactatagaaatggggaattatggaattattagagaatttattgtattggaggtaataattaggtgaagataaaattcggtttgacttttggtctaaatgtagctaggttggggcttgatgaattgcaggtaataactgcagcgcaaatagcagatagaaccaattttgattctgtgtgggccatggatcacacaaatgtgcctcaatggaaaaacgctgtagtaaatgatgcttggttgatgttagcagcaattgggtcggtgactaacaacgtggagttagggacatgcgtaacagatgctattaggaggcacccttcaactatcgctctgtccacggtgacactggataggataactagaggtaggggtatattagggattggtgctggtgaggctcagaatgtagttgattttggcattgaatttagtaaacctgtttcaaaatttaaggagcaattagaagtaattgaaaagctgtttgaatccgatccagacaatcttgtaaattaccagggtaaatattatagccttgttgaagcttgtttacaagcaaaacctatcagaaaaccgcgacctccggtatatatcgctgccggggccccaaaaacgctagaattatgtgctacatatggcgacggttggattcctataggatatactccagccttgtttgaacatcatgcaaacgtcattaaggatcacgcaaagagattaggcagggatatatccaattttgagtttgccaatgatgttgatgtttattttgctgcagacggagaagcggcatgggaaaagatgaaaaaagcagttaaggtcagcctgtataagcctgaattattgaaggttcacaacatacaacaggattctgagtttgattttaggagatacttcactgaatatgccatgaacaaacctgaattgatggaacaaatgaagaaagcatctttacaaatccctgatgatgtggcaagaactgccataggagttggtagtccagacgatgtaattgagatgttagaacgatttataaaagcaggtacaaatcacttcataattcgtttttggggtgaagggctttatcaaaatatagagacttttggaaataaagttattccatattttgctgaaatgcaaaaataacttttttatttctcagaaataaatatccaatgtttttgttttcggtattcgctttgattttttcatgaccatcttgcttcctttcctgaccgattctgcatcatatcccatattgactagattattggcaaactctttatcaaatccatggacggtgtatattttgcttgggttgcatttttttacaacttccagcagctcgttatgatcgcaatggtcactaaaaggaatcgcataatcaagattcatcatgtgtctataatttttatttattccccatccgctgaagcctattgtaattgcgccatatttctctctataatgaaaaattttgggatgcttgccgttagtcaagggatgtatcattagccatggtcccttatccaataaccctagttttgttgcatctgacaatgagatggaatcttctaaagaaactccaaattgtttatacatttgattgaatttgaagatttcatcatgaacgattagcggcttccaagctccaaatagtgaggtaagcacctgtgcctttcctaatgaatatcccattaagatgactggaattcctctgctgtacatttcagatattaaagaatttaccgaatgtgtaatctgttctattggagggaatatatattcgggtttcccaaaggttgtttcaataatcaaagtttcggctcgtgggatatctggctttcttaaaaaagctctatccctcatagataagtcaccagtataaaagatttcgtttccaatcaagagaccctttgatcctagaatatgtccggtatcaaccaatttgcaatcatcctgagaacaaatttccttctcaaagcgaaagccacgaaggtttgcaatagcaacagtttcaggcgaacacataatcttatttcttaaattatatttcttgatggcagtcttattcaacatatgatcgatatgtgcatgtgaaatgaaaatgtaattttcatccaatatttgcctcgggtctagatatatttttctttccctacttgatagtattatttgatgttttgagtccgaggtgatttgatattgcactattagattatcataatgagcttatttatttaatattgtttcatatatttgagtacattaaaattaaatttatattgaatcaaaattaagaaattgaatcaattcaaggttatttacgttttactcgatgggataggagacctgccacatccggacttaaatcatttgactcctctagaagcagcatatacaccacatcttgataggattgctagaatgggagtttcagggcaggttgtaagtgttggagatggaattgctcctcaatctgatatagcggtttttaatatgctgggctacaactttgaggacagtgattatttcgggaggggtgtggtagaatgtataggttgtgggattgattttaaggaaggcgatctagcactaagaggcaatttcgcaactatcgacccaaataataagaaaatattggatagacgagctggtagaatcgtgaccgaggcagattcggctgcaatttgtgatcttatcagaaagaatgttaagatagagggcatagagttctcaatagagccaaccatagggcatagagttgtcttgcgattcaggatgaaggatagagtattaggtgagaatattacaaatacagatcctgcttatgataagataaatggcattggtatcgctttggatacatccaaaggtgatctgtacgtggcaagatcaaaaccgaagaatgaaaattcgaagttatcagccgatatcataaatcagttctctgatcaagtaacaaaagtattagataactgtcctgtaaatatacagagaaaggagaagaatttgttggcgataaattgtatcttattaagggacgctgggaatagatatccccatttacagagcatcaatgataaatataatttaaatttcgcgtctgttgttgatatgcctgtagaaatcggaatttcacggatactcgggatgaagttgtacaatgctggtttgccagacgaatatgaattgaaggcagccgaattactaaagatagttgataaacatgatattgtatatgtccatataaaaggccctgatgaattcggccatgatggagatgccaagggtaaaaaaagaaacatagatgaaattgataaacgcttctttagaaaaatattggaagggaacaatactatcaaaggtttagaaattaatttcataatttcgggcgaccactcgacaccttgtattaaaaaggctcatactgatgatccaatacctataattgtatctggcccccgcataaacaaggatgctacctcgagattcacagaatcaaactctaaaaagggatcactaggtaagatttatgggtaccaggtattaaatactgccctaaagcaattagaaaagcgggaaggttgatcctaaaagttatgaggtgggtttgaatctcaacaacgctccaatttttccaaggctttgtatctgtgctccttcttctgttttagaagaaattatgtcaagttttgtcccagctagtgaagcatattcctgcaaatagtcaatgaaatccttttcagttattgtatagtcctgtccgctacattttgaacaaggattagaaattatattttgttttgtgtcaattagctggtccctttcaacaattttctcatatctgaaatcacatttcttgcaaattacttcaagatacaataggtcgatactgtcggttgcaattatcgaatcagttattcctgcctttaggttatttacaacatcatttagaccgtaaattcctaaaccctttcctgaaaaaacttcgcccataaattttttcactattttcttttcttccattgatctgaattctgacattattccttgatcatttaccttatctatgatctctctcacaccttcgtccccagaataagaggtatcgagcgtagcaatgatattattctgcaacctatagtcaagatattcttctctaacaaacgtttcttttgtgggtcctgggccccctacgataacaccccttacggtgaactgatcaataaaaattttttgggcatagtctgcaacacggtgataatattcgtttagttcattatctctgaggcgctcaaatcttcgagcagattgacctccttgacggtgtttacccgaaactccagatgtcaaagtttctattgtttcccatctatcaccagttaaaattcctaaccctgcctcctgagtgtctatggatatgatggcaatggtacggtcgtcttttagcatttctttaatatgatctatccaaaaatgatcgtcacatctatacaaatttatttgaaccggtttcggagggactactgtaaatatttctattttttcagttcctaaaccctttccggtgggaatggcaccacaaaaaatgaccagtccgttttcaggtggctctttgtataattttaattgttccattgttttattaagtgcatcctgaacatgatttctggtcaaatccgattttatgttcgatgcggttccggcttcatttctcaattgcgctaggacatcaaagattggtcttttcggtggtatgtatacagtaactagttcagtaccatgaccggttatcctagataggtcatttaacattttagttagcttatacttttttactgaatcccatttctcgtcactacttgactgaggcacaaatattgtttgcttttacttaatttaattattgacaatctaggcaaatcttgtgctatagagaaagattcgaattatcagaaatcacattttgcaatatatttcgcaataacgtaattttgtcgcatcagaagacatattttttaaattaattatatcagaaatgaatgcttttacaaaaaaagaatacataatacttatttaaaacaatttggtgaactttttaggtagaagaattgtcagaattaagaaaagattattatgttcaagataaatttgttttaatacctaataatattgatcaaattaacaagaagcctgaaatcatttacaataaacagcaatctatcccatctgctaattctccagcatgcccatattgccccgggtccactggggattgcaacaatcttgttctatcttttgtcgtgaaggagggcatattgcagagactttatgatacaacggatgaagagaatgaaaattggtcgatccgggtctttgaatgtaataatcccatcgtaaccgcacactcaaatcaacagtattctgataagccattttacagagagccagcatgcggatatgacttgataattgttccaacaccacagcatgatattgctctctcagaattatccattgatcaatggacaaatttgttgttggtactccaagacagggtgagatggttatatagccagcgaggtgtgacatacgttgctatatatgccagtcgtggaatttatgggggtagtaagataaaacatcctcatattcacatcaccacattttcatcaattcctcctattattgaaaaggaagcaaagacttttcaccaatctatgaacgaaagcgggagctgtcccgcatgtagtatggtagaatcggaaatcaatggtccacgacaattgttttctaccaatagttttataaccttagttccttgggcaccaacttataattacgaattttggatatgtcctagaaaacattcaaccttcttttcaaaagcaagtcagaaggaaataacagatctggccctggtgatttgttcatctcttagaggtatggataaaatactgggcaaaaccgattttagtatcgcttttcatatttctcctgagaagaaaaacagcagacagttacactggcatctggaggtataccctctaatttcttcctggtcgggattggaaaggggttttgggatttacgttaatataccaaatcctgaagtttcagctaaaatattgggggaggcatcaagaaaggaattagcccgactgattggtgtgaattaacagttaattgtaacaatattaaaatattgtaacttttaaaatagaacacatagaaatgttcaaagccggtgaatggttgtcaattgcagttttgggactaattattttatttattttcacgtccattgctttctttactttcctgatcggtcctgaagggacaggaccaacaactaccgttgatccgtccactgcttatattcaatttatttttatctcactagcaccggcgattggactctcattttttacaaacgtattatctgaaggatcacgattatcatcgttactgatactagtatctggaatctgcctggtatttggaatgatctatgtaacgaccttgatacctatgataactgaaatcgagttgccatcctgggtggtctatgctccttgggtattttccatttttggtatacttttgatagcaattggttacgtaaattacagaaagcggacgttcatgtctcctagaaataatgagatctgattactaaaaaatggcgatatattagtaatggggtatgataaacaatcttccagtaaaagtattagaactagtaatacaaatatcttaagtagatttgataagcttaagctagataaggagttccttccgattagaattaacaacacaaacttagaagcgattttttccaaggataatgattttgataaagcattagcaattgtaataggcactaaaccagatttttataagcaagcccctctgttgatagaatcaattagggaggggttaccttcatttattatttctacaggacaacactacgatgaattattaggttatgggataaaagaatttgacttggaaaattctatcgtgtgtgatcttcagatacgtggggatttgatggaaaaatctagtgacctaattatgaaatttgggttctttggtaggtacttaaaaaataggttctcaggtaatcgaattttaccgattgttcatggggataccctagtggcaggaatagctacattgtcttgggtgtttggactaggacaaaaggtgggacaaaatgaggctgggcttaggtcaatgagtcctagcataatcaaggatataaagatgaatgtaaatccaagccgatctgctgtagaaaaatttattaccgatcaattatcctcatcatggtttctaacaagggaggagccttttccagaacaaattgatacttgggtatgttcttcaggaacaaagtttttttttgttcctactaaaataaacaaagagcatttactcagagaaggatatccagaagaagatatacatgtagtcgggaattcggttgtagatgctattggtatcaaaaggatgaataagcctgagaatagcatttttgaattgtttcccaaattggaatccggaaactggataagaatggatattcatcgtagggaaaatctgacaaatcataggtttaatgctatcataggtggattaactgatttgatcaaaaattctgaatttaaagtggttttggtcttattgaacgctaccaagtctgcgttaaatagatttgatctttaccatacgcttaaagacctgcagagtgcttatccggaaaagtttatgatgactgatttatggaaagagtacggccatgttgtagaattcttggacagtggaaaatgttgggccgagattactgactctggatccttgcaagaagagttattgtatttcccaaaagtcagctcctttactgttagattcaataccgatcggcctgaaacggtctttgatgcgagaggaaatcttctaattcctccaataaaccgaatgtggttgccaaaaatgataactatgatctatgaaaaaggtgtggattatggattcgactttaaaaagaaaaaacagatctacggtaaacctggagaggtatccaagaaaattgtaaaaatcatgaaaaaggaatttgagaataaagaaagtaatttttttccctggttacatcaaagattcaactattggcatgagaaggatgattttgactatctctagtttaatcaaaagcaaatagttatataattatgcattgaaaattttttgtggcctccgatacgaagttcaagattaatctaaaagaaggtctttttgaacttgaaggaaacgaatcttttgtagacaaacatttagaaaagtttgaagaaattttcaaggttgctatcaaggaggtcattattaataataaggataacctgcttaattatacgactgcaccctctcactcaacagtagacaatactccaatctcactagagaacttttcttctcaagaagcaagaaatgcctctttgaaaggtaagagctttcaaaattcagaaatgaatgatattcagacagaattaccgctaacaagcaagtcttccaagcattctattccaaaaatttctattaacatccctccacttcctgtagatttgaaacaaaatgaacaaaaaattggccttagagaattttatgctgagaaaaaaccaacaaatcactatgaaaaaacaactctgttcgtattttatctaaccaaatataataagcagcaggacgtcaaattcggggaaatactctcatgttatgaagaaatcaacgaaaaaaaaccaagtattattgacattgtcaaaaattccataagatacaaaggatggcttgagcctggtattgaaaaactatcaactcgattaacaatttctggtgagaactttatcaaatttgatttaccaaaaaaatgagtaaattctcaatcaatagtcataagataacgcttaacttgagataaattaagctcgccaccagtcaaagcctacaaatctaacagatttgtccaattgatcaacaattgccaaaatgaattgcttcttgaccgtagtcgcaagcctgcctgcaagcacgatatcgatgcttgtaatgtggtcattttgtttcaatacctttacgagaaagggtgcatgatcgatgccgggtccatgaatataaaccgcaaagtcgcaaccaaattttatccctggagtaacaatatagcctttgtctctcaaattttcaaataccacatacttgacctcaaaatttacatattgtttcttacaaattttaaggatctgctttgaatcaacaattgtgtccgaattcctaaaaattttaagccgatttttattacttaaataatatccctcaattagatcgagtactaacggagcatcaaattccgaatttttaggtttagaaatacccaaaggcttaccataatatccatcaccaaacaatgtctgtgattccagaatattatgaatgaatattctattttcgattagttgacctgtaaacgtagttgtcaaatacttaaagctagtattgtaaaagagttagaagcctgttgacatttatcgaccatcccttcgataccttctatagtatccttaaataagatcagatccttttgtgaagttatttgagctaacgctttaattgtcacttctctatattttttatctagttccatttctattctctggacttcatttgctaattcaattgtgttttcaggttttattgtaagtgttcgtgacatttcattaattttgaatataacgtttatcattatgtcaaccatgctttttaactctaattcaaaattttgtttaatgattctaggttcgatgtttgacaatctaaaggagatcccactaatataacctgaaatttcagcaataagaaacgcagttctcaaaaggtcttctctatatgtcattaagcttccaatggctattacttctttagtaatttgttttcttaaaaccattatatcgttttcaagaatactcatcttataagaggactctttaattccgtctttgttatcaagaaaaacagcatccatcatgactgctaattccctagataaattcaaaatcatatttgtctcttcttgtaatactgctattgttttcctttttgtcctaatctctagctcaccgctatacatttattggttacaaaagcatgtctgttcatataattctttattataaaaaatgtggggagtaaatcaactactccaaatcttcagtttagctgatagttagtgaagttttctttaatttcaataagatcccttaaaacagaactagcagtttctacacctccagctccttttcctattatggtttgtgcaccggaatgttcagattgaaaggtaacagcattgagagtaccatttacacatatgggatcatctttggatattggaatgggcttcacgaaaagctgttctttgtcgcatgcggcaattaattttaacgattttccttctcttgttgccttaattatttcctcttgatctatattagtaattcctgttttgtcaacatcttttaatgttaccttgtatcccattatccagttagccattattactagcttagctgccgcgtcatctccgtcaatatctaaaataggattagtttcagcataacctttctccttcgcatcttgaagtgcttcactaaaatgtaatccagtagccattttagttaagatataattcgtcgtcccattcagaatccctgtaaacgatgtaattctatcgccttttagacaatgctttgcaaaatctaataccggggtgcctccaccgactgttccgctaaaccttaacataacgttattatattcagctagttcaactaaggaagaaaaggataaggctaatggtcctttatttactgtaataacattttttttagtcctcaatcctgaaataatatgggacaaccctggttctgccgtagtcaggttggtaggggtaagttctaacaagacttcagcatcaatattttcgatatagttatcggcattgaatattgattcagaatactttgctacttctccgtatttttctttaacatttaagactctttccaaatctaatccagtttgagaatgagcaattcccttgctgtcaatgcaagccacaaccctcggttttattccataattcttatataacaactttgaattagaaatcaataatctcaaaaaactctggcctacaacccccattccacacactattattctcatcagaattatccttttatcattataattcgagaatataataaaatttgtattagaaattgattccattaactagggaaagattgacatgaaaatataatccgccctaatacattaataaatgaatttcaaggttcattaattatgacgttatctgtagacggcattgataatgaaagagaaaaaggaaacgaaaataataacacaattaacgcagaaaacaatcactttgatgttgcaataatcggttctggaccagccggatatacggcatccatctatacgtcaagagcaaaattaaggaccatagtaatctcaggaagtttacctggtggacagttgatgactactacggaggttgaaaattttccgggatttccaagtggtataaatggacccgagttgatgacttatatgcaacaacaatcagagagatttggaactaccatgctcattgacgaggtcacaagagtcgattttggaactagaccatttagaatttatactggctcctcgacttacacttccgattccgtattaattagtacaggcgctacacctagaaaattaggaattaagagcgaacaagaattttctggaaggggcctatcttattgtgcgacctgtgatggaccttttttcaagaatcaagatatagtagttgtaggcggaggagatactgcattggaagaagcaacatttttaacaaaatttggtaaaacagtaaaggtcatccatagacgggcggaactacgtgcaagtaaaattctacaagaacgtgcctttgagaatccgaaaatcgaattcatttggaattcatcgattatagatgtcaaaggtgacaaaaaagtgtcatccgtagtggtaaagaacatcgatacctctgaagaaaaaaatttagaggccggtggcatttttgtagcaataggacatgaaccaaatacgactattttcaaggggcaagtggacctggatgaaaagggatacataatattgcagaatcgcaccagaacaaatatcgaaggtgttttcgccgcaggtgatgttcatgattttagatatagacaagcaattactgctgcaggctttggttgtatggcggctctagacattgaaaaatggttatctgaagcaagaagtaaatagaaaaaacctttctatcttaatttttatacttaaaaaaataaaaattagttagaaattatctctatctgttgttattgatatactagttttggcaaaaagctattatttttcagatagttttcaaattcatcctctgtaaatactgattgctctttgtacaaacttttaaatttgcgaccatcgtcagcgaagatgcctacaaatacctgatctttgccagtatttttgcgcgccttatctaacatactagccagaacagaaccagaagagggaccaaccagcatgtgctcatttgacgcgatttgttttaccatttggaatgatttgtcgtttgttgccgtataccagtcgtccacaacttcctctcgtctcaggaaaagttcgggtttagcagattcttcaaagtttcttaacccttggagaagatgatttctttgtgcttgaatagcaactacatggatttcatcgttcttttcttttaggaattttccggttccagtaacagtccctccagttccagcacctgtaaaaaaatgagttatttttccgtttgtctgttcccatatttcaggcccagtactttgaaaatgagagagataattagcatcattttcatactgattgggcatataataaatgtctggtctaggtttagaaattgcataagctagggcgatgctctggtccgtgcctgcacccactcggggacacaaatcatccgatgtctcatgtagagttgcacccagttttctaagaatttctttggtttctttactcactttttcaggaattacaatctccactttgtatcctaaataagatgcaattccagctagggcaatgccggtgtttcctgatgtaggttcaataattatacttttaccttttctaagaatctttttttcctctgcattttttatcatccaatacgctgccctatcttttactgatccaaacggattataccattcaagttttgcatatatcttcacattctcagtggaaaagcttttcaaatgaaccaatggtgtatttcctattctttcagttatattgtcagttgctggataagtggtagaagtcgtcatgttactttgcctttttaatagtaaattctaaatcattatttgatttgtttaaagataataattcatgaccatttctgttaacccatctagaaatgtcttcttcagaatctggatcatcagaaactacttttaataaatcacctttggtcatacgttcaatttcaattttagttctaaaaactggttcaggacaataaaggccccttacgtcaattgttttcataccggactttatgttctcgtcagaattagaagacatagtcaaataaaagcatttattcttaattaaatgtttttgcataatatactaggcattatttattgatttcagtttctaatagactttaatatcaaattatgctcaaccgggcactttattttttttgcgatggctgtttgcttaacagcgctattaatcgagttgcattacctgaaattgatttgcgtttataaagtcatattacgaaggatggaaataaatagactattcctttcaatatcttaatattatgtatggacaaggagaatgatttgtgttatgcttgttatatttgacgtagaaggtgtactactaaacgcagaatatctaccagttttggcaagtttgtttggtccagaaaaggaaaaggaaatttgggatataactaacaaaggtatccgtggcgaaattaattgggaagagggtttaagagaaagggtccatgcattaagaggtgtagaatatcatcgagcctccaatatcgcccagaatttggagataatgccaggtgctagagaattgtgttcctttttaaaaagtcttggttggaagttagtggccgtttctggagggtttaccataataacagatagactatattcagaactaaatattgataaaatattttctaatgatcttatttttaaggacaacaaacttgttgacgttaccataaaagttacatcagacaaatctgcttcagttagatcgtatgtagaagagaatagattttcgaaggaggaaatcatagtagtggtagatggtgctaacgatttaaaattatttaatttatcttcgtttacggttggattttgtgcagttgacgtaatccgtgacaaggcagatatagttattgataagaaagatttatcattgctgattcctataataaaagagaaatttaagataaagatcaattcgtaaagagaaaagaatacgtgtatcttttttttgattagcatcatcccaataaagattaataagaatattgaagcaaacgatgatcttacaaagttgattcttgaatcattgcgattgaacaacatccagattcatgatagtgatataatcgtagttgcccaaaaaatagtatcaaaatctgaaaaccgattaagaaatttgaggaacattattccctctccaaaagcgattcaattggctcagtttcacgataaggatcctcgattgatcgaattgatcttaagtgaagccacaaagattttacgaattacgcagaaacatttgattgttgagactaggcatgggtttgtttgcgctaatgcaggaattgatcaaagtaatgtctctgaagattcgcaactagttcttttattacctgagaaccctgatatttccgcgagaaacatacgaaaatcgatttacgaagtttcggggaaaaaagtatccgtaatcataaccgatacctttggcagacctttcagattgggtcaaactaacattgcaatcggagtagccggaattaatccgttgaaaagttacgtggggatggatgacgaatacgggaaaaaattgttggtaacagaaattgctatagcagatgaaatagcgtcagccgccgaacttgtaatgggaaagaccttaaagattccagcggctatcgtaagaggcctcagttatgaaatggcatcatttagtgacgagtataaaatccgcataaacgcattattgagaagtgaacatgacgatttatttaggaaccccaacaacataccccattactctaaatgaattaatcaaagattgcaaaataatttattcccaattcttttaactcatcctaatggatgatatcattgaaggtatattaaataagaataaaagaattattgcacaatccatttcaaaaatcgatgacgaggatccattatcaaaggagatattaaaaaaaatttatccaagaactggaaaagcaataacaataggatttacaggtcctgctggtgcaggcaagagtacccttattggaaaattaatttcttattttaaggattttggtttcaggatatctgtattggctgtagatcctactagtgctgtttcaggcggggctattcttggtgacagagtccgcatgcctactacgatggatgatgacgacattttcatgagaagtctcggttcaaggggagcatctggaggaatttctaaatctctaagaaatataattagaattttagatgcagctggttatgatttaatcatagtagaaagtgtgggggctggccaactagaaatcgaaatttcaaatgtcgtaaatttaacagttgtaatatttaatcctaatactggagacaatgtacaagctgtaaaggcaggattgaccgagattggagatgtatacattgtgaataagtcagatatagaggggtccactacattatacctaactcttctcgatttgataggtgagttgccgagaaaacccttaatttttaaagtgtcagctcattcaggagaaggattagaggatttgtcaaaaaaattaatagatttgatcaatacagacgactggatctcaaaaaagaaaataaaggaaagggaggatttgaaaaccgaactgaaattgatggtaatagatgaagtgagggaaaagtcattgcagctgctgaactcaaaaaatcttcagatagaaaaattagtagactccatgctcaacaaatcaaaggatccttattcggcggccgaagaattatctttattaatattttctattaaatgatctggtatgagcgaagataataattcaatcaagactgattcaaatattccagtaaaaaaatattatacctctggcgatatcaggaaagaaaatgaatctgacccaggtacatatccatatttgaggggtatctatcctaccatgtacacggaacgccattggacaatgcgacagtatagcggattcggtagtgctgaagagacaaataacaggtttaagttcttgctaggtcacggtcagacgggactatctttagcctttgatttacctactcaaacaggaagagattctgatgatcctcagtcggaaggagaagtagggagaacaggagtggcaataagttctataaatgatatgttaacctgttttaaagatatcccccttgataaagtaagcacctccatgacaattaattcgactgctgcaaccctactttccttgtacattactgttgcagaatcacaaggtgtcttgccttcccagattagagggactactcaaaacgacattcttaaagaatatcactccagaaatacatacatttacccaccgcggccatcactaaggcttattggagatatgatacaatactgttcaactaatgttcctcaattttatccaataagcatctccggctatcatatccgtgaggcaggttccaatgcaatccaagaactagcctttacttttgccgatgctattgagtacatcaatacttgtgtagacagaggattagacatagataattttgctcctaggctttcttttttcttttgctgtactatggaatttttagaggaggttgctaaatttagggctgccagggttatttattcgaagattatcaaagaaagatatcatgccaaagatcccaaatcttcacacttaagattccatgtccaaactagtggtgaatccttaactgcacaacaagttgataataatatcatccgagttacaactgaagcattggctgcggttttgggaggctgccaatctttacatactaattccagagatgaggcactagctttacctactgaagagtctgttaaaattgccctgcgtacgcaacaggttctggcctacgaaactggcgttacaaaaacagtggacccattagcgggatcttattatgtagaatatttgactgagcaaattatagaaggagttaattcataccttgaccgaatagacaagatgggtggggcattggcagcaattgaacgaaactttttccaagaagagattagaaaaaatgcatattcacttaagaaagaaatcgacagcaataaaagaacaattgtcggagtaaacaagtttactgaccaacataacgtggagccaaagttggctatagttgaccctcaattggaaataaagcaaatagagaggttaaaggaatttaaaaggtctagagataatattaaggtccaacatcagatttcgtccttgttgactgcttccgaaaaacaagatacgaatttgatgccatatttaatatcttgtgttaaaaacaaggtgacccttggtgaaataaatagcacctttaaagaaatatttgggacatatgttccaaaaatctctttctaattatttatttgccattaatctttactctcatatagtttcatagattcttgattgttactcattatagtattgaatactcttctaccgatttcagactttttatctaattttaatttggctttctttccaatctggttgctaatcagtaggtcatcttctaaaaatagattgaccttttttccaatgtgcatttcatcaactactaggtaaattcttgatccggattcggtgatattaaatgctatttcattaccaattagaggaactttagcttcaacatcaatttttactcctaaaattttttctatttctgaaatagttgttcctcctcttccaattatcctgggaatcacctctttattgactttaattcttatcttatcaggggagattatctggatttcagctctggggtcaaacttacctataacttctcttattttggattctgctagtttattaatcctgctacttctttctctatcggcttttttatcgatattttttaaaggtatgattatgttttcttccccatacgagtaaatttcatattccgtctcctttgaaaagaagtctctaatctcaactacaggtctagcaagatcttgctccaccattccggcagggactttaaccgttaaattcaattcgtatattttttcaatttcgcctccgtgaataaatattactgtgtctattacatgaggtatcattcctaattctatcttgccaataaagcgttgaatggcatccaatgcttcatttgcatgtatcactcctatcattccaataccggtaagtctcaggtctgcaaatagttcaaaatcctttatccgcctcacttcatcaaagatggtaaagtctggtcttacaagtaacaaaatgtcggcaactctttcataaccgtttttaaaagaaccatactggatcacattctctggaacctgcaaatccctaggtgactctagggtcttgacgagtttattattttgtacataatgttcggcgatactgcttgcaaatgtgctttttccagaccccggtctacctgctattagaattccttctgcttcttttgacaatctatttattaaatttgtatccagttgatagtcttgcaaggtcaatttcttgataggtcggactgcagtaatttctatcttatttgacacgggaggttgagttatgacaattctcaaattcttgtacattattacataacatccgtcaaacgaaatttctatatttgatatttttttattattttcagtagagaataggaaattcatgatttcatttagagtttgtttatccagtttattctccgatattttctctaacgtaaaatctcctggtgtgcctttctttgccaacggctctactccttctatcaaatgaacgctcatagatttatcgtcaaagtaattttctatattaaatgatgctgagactggagagcgaatatgaacacttgatattccagtagcgttggcagttaaatgttgaatataatcggcagtaaatagtgtggcattttctttttcagctatttctgtaataagggcatcaatcctaccatttttggctaattttatatcttctaaattaggtttttcgccataaattctcactaaaatattattttcattacttttttctctaatcttacttagttctgcgagtcctatgaatccatgttccctttgtttacaagcctgcgactggagttcatcaatcgcagcgcgaggaattattatctcaaaactttcatcaatatctttattatcaattttctgacttatatcgccgtctattataatactggtatctaaaacaattttttttttcaaattaactataaccagatcaatcatcagattcttaaaaaaggttactaggcgaaagatttcttacatagcttataataactagaattgcttcgaacgctgtcttagcagactatgattaaattatattaatgaaattccatagtacatcagtttaattgagtaaattggagttgaaaaatataactaaatccttttcagtaaattcatcttcaggagaaagaaaaagggttttagccatagataatgtaagtttatcaatcgaagaaggacagttcgtatgttttgtaggtccgtctggctgtggtaaatctactttacttaatattattgcaggtttagataagccaacggaaggaaaattgattcttaatggacagtcggtgtttgaaactgggcctgatcgaattatggtctttcaagagaatgctttatttccatggctgactgttatcgataatgttgaattcggattaaaaatggttggagtagaaaaagaaaaacgaaacaaaattgcattacactaccttgaaatgatggatttgggtaaattctcaaaatcttatacttatcagctttcaggaggtatgaaacagagggtggctatagctcgcgctttagtaatggaccctgacgtgctgctaatggatgaacccttcgctgcgcttgactcacagactcgtgatctcctactggtcgaacttcaattgatatgggctaagacgagaaagacaataatatttgtaactcataatatatcggaatcaatatgcctcggagacagggttgtggtattcacaaagagacccgctcgcgttaagaaggagattcaagttgactatagaagacccagattaaccgaagattctaatctatttgagtataatcgccttgtccttgatgaattaaggagtgaaataacacaacacaaaagatcaatataattaaatttttgcaaaagctattttcttcaaaacctctattccttcatcaaaactgttaggggaggtaattaggatatgatccgtttcctcataaatttcccttaagaatcctagaaagtcatcttgatactcactccagtccaaacctatcatagcagcagccctttcattcttgatcgaaggtaccataacgcaagggataagttggatttgattgggttttatgagatcttttaaatacctgatctcttggattgaatttattgattgtgtgataaacctgtggggctttgaatttacctttttctggaatgctatatggtttgaaatctggtttggtatggataaatcaagatctattaaattatcaaatccagttgaagttaaaagcctaactacatctgttggttttgaaagagatgattttgtttctgattcttcaaatgcaggtttgtcgccttggacaaataaaagtcccctaattttcaatattacagcatccgttaccatctgtataatagaattcatattcctatctcttgtcctaatactacaactaatattcaactttgcctcaggcatgctattcattatcatctgagctgcatgaatacttgaaaatctggggacacctaggacagaatcggttatatggacatactttgtgaaagtagaaataattctcgccctgttcacaaatttaagtagatcctgactgagcagtgcaatatcgatcctataactatttagtattttgggaggatttaactcatagattattttcattttatagtttagttaaaggagaaagatgacggtaaaaaaaggttttttagacaataatattatcatagttcgtagtcttgatttctgaaaaagaattcattgaaattatccaggataaaagcaagaccttatttaattataaaaatattaatttaggagtagatgaattcaacagagttcactcaagcgtattagtaataatccattttaatattgaatataccccaacagtcatattcacaaagagaagctcaaatctgaggaatcatgcaggagaaatttcctttccgggaggtagagtttctgaccaagatggctctattatagaaaccgcaattagagagacttttgaagaaataggtctccccattcaaaaagagaaaattattggatgtctcagtccaacaaatacctatacaaccaagattgtcatctatccgttcatcgtgatccttaataaaataccatttccctttgaacctaatgaagaagtagagaaagtaattgaagtacccctcgaaaatctacgtgattgtatagcagtcgacgaagagcattcgagcagagataatgagatgtttaaattttccgtgaatggatatttgatctggggggctaccgccaggatattgaaaaatctgttagatttgatatatctttaaaaaaacctttagagatttaatcaattccacgatcagtcaatagacctaaaaacttgttgttaaattcttttgttgacagcttaccacctatatcaattgtcttgatatttttattgaataattcatccactgttttctctattttgtctgattgggccgtcaaattactgtcttggtatttctcacccaaccattcaaacatcatcttaagggcaagaataaacgatgtgggattcgccacgttcttgcctgctatatcaaaagcagcgccatgaaccggttcaaacattccaaagtctttccctatatttgcagcaggagctaatccaatgcttccggtgatttgtgcagcttcatcagaaataatatctccaaataaattggtagttaaaattatatcaaatcggtttggatttctaattaactccatagcgcatgcatccacatacatttcctcgaattcaatattgggatattgtttagctacttcttttgaagtatcgataaagagcctatcgctcatccttaacacattggatttgtgaactattgttaccttcttttctttcctagaatttgcaatttcaaatgcaactaccgcaatacgtctggatgcagccctgctaatcttcctaagagatatgacagtatcatcgtccgaataaaattcccaacccagatataaatcctcagtattctccctgacagtaatcaagtcaacatcgtttgatattgcttgaatattggcatagtttttagatggtcttacattagcatacaaatcaaaatacctcctcaaaacgagtacaacatctgcagccgattctccaactggagattttaaacaggcctgagagtttttaattctttcaaaggtttcgtcaggcaggggtttattatactttaatttagcattgtcacctgcttgtactctagaaatattaaactttagagatgttgacttgtcatgaatacactctaaaatatcatacacacaatctgataattcaggacctataccatcgccatcaagaagtgaaatatcgtatgtagtcatttacatgtctctcaaattcaataatatgttgtcatttcgcatgctctccactttgaatcatcttttttaacattgttttatttatggcatctatcatagcctgaacagacgccacaacaatatcttctcctgatttcctagcagaaatgatatttccttccttatcctctacttttacggatacttctgctaatgcatcggagcctccagttattgaatctagcttatattctcttatcctgatgttagcaataccgtgggcgatagtttgtatggctttcaatgctgaatcgactggtccgacaccagtctccgacgcgataaaatctttgccatgtatgttaagtttaacaaccgcggttggaataatatgcagtccagtaactatgtgaaaatcattcaatttaaaactttcatcgaatgtcttgttctttaagacctctgaagctatagatagcaaatcagatgttgttatagattttccgctatctgcaattgatttctgcttatctacaatttccttcagctggatatctgaagctgcaattccaaactcgtcgagaattgctttgattccatgtgcaccagcatgtttgccagcttgcatccacctctttctaccgactaattcagggcttattggttcgtaagtcaaaggattattgataatcccatgtgtatgtatacctgattcatgcccaaaggcgttctccccgattatagccttattgggttgcactataattcccaatgcactagaaacaaactttgaaacatcatacaattgttcggttttgatattatgaggtatctgatagagacattgacatgccattaccaattcttctaatgccgcgtttcctgctctctcacctagtccgtttatggtcacatgagcgcaagccgcacctgcctggaatccggctatggaatttgcaacagccaatccaaaatcattatgacaatgtacactaacaggtaagcccgtcatctctgctacacttgcaactagttttgacatatactgcggtgttgaatagcccaccgtgtcaggaatatcaatcctatcggcgccagcctctgcaactgatttgaataccttattcaaaaattcaaagtctgatctagtagcatcttctgctgaaaattccacaactagtccatgtttttttgcatattccactgcataaattgctttttccagtacctgttctctagtcatctttaatttgtactgtaaatgtatatccgatgttgcaataaatgtatgaatatactttaaatcacttttgattgcaatatcaatgtcattttgggtggtacgtgctaaaccacatacttcggcttttaatccttgattcattattttttttatagcttgcacttcgcctggtgagactacaggaaaaccagcctcaattgtatctactcccaactcatctaacttcatggctatttctaatttttgatcaggagaaactgttactccaggtgtttgctcaccgtctctcaaggtagtatcaaaaattctgattttcttcttgtgatcagaggtcgtcattcacagctccccttggtaaagcagaaacacctgttctggccacttggattataccataacttgaaacaagattcttgaatgcatctatcttatctggagttcctattatttccactgtaatagtttcattactaatgtccataatattacccctatatatagaagcaaaatttgcaatttctatccttgtagttggatctttggcgttcatcttgatcagggccaactccctgtatacagcgttctccttgtttaatacatttatctgtataacatcaattaacttttgtaattgtttaactaattgctcgaatgtcttaacgtcagataccgtagtaatggtcatccttgataaatcaggtttttcggttatacccacagtaatactttcgatattaaaattccgggacctaaacagattagtgattctaaaaaggactccaggtttattttcgacaatgactgaaagaatatacattttgttttcgttgtcatcatcaaaaatggagtttctatttttttgcataccctgtcatgctccaataatcatgtctttgagcccagttccaggagctacaaacgggtatacatcttcgtccggatctataggaatgtcgattacagtagcaatatctgatttaacggcaactttaagggccttgtctaattcatccattgaactcaccctatatgcttgagcaccataagattctgccaatttgcagtagtcaggacaattcttttgatgtacgccactatacctcctattataaaatgttctctgccattgagcaaccatccctaacatttgattattaagcaagaacacaatgaccggtaattcttctaatactgaaactgcaagggaattttcagtcatattaaatgaaccatcccctgcaatatccactactggtacatcatttctagctgctttcgctcctattgaggctggaaaaccaaaacccattgtacctaaaccggtagagctaaaaaatgtgccaggagaaatgacatcaaagtgcaacgacgcccacatctgacactgtccgacctcagttgttacaattccgtctgcaggtaaaatctctcgtaacttctttaatgcttttttagctgtaatttctcgagaataatccttgatactatcctcataataattaactaattccctttttctacctaaccataatttggaaatttcttcgttggttttgaaagtctttgggattaactttattagactccttaatgaggatttaacgtcaccaactactgcggcattcacggacttgtttttaccaatttcggctggatcaacatcaaaatgtataacattaatatcctttccgaattcgtcaaatctccctacagtcctatcagaaaacctagctcctattgcaagtatgcaatctgcctctaataccattttattggcttctgcatgcccatgcatacctatcggaccaagtgccaacggatgattttctggaaatgctcccttacctttgaaagtgcttaccacgggtatggaaagtagttcggctaatgtttgcaattcagagaatgcaccagagaggattactcctccaccagccattatgattggcttttcagccttaagtatcatttcacaggccttatttatctccgatagatctgcatccactatagggttatatcctctaactttgatatattctggaaattccatctttgtaacttgttgttgcacatctttgggaatatctaataatactggaccaggtctgccactttctgctatgtaaaatgattttttaaccatttcgggtatttcgcttgagactcttggctgaaatgcatatttagtacatggattagtaacgccaataatgtctgtctcctgaaaagcgtctttgccgatcataggtagagcaacttgaccagtcactgcaataataggcgatgaatctgcatatgctgtggctataccggtaacaagatttgttgcacccggacctgatgttgcgaaacatactcctgccttcctcttgatccgggcataaccatccgccatatgcgctgcggactgctcatgtcggaccaaaatatgtctaattttggaatctaccaaagcatcgtatatcggcaaatttgctccgccaggtaggccgaatatatactccaccttttctttttctaacgcggtcattaaggccgcggcaccagacatttcactcatgattaatacaattcctattgataaaacctaaaattataatagtaaaaaacctttaacaagaaatatttttctatttgcgatatcacaatttgttgtcttaattaatcccattcattatttataaacaaagttaatttataaattttttttctgacatcaaaaacatatcctcgcttactggttgtatatttaacatattaaattgacgttgtttaattgcctgatttgtttctaatttcctttgtcatggggagcatgcttctatattgatcatatgcctctttgaccgttgaattttcatgcacaatagctcttactgcctttatcattgctactggattatccgattgccagatatttctgcccatatccactcctgaagctccatctttaattgcatcaaaggtcaattgtagtgcatccctctctgccaacttttttccgcctgcaataataacaggaacaggacacccttcgacgactttattaaaatcagggcaatgataagtttttaccacatgagctccgagttctgatgcaattcgacaagctaaacctaaataacgagaatctcttgccatttctttaccaactgccgtaactgccaaaacagggatcccatatttttcaccctcatcaactagttttgaaagattctttaaagtttgaaattcatatttactcccaacgaatatagataatgcaagacatgatgcatttagtctaatagcctcttctatagaggtaactatagactcttttgaaaggtcttctccaattatgctggaacctcctgacactcttaatacaaccggtgtgttactttcaggaattacagatgttcttagaacaccacgtgtaagcattaacgaatctgcataatttaataatggaccaatggtttcccttggcttttcaagtctctcggtgggacctaaaaaatagccatggtctaccgccagcatcacacaacgaccattaccgggctttattattctagaaaacctgtttttcattccccaatccattttgaatacttgttgtagtttatcgaaacgctataaatatattgatatctattattcagctgtaattatgatcttcatagcgtctttagcttggtgagcatgcatgaatgcctcataagaatccgttaacgggaacttgtgagtaatcaatggttcgaaatctatgatattggattccattagagagatggtttgatgtatttccttttcagatgctgcatagcttggtaatatctttagttcttttgaatatattatattcaaatctactcttacttcggtatctttaggaggtacaccaaaaagagaaattgtaccccccttacgtgttattattaaggcttgaatgaatgcgttaatactactagtggaaataattgaaacatctgacccatcttttccaagaaacgctagtgacttagttttgaattcactctcggatatatcagcaatatttatggtttccacatgtttatcaattttcttggcgaagtctagacgaaaactatttacatcgacgagcaatatctttgaagcaccaaaaaaccttgccaagatcatatgcatcaaaccagttggtccggcaccaaatattacaatagtatctgctttctttaagtttaccttatttagagatcgcaggcagcatgcaattggctcaatcaacgcagcctgattaaaattaacattttcagggagtctaatcagtccccctttagatagattccactgaggtacaagtatgtattcggagaggccacatggatcaatattgctagattgatatttttcacacattgtgaaatcatcgttataacaataatgacatgaataacacggtacatgatgatgaataaacactctatcgccttttttgtaatccttaatatcagcccctaatttagcaatctcgcctgcaggttcatgtccaattcttgaagatttcatcccatattttccaaaaaccttttctaggtctgatccgcaaataccgcatgatctcatacgaataagaacttcattattaccaacctcaggtaaattaagatcccttaattctaccctattatttacaaccactgctgccttcatacactatttatgactagcaatgttcaataaaattttattattttgaatatttttttggcttcttttgaaatatttttttacatccttcacaacagaaataaatttttttattattaaaatcaaggatcgttgctagatcttcagttagttcaattccacaaacagggtctactggcacatttaaaaaaaaaatatctaggtatttattatttcctaacaattatttcattatttatattttggatttatttaatcattaagtcaatgttagttaaccacatcttaatttataaccttaaaatttaatgaaattgatgtcttgtccgattattgagatattttgctaccaatgcggaagcaaaattaagcatatgataaatattaaacccataaaggatattcttagaaataccatgaatcgatgctcaacatgtggcatagaacttaaccctactgatttcacgatagaactagcaaaacaataaagtggtctcactttagtgtatttaattgacaacacacagataatcttaaattcatatctaattctaactaatatgtgtcatttcagaagaaattttactcgggttttgctacacccaagggcacaacagaatatatggattacgctataaaaaagggtgctaataaagatcattttagaagtatagaaaatctaaaactttcatctgtaggaatgggtacctatcttggaaacctctctgcacaggacgatgacgaccttgaaaagtctctatattacagtataaaagaaggtggcattaacttaattgatacgtcgatcaattacaggtcgatgctgtctgagaaatgtataggcagagccataaacagtttgattgaagaagaggtcattaatagagaaagtatatttatttgcaccaagagtggatatgttactaatgatggtgattataccaatatagatgtcgatacttatttgaccagtatgtttctcaataataatataatatctcattccgacttgagtccttcgtataatattatgcatccaggttatatttctagatgtattgataagtcgttatgtaatatgggaataaatactattgatttaatatatattcataattcattcgaaagttggcatgatatagtagatagatctacatatcatgatatgttgtctcgagttttccaattgtatgaggagctgagacagagaggaaaaattaatttttatggaatggctacgtggaattgttttacctcaaaagaaaatagtaaggaatatctgtcattaaaagaggtcgttgatatagccaaaaatgtcggaggtaataacaatggtttcaaatttatccaactaccatttaatatgtatcttaatcaaccctacacatttagaaatcaatctactgaaacttccaataaattaactctcttagaagtggcccaaaaatacggaatacatgtttttaccagtgttcctctctaccaaggcaaacttcttcagataggactagacaaatctcctctagatagtcttccgacggtgtcccttaagctattacaatttgcccgatcgacaccgggcattactgctcctttagtaggccagaagaaaaagagtcatacaaaagagaacgttctaatatctaaatatgcgcctttaaatgaagttgaatataattcaacgattaaattattgaataaagctggccaataaattgagatatcaaattatctacctatctacctatctacctatctatctacatattgataacagaaaatgatttttaaactagatatatggttaagagccattaggttcaggtttctagccgcctcagcaatcgctgttactactggacttgctctgacaatatggtatcagccccaaaaccttagcttgatatattctgccttaacttatttaggaattttatgccttcattctagtgtcgatttgctaaatgactattgggattttaagagaggtatagatttgaggactaaaaaaacaaaatttagtggcggcactggggttttacctcaagctttactaaaacccagtcatgtatatgctgcaggcatattatttcttattttaggattgctgatagggggtatttttgtttactttaaggggtttgttatcgcgatcattctgttattcgctgtcctgtcaatagctctctattcaagtaaactggtgaattggggacttggggaactatttgtaggcgctaagggaactttaatagtggttggaacgttttatgtacagaacacaagtattactttagaatcaattgtattagggatcattattggtttgttatcttcattggttttgttcataaattcaatacccgacattgttccggatagacaaatggggcgtaagactttagccattatgttggaaaaaaggagcaacttgttcattctcacctttacaattggaataattttagcagtttatctcttgacgctgtggttctattcaactttgatatatagtactttttcatttattccttgtatcttgcttataccttatgtagggctaatgttgtttagattcaaaaattttctgtacaattttaaacgtcttaatgatgactattacataaaaataatggcaaatactgtgctcttttcaaggttttatgggattgcgctaattataggtgtcatatttgcatttttactccagacataggacaaacgagtaaattgataaagattctatgttctgacaaggacaaattccagtttatttcaaatctcataaattcgtcggacaagtcatttctttttaagcaattcttttattttgacagtattgattcaactcaagatttcgcaatggaatcattaaaaggtcctgatgatttctatccatcagtaataatcagtgattttcagaccggaggtaaggggaggaagggtcctaattgggcatctcctctggggggaatttggatgtctgtggcattaaagactgatatgaaaacatgtgaattatttcgtatattaattatggttactaaattgctttgtgagaccttggaaagtcatactagattaaaaccaatggtcaaatggccaaatgatatttttattaatggaaagaaggttgcaggcgttttgatggatgccgaagtcgagagtgataccataaaacaggtaattattggaataggcgtaaattccaacaatgacttggactctacaaggctagctatcagatttaaaaataccgaacttaacgattatgatattacaacaattaaacatgaaaatcagcatattgaaatttccaatcaagagtttatccaatatttcttaaaacgaattagtgatacatttccaaagataacctcaagtgcattagctgaggaattaacattctattacaaggataaaataatggaatcacagaaacatttgaaatacaaattttcgagagaaggcaataagtttaatggtgaaataataaaaatatacgatgacggatcgttgttggtgaaaaacttagagtcttcgcctactgatgatttaattcggattaactcagcttttgaactaggttaatcatgagctgaggagattgtattggattttgataaattagaatctgacaattcatgatcctatcattccgggcatcttaatgggagatctgaacccttcttcgatactaatcccttctccagtaaatacggaaacacttttgagcaaggctccctgcggtggggataaaattattgtctgaccggggtcaattcttaataaattttcagtcaaatttttattattatcatatacgatataaatatcatttagagccatcttaccagtgttttttaaaactactcgggaattgaccaagagagactcaggatcctttaatgcgtctacatccagagcatgatccttaaagggtacagaaatcaaaacgttgtagagaacgaccacggtgactacggcaactaatacaatcagtattagctcaactttcttgactttcaatcccataatcctaccaattatattttataaaaaagtattcttttttgcttattaattgaacttaaaaataaatggttaataatttctaagttaaataatcacaatatataaaaatttaagttgatgtttgcaacaacacagtaagtagttatttacccttttacatagatggctttattcaaactatctcactattctgtcaaaatcttgtgtctccttttgcttatctaaccatattagaattagatataattttggcaattatatctagattccttcacagtgcaaaattgataagtttaaatatgatttaagtttattaaaagttacatcgaccaaaccgaaggggaacatgcttagtgtgctgataatatcagtgcactaagcaattattatttataatcttggaaggaatttaaaggactttatcatatcattggcggtattttcaaaggtattatacttatctaaggatgctttgtatgttaaaatataaatattctcataattggaaaatacaatttgtatcgccttacgattttgtaatttactatctgttgctgtgaaaattacctttacggccttcttcccgtctacagtcgaagtttcagatgtttccaatttgaaatctttatgttccttttgaatttgtgataccaactgttttgatgcagaatcagcagatatgttctttcctggcgtggggactactttaacaacaagacccgcaggactgctaaccgaatctttgtcctttggcgcgatgaaaataatttcattgttcagcttcacagacttttcccagttagacggataagtaacggtgaaataaaatttattatctgtatgagtaagcattgattgactttggctttcgtgaaaaaaaccaaaaacaaagattccattagtcactaactgattatttatgtgaaacataaatacagcaataactatataaatcaaaattattcccgtggatttttgtatagatctctgcggaactgtcataatatcatacttttcaggtaattattaaatattctaaaaattatacaattggactttactgaggaggtggcgaaatttattttgaccttgaaatcgaaacctcaattgtagagacatttctaggtttatcatcttcggtgccggttagaacatctgaacctaactttactttctctactctataacctaatgtattcattctcttcactattatttgagccacatctactgccctagtgatgcttttccctctagctttaataacaacagttggctcattagcgagttgtaccagagttgcagtcacatacgtcattagaggtttttttccaataaaaatttcattgctctttctatttcccgattcgtatttgccatgagacattaaatattatgcaaaattcaataatataatagtatatcagttcgttagctcttccaaaatttcaattattttatctggatttaacagtgccttttctataatgttcttatcagtaatctcataacaattgattagctcgttttcatccttataaaataaataaattgagttatcatatataatggggtataacttttctaggatcataaattcagggtttaactttatcttattttcaagatcaatttctacagggttattactcatcttcgttcaaaataaaaaaacaaaacaacaggataaattcattcttccagcatatcgttgtacatagcgaagagaaaaattgataagctacttatttacgaacagcaattcgcccactatctttataacaaaaccaatcccacctacagcacctatagccaacaatactagcctaaggtgagtaaaatagtcatccttgcttgtcttttttgccagctttaatgtttgaaagcattctatcgctcttctttgaaccgtattgactattgatgataacaattgatttctaaaagtctagaagttccaatataattttaatatttctaatttctaacgccaattttagtacatatattatttaaccataattttgattgctcgtctgtaacgaataaaccggttctttatctgttcgttgcatctctacgaaagtctccgtagcttgaatgccttctattttcccaatcctctctattacaactttgtgcagctcttccaaagttcttgtatttacagataggattatatcaaaacggcctgtcacttctataagtgaccttatttcaggaattctggtgagttcatgatgaattggttcttttaattttggatcccgatttataccaactgtagcctttatattaatgcccaattgagattcatttattatgactgtaaatttttttataagttctcttttcaaaagtctttttattctgctatataaaacggaggagtttatgtttagtttcttactaagttggggaattgaaatacttgcatcttttgttaattctgacaaaattttcatatctaattcatcgaatctttgcaagattgactctatagtatgattattggttacattaataaatgtaattaaataatttgctagaaatcataaatataattaaaaaatctagtgtttttttttataatacattagtaaatattatattattacgtccacatctttttgatatgtttgggatgtcaaaacttcgatctggaaattttgtttttgtagtaaaaaaagatgagagttcaaattatgtaataataggcaaaattatttctgataatgataaagtaataaaagttaggggcacctttataaagccaattggcctgcttcaaagaattaggtcaggaagagctcagggaaaacccgttgaagccttaaacaacccggagcccaacaattgtattttcttgattattgataaattggatactggcgattttgaagataatgttgatccaaagatagacaaggtaatcccgataaatgagaatagattttttgttctcgatggttgggttaaagaaagcttctcagaactctttggtaattactttaattcgacctcgaatgaagaaaaatctgaagcaaggagtatcttgattaagaaaatgaattccttaatgtcccaagaactaaaggaacatgtttatgcagtggcacggagttcacaaattttataaagttttatattatggactttgcaaattttcttttatcatggaatatgtatatgctgctttattattacataaattaaagcaagatgtcaatgaagctaatgtaaaaaatgtaataaaatcaactggtgttgaacctgatgatgttagagttaaatctttggttgccgctatgagtgaaattaacattgaggatgcactaaaggccgctccaatagccgctgctgctccagcaggcgctccagcaacccccgccgcctcaggctcaggtgctgcagcaaaagaagacgagaagaaagacgagaagaaggaagaagaagcattagaaggattatcttctcttttcggctaaactttatccatttattattttaaactaattaattatataatattactaacatcactttacatctacctaattattttaaccattctaggttaaaacggtacgcagacgattcaaatcatgatggtacagcaaatagaaaagtttaacaaaaaaaatcaaaacatagatgtaacaataaataatttgttttggatacgatttaaaattgatagctaaaataatataaaaaattagggttattgattggaagaaaaccctttggattcaagctggtttgccaaattggaagcaattgcattggcctttagtatcaccaattcaattgtgtcaggcgaagtgtatcctgattcggaggccaaggataatccatgctgttttgctttcaataggatcaatggcattgatgccttcgtaaagtatactgcttctactgcaatagataacgcttcctggaaagattttactaattcctgtacgtaatctgaaactacaatttttaggtctttttccttaaattcaagcccttcggaaattgcataatttactgatactcctgcttcaataggttttacatctaatttgcttaataacgcagctaacttttgggggataacatcgccagctcttgctacaacagtgtcttttgaaacccagattgttccttgatctattttggttggtacatttgattctttgaactcagataaaaccgggcctggattgattccagtattgccagcaggaataaccaactcgtttggggcaatatcgccgcctttagctgccatgaaaattttgtttttatcaaaagttaaattcattttaaatggactaaggtttgtaaacattagagcgcattgaccttctagttccttattgaggaattctaatcctttaacttccttgaaaatttgttcaaaagctctttgagcaaccttattttttatcgttaaaatcttgatttcatttctaaactttttcctgattgccataagttgagctgaccttacttttgtcatcctcgacagtgcaataacatcataagatttggctaagctttgtaagtcttcatacaattttatttttctttctggatacgaggttcttcctaatttgttgatgatggctgtttgactcattacgattatccctaccggttatttgccaagggtacttgcttttaatgctttacccatagtgaattttattatagcgttcctaaaattcttgtctccttgcggaagtttcttttcaactgaagcaataaccgcattggcatttgccgctagctgctcatcggtcatcgactcatcaccgatttttgttgacatgtttaattgatttttggatcgtattcttgtggatgatcttaatctcgtagctatgttttctatcggggctccatagggaacaggtgtgggcattttaccttttggacccaaaaattgacctagtgatcgacctacggatgacattaaagtagcatctgctaggaaaaaatcataagagcgaaccatttttctggcctctcttctgtttgttcctatcctgtctaaagtatcaggttccatcacctgatctacaccagctctctttgctcgtaatcccatgtctccagtcgcgagcatacaaagtgaagcacctttctttgttggattaggtagcactactatttcgttgacactaaatccttttttgacatcaatgtctcttaatactagagttatttcagccgattgagcaaaatttctttttggagtggcttctcttgccttttttacaagctccttcaattgatcattgttaaacatgaatatataatgtagacgcgcaaaggccatttaaaatcgtttttacgacaattgaatcatatggagatcctttgtcgctctctttggaaattagattagtatttttctactttttcttatcaaaccggtacccaagccgattgctgtcattgttatcttactactaccaatcttattatctaacagcaccagtcacgaataatactgctgctcctaagataatggagataccaaatcaagtaacaatgatgttgataactctgttacatttaaccaatttcaaagtctctcattgattaatcaaccacctcgtagacacagcataaaaaaggttagtcaagcttatgcaattgactatcacaaattacttattttgtttatgtaattgattaatctcttatcaagaaaatcaaattgaaaatcagttaatgagccgcgcctatacgtattaaatatatccctccttagattttctaatttgataatgctctcggtcttgtcacctacatctgcatcctgtatggctttattagttatctgaattagtttgttaaactttcttctttgtcctcccttgaaaaaccatcccagcagaactgaagacatgcccgttacacctcctattaggaaaatatattgttcagtcgaaagtgtaggcctaaaattggcaacaatatcgccatattcgctggacttgaattttagagggttatctgcactatatgcaagccctgaccatgaatcaaacgtgtatcctctttccggtactgccgtgcaagttgcttcgttgtcggtgggaataatagtagtattttgattaagattttttataccattacactctatgaatccggaattatcaggactagtatcaaatccaattcttactatgctttcatcctctcttccgtctataattgaaagtgtattggaagcagtatttgtaatatatactagattggctatcgggtctacgccaacaaaacttgcaataagagggaattttatattggttggaatagtctcaggatagtcatccctttctattatcgaagaaggatttacaacgatctcttttattttctccaaagatgtttcgtttaccacgcttacatcattagaagctatattacttacgtatacctgatctgaaactgggtttattttcactccaactggagattcaccggtctgaatagtttggatcacagtgtcatctgtaccatttatgactgatagtgaatttgaagcgtaatttgtaacataaacaatgtttctttcttcattaatgtcgatacctactggggctttgcccaccggaatgttcttaatgaaattgtaattatcttcgttcatgacggtgatggtagaattagcaatgttggaaatgtacaccttgtttgaaagtgggttaacgttgataccgtacggagtattcacaccatctatcgtcctgataacctcattggttattccatcaatcaccgaaattgaatttgaatcaatatttgtaacatatacccaattacttgattggtccaccgcgacttgaaccggggctttgcccaccgtagtattatcaataactgaatcagtagaaccgtcgatgattgtaacgtcattagatcctctgtttgttacataaattctattattaaattggttcatatctatactataaggaaaaatcccagtctcaattgtacttaatagtttatccgttttagcatcaaacactgaaactgtattggaatactgatttgcgacatagattttttgggtaataggattgatagttattcctactggatagcttccagtatcaaatccagagatgaatctcttgtcttcctcttgggccatcacaaaattgttagttatcattctgtctaattcaacattcattgcttcaaacaaatacagtctgtcaacagcagaaggaggatcaaagtaactttgtaaattgaccaaaattaaaaaaataaatgatatggatatcggtaagcaagacttcacataatgactttgagctttgcaattataattttttgtatcataccttataatatcgtgtaaataaggtcagaaatattgttctaggcaaatcatacttaacaattatatcttcactatccttattaaataaaaagggacctaaaagacgtggtacaactaaaattcatcaatatatcattagccgtaatcttatgttttaatagcatgtttgttttttcaattaatccttttatgtatgactttcctgcaacgtcattcgaggtagcgggccaaaacaatgaaggcgtctttagttccttaagtaggaattttgaacaaaccattgaggaaataaacagtgcagatgaaaagagcaccgctactacccagagtgactcctctaatactggggatgaaaaaagtaacaccgtagatatcactgatacaacagccgaatcttctagtcttgacagtaataattctacgataactgacgacttggcaaatagaaatcagagtgatttaaataatcaaaattaattgataatagaatttttctcaaaacattgaaactcttgtccttggtaatacttcaaaggagcataaattagtaatatttaaggaaaaaacgcatagagtaaggagtatgatatctaaccctcatttttctgtttaagtataaagttatttcacaatttcggaaagataataaacacttttggtatattgcatatacctttattcaacaacgcaaggacacccgaattaatttatattttaaaaatctttatttgccttttttaaagaggttaattaattctgggaagaaacaaagacatgataaattttatctttattaggtttaaattaatttgatcatggtcgatgagttagtaaaaataaaagtttggatattcaaaggtatatgtaaatgggtaaagctatgctacgagatctgctattgcctcgccaccggacgttatatttgttatgttgctaactgtacctgtctccccaataggtgaaagccccttttgagcaagcacttcgtttagtatggtggtatcatatattcctgaaagatttggtcgatcttttcctttctctataaatcctaaatcataagcgtcatttgcactcttaaagagagataattttaatggatcgtaggtgatatctatattagtgtaggccttatttaatacgttttctgaaatttcttgaccagtaattttcttcaactgagtattaaattcttttgctgcttccgctgtattgttgttgatccaaagcgtttcattcacatgggcttcaataagcttctttataatttcaggattgtctctaagataatctgttctgactattaaattgccagttacgaatttaccatcaggccataaggttctctcgtcaagaaacaccttgccgtctgcctcttgaaccagtcttgtagcccatggttctggtacccaagcaccgtcgatttcctttttcaaaaatactgttaatatatctgcatttgcgatgggtaacaccgttacgtttccaccattttcaacagtgttaaaaccattgtcaatcaagtattttcgcaaagcaacatcttgcgtgttacctaattgaggggatgcaaatttctttcctcccaggtcattgacagtttcaatacccgaatcatttctaacaacaaatgaggctccaccactagatgcaccggagattaccctaagatcattgccgcctgtaagtagatatccattaatggcaggattagggccaatataagtggcatcaattctatcagctaaaagcgattcaatcgcagatggtccagcattaaatcgaatagcttcgacagtaacattatcccctagagttttctgaaaatcatcattatttaatccaatcacggcttgtgagtgagtgatatttggaaagtaacctattctcaaagtctttttttcactgaccaccgattgtgcacctgcaattgaaataggtgctgatatcaaaacaactgcaataataatcattgtaaagcccaagatcattggtcgtcttccacttacaaaactttttggtactttgaaactttttcttgctgacttgtaaatcattattttgtttataatttacataacttattagtcattttcattgtgccattttcctatttattacgcaatttatgcatatattctgcgcgtcatcgctggttatattaacgtgcttagctctcttgattagttattattttcattgtattaagagtatttctcaaaaaatgatattagcctacagactatttattgtcttattataaagcttgcatgcaccgttacgaaagctcaacaaattataaagaaattaatctgaaaaatatgtaaatacaatattgtaatgctgatggggaaaaaagtaaagatattttttttgatttcttgatttggtgattacgatatattttgaaataaatgattccattcattagtaaagtatttatttactaataaataggaaccgaccattactaattatcgaacggcattaagtcccttacttgccagtacttcatttaaaagatcaagatcataaatactttccaagtcaatttcgctatcactccctaagttaatgtatcccaagtcgctcgcatcctccgcaatcttgttaagcgatgccgagagtgggtcgtaggtaaattctatccttgctagcgcatcttttagttgattcaatggataaactttaccagtaattttctttaagccttcattgaacgcgaccgttaattcgtcgatgttttcttcatcaagtttggtatcattagttttcgataatttttggtttatccaaagggtttcatctacatggacttcaagcaacttttttatgatctcaggattgtctctaagatagtcggttctaaccaaaatatttgctgttacaaatttaccatccggtggccagaggtctctttcatcgactaagatgaatccattgccttgttcttttaaaatcgctactactggttcaggtacccatgctccatcaatctctttttttaggaacaatgtgattatatctgcaggttttgccgccaccactgttacgtttccaccattttcaacagtgttaaaaccattgtcaatcaagtattttcgcaaagcaacatcttgcgtgttacctaattgaggggatgcaaatttctttcctcccaggtcattgacagtttcaatacccgaatcatttctaacaacaaatgaggctccaccactagatgcaccagagattattcgtaaaccttctcccccagatacaatgtatccattaatagcaggattagggcccacatatgctacgtcaatttgacccgcatatagtgcttcgatcgcagagggaccagccgtaaatacgtactccgataacgagatattacctaaattctcgtcattgtttagtgatttttgaaaatctccattttttaaaccgataatgggttgtgcatgatttagattcggaaaatatccaatttttaaagaatccgccttcgggtttttactttgatttgtagaagccgttgaactattatcctgacctagaaatgaggcccagttgaagtttaaattagaagaaagaattactacaataattatggcaaatgaaatactcagtttcgctattgaattcatactatttttttgtaaatgggatgtattagtaattagaaataggcaaaaaatgtatgttgcacgtagtttttaccaagatttagggaattcagcacagcaaagatgtactccgattatcattaaccctacaatcttactctataagggcccagatggaggattatatctaaaaaatcagtcaagcagccgggggggggggggggggaagagggggttgaaatcatttattttctatatcctgttcttgtcttaatccccatttttctctaactttatcatctagttttgcaaagattaccttatcaaatatcattcctagcgcgaagatagtaatcatagatgctattatctgatccatcagctgaaactcccttccgattaaaaggatatgtcctatacctatagatgcggccattagtatttccgctccgaccaaagcgtgccaagcaaatgaccacgcttgttttattcctattattaatgcaggagtggctgctggtatcatcatatatctaaataatgaaaagcctttagctcccatgtttcttgcagcctttacataaataggaggtatatttcttattccactatatgcagacatcatgactgaaaatactgaactcattataacaacaaatagtattccaatatcatttagaccaataagcaagatggcaaatggaacccacgcaacactgggaaaagactgtaatcctactgcaaaagaactcattgtttttccaaaaccagcaaatctaaccattgcaagtcctacacaaaccccaattactattgatgcagcaaatccaatcaagagcctgtaaagcgtgactcctatacttattaacaaagtgttatctaaaattagttcatagaacgattctaccaccattaagggagatggtagtgatactttgggccaaataccacttaaatacgctagttgccatatgccaataaacactgcaagaaataaaacagtattcgcaaattcatcaaatttaattttcttttttaagtgaatcttatttttctttgagcttttattgtccgaggatgtaaattctgattcttcgatagactgtaattcctctaaattaatttttgctttatccttatttttccgtttattttcatcgtcatcatcatcgagggccttatacaaagaaatcctgtttattattaggtctcccgtatatcaattttctttatcaggactttacaattctctcatcttaaatcctataaccgatttattatgaaaatcggctccttaattatacaaattgtcactggattcttggaaacgtcagcattgtttttaacaaaaactttcactttttcgtgttctgctattattaaaaaattattttgaacaaaaccggattcaatattgactgtcattattgaaatttcctaaagcctcaaaaaaagggactaaatcaaagtaacatgtagcataagtatcgagagcataaaccggtaacgattaaatcagcatgcatcttaagtttgaccgtatatcctatagctcatatctattcgtcctagatcaaactgtatacttttttctgatgcattctaagctattcttttctattatcaaaccttgctccctaaattcttcgaccgaggcttgaactgtccaataaggaagattggtaacataaatcaattagctttgataattaagatagttactcctaattaagtagtaaaaaaattttggggccggagtaccttcagttcatttcttaactggtgtaatgctaaagcttgccttaaagaggaaacacctctcctcttagaatcaatggataatacatcattatgttttatttcacacaattttactggaaattagtatttagatatgtaaactaaaagactgattactaatacaggtaggcgatcacttcttagaaaccagactaggttctttcaataattttatactgtttggatcgaatttcatccaaaatgtgatcctctgaatgaaatcttagatttgttggtcgactaccagtcaccattcgaaatacgcagattataaattgggatattttgatggatatgacggacagatggaccaatagtagtaattcaagaaaaatatgtaattgtcttatttagaaagaaacatttggatttgtcattggcacgagtaaatctaggccggttataatgaattaagactgtctaatgtaagaatatttttttttgccaagcacaatactatcgagattaactaattaatccccatgttctatctacataacttttaccttctattttagacaacgaatacaaattctcaaagatagatgatgataaaaggcatgatcttatcagtagatttattaatttcaacgatgttctggtccctaaattaatagggtaaccggattgagacttggtaaattatatgctaaatacaaagattatatcctgttcaataaaaacatcataatttcaggaatttttgcattctttgcgggggcaatatttactcaattttattcagaattaagttcagacagtctatcaaactcaatcgttaccctacttttcgaatattgtatttacattcctattttttcatatttgttctatctagataataaatcaagatattactatccggaaactggcaaaaaaaattatgataggattaagtcagatattaagaagctaattacagcgtttgcgatttccgaggcgatttattcagtttcaaaagtagttttacattatcaattgctaatacttggtttcatcgaaccatatcagtcttcaatgatagcttctatcattgcatggatgatttttctgttgatcattaatttaagtgtaaaagcagtccacctctttaaatcaaaatagatcagagattctgagaacaataagctgagaccatctacctctattctcgctaattctctgtaattttgacaaattacggtctatataaagtgacgattataaattagtcaattgaatttgtgacccaaatctatgctaatagttatcaatattaccccttctatatgagataatggcatgagaattggtgcggggatagtgttttttgatgacgctaaaggcttgaagagatgcctacactcaattgcatccgatgttgatctagttataactatagatgggaaatttaaggaatttgaagaggactatgacgtcagcattgatggctccagagagattgtagagtcgtttcctaacacgagatattattgttatcccaatataactgaaattgaaaaaaggaacaagtatctagagattgctgctcaactaggaattgattttttgattgtaatagattcagatgagtatgcagtaattgacaaaaagacacttaagagaaatttacatttcataaaggctgcgaaggaactgtctgaatcctgtaacgaatccattccagaagtctatggaataaagatgtttgatgagcaatatgaaaaacagaacagaattatagaaagatataacgaaaggttgctctacaaacccggatatcttcgatattcttcaatacatagtaatttaatagatattaacaacaggaataggaattttaccacggcaaaatacactgctgaaatcgacggcattacactatataatgatgaccgccttagaagttcaagttatattagtaaaagcttaaaatatcagacttatctgttcaattcagaaaggatcgaacgaaaaagaatagtgggatatgaaactctaagatataaataaataaactaatcttttctttcgcaaatgatttgtttctagatatgtaatcttatgtgtccaccggcacgagggaacaaggatttgtcttactaagatggggggcttttccggattttttaactcatgcattgaatctacctaaaattaattgtttatagtagaagactcgtgattttttttaacttaaacccaaaataatttggtttgttaagatataagatataatcataaattcatctaaacctaattcgcggtggtagctcacatccttttatagttaaattcatcctcatgatattggatatcatatttggagacaaagccgatccccctatttccattgctcttttccaacttcgtaggaacattaggatttagtatcgtattgcctttcttagtatttcttgtggttgattttggaggtaattctgtaatttatggaatactctcatccatatatccagcatttcagttgattggggcacccatattggggcgatggtctgacacttttggtcgaaagaaagttctcttaattagtactgctggtactttaattggttggatcatatttctatttgccttgtatatgccgaaatttgaactaattgatatagataatgctcttattggagcttttacactttccttgcccttggtagtgttatttgcggcccgtgctatagacggaataactggtggaaatatttctgttgccaatgcctatgttgcagacttgtcggacgacacgactagaagcaagaattttggaaagatggctatttcttctaacctgggattcatagttggtcccgctctggcaggtattctaggaggaaccatttatgggaatattttaccagtaccttgttgctatttttgtttcgtttatcgcacttactgcaatctggatattattaaaagaatcaaataagctctcaaaagaaatcccaccaattcaaaaaaatagcattcagagggcgtattcatatgaatgtaaagattgctttaatcctccaaatcctgaaaagctcaggttcaaagacattttcaaattaaaatatataccattatttatggtattgaactttttcatttttctagggtttaatattttttatacatcgtttccgattcacgcagtatcaagcctaaaatggaccattacagaaatgggtattttctatgctatcttaagtggactaatgatactggtacaaggtccaattctaaaaaaggcatctcaaatattttcagaaggtaatctgataattatcggaagctttgttttaggcgtaaattttatactatttttttcgaacagcatgatattaatttattttgctacgattctttttgcagttggcaatggattgatgtggccgtcattcatgtctattctttcaaaatttgccggaaatgttcaacagggtgcggtgcaaggagttgccagtagcatagggagtttggcaagtattattggattgatcataggtggattcctgtataatactataggtacccctacttttttggttgctgcatcaattatttttgtcgtctttgtgttgtcatttaaaattttgaagattcaaagaacattcaaagttaattagaatcataataaatggatttctaatgattcaaacacacattaaatattaaattcatattatcacaccaattacgatgtttttatagcataattttaggcgtaaagaatgactatatggatctaatttccgactcagtattctccatttaaaattgttttatcagtccaatggacttgattaacgctctactaataaatgaaaataaaagtgcgcaggggaaatgaattctaatgcacgctattcgtaggcgcactattttatttaattagaacctatgatatatgaagatatgaaaaattatgccaaacaactgtcgggtatcttttgctctgggcagacctttgctatagccagtgaaagtcataaacatggactattacccacttccttaaatcatttagatttcacaggaacatctggtttgctaacaccaattatacacttcgagtattttaacacatcaaacaacagtttggagaatgattcaaattgaagaatgatgagatgtggccgacacttccagttgctagttggaaggaaacttatgaaacgttacatatgttgacacagatcgtcggcaagattcgacttgcaacaaccccaatggaaaatcattggtggaattctactctatatgttaccccaaccgggttaaccacatcggtgatgtactacaatgatattccttttagatcgattttgattttaacaaacatttcttaagtattgagcaagcctttggatatattaagaaaatcccattagagtcacactccattgcagattattatagagatataatgtcaactcttcaatcaatgggaatatcattgagtatctggagtacaccagttgaagtagaaaatggaattccttttgaaaaagattatatccattcaacatacgacggcgaaacagccaataagttttggagaatacttacacagtcctctcgattattcacagaatttcgatcaaggtttttgggcaaggtaagccctgttcattttttttggggagcttttgatttggctgtaacacgtttttcaggacgaacggctcccgctcaccctggcgttcctaattgtcctcggcatgtaatggtagaagcatattcacacgaagttagtagttgtggactgtggccaggaggaggactgtttgaaggaccaatgtactattcatactcatatcctgaacctcaaggattcaaggatgcccacgtagagcctgaaggcgcttactatgaaaaaaacatgggagaatttattttgccatatgagactgttcgcacaagcaagtcaccagatcaagcgttgcttgcctttcttcagagtacttatgaagctgcagccagagaagcaaagtgggaacgtaacatgctggaaagacaataagagtttctcttgcttatccgaattgtagggtttagaatcctgattaatgctacgtttatttgttcatgtgcatgaaaaagttgatcttaaatatggcttatagccagagacataccattcctgttattgatattaaagaattgccacctgtaaacacttcctagttatgaaatatccaaacacagactcattctcattctagtaaattatttttcccataactcttaacaattgaggttacatcgtttttaaaccatctactacgtattgaactgcaattgctgcaatcagaactgcaaatatcctagtaatgatcagtgaaccacgtctacctagaatactatatatatttccggttagaaagaacacaacaaaagttattcccataacaattgcaattgataatattgttactatcaatccagacgtctgaaaagataatatcacagtagtaatggcgcctgggcccgccaataaaggaaatgctagtggaactacgcctgattcgtcggaaacagttccaccaaatctccatccaccatgggttaacaattctattgagactacaaaaagcaatatccctcctgcaatcataaagctagatattgtaatcccaaagattgataaaatttgcgtccctgcaactgcaaagatcattagtaatacacttgctgtaataactgttgtttttaatatcctatctcgttcgactttttgcatcttttgagtcatacttgcaaataaaggtatagttccaatcgggttgattactgcaaaaagggatatggtggcccttaaaagatcatctccaaaaatattcaaaaatgaaaataaattatgtgatgtaatagaacctatatcaaatatcatcatctatattggaattctatttgttattaagattcgccggcataaaaaatcatgatcatgcttggtacaactaaaataagatattactccgctggaaaattaagtttcctgagattgtgggattctaacacttagaaaataattacatagttcagagattattaggctgttattattagatctaacaaaatcttcacctaaaccaaccaggctattttggcttgaaggtcaagatggattgactggtggtctggttataggagtttctacaattaacatttccagtctgacaattcaagatgaaggatttgatgatattctattaccataagagggacagaaattatagatgggttcgacaaagaagataacaagtatattgtttaatagtttaaagtttattgataattctttatgaaaatgatggaggtattggtaatttattatacaaatccttacaggtccaatgacaactttgacataaactcgattgacgttatcaaagaggtatgaggattagatgaatatgatcctgtaagttcaagaagtttctacagattacaatgttgccaaaaagagtcttgtgataagacaaaaatatgtaattccataaactctcgcacaaaagtttgataaagattatccttatttttatgtttcttataagggtacgaagatatacaaaaaagaacaatatctttgaatttgttaatattatttagagtcaatcccatttaagtaaacaatatgataaatatggcaaatcaaaatgaatatgaaattagtttcttacatgaatcaaaaaatcagatattatgaacctatttttatatacattacgaaataaaaaatggtaaattatttttgatttagaaattatattgataaaattaatgataacatgtattcttttcaagttgcattcatatgagcattcattgaggaatcaaaacacttgtatgcactttactaattatctttctcgtattactaaatagtgattctatccaagaattcaaatgagatgatgttaatataaccaagtcataatttatttcattaacttcatttactatttcatctactatgctgcctgtcttaaatttatataataccttatttttacaaccagctcgctcaatattctttattttctctttcattgaatctattaagtcgccttgaatattttctacataattttgtttatctgctgcagaggaggtagagtttggtattgttgaagatgacgatgacgatgacgatgacggttgatcattagagatatttattgaagtttcttctaattgtactgcatcattaattatctgtaaaattgttatctctgcacctgtcaattttgataaataaatagcataattaattgccttgttagatttatcttttccgtcatgagttacaaggatttttctaaaggatggaagaacaaattcagaaatagactctgtcggatctggaagcaccgtcggatctggaaacatatatgttattattaaagtgaattatttaacaatatctaaaattgtttttttatatattaaaatatattaaaacagtcagcttcaattagaatttgaagaaaagtcaattggtaaataaggattctttttcttatgttactatagataaaaacacgtttagttgattcctgttctacttatttttgataagttatacttcacattttaatatgtctaattctataaagaatctaaaccaagcaagcaatcttatttgtactctacctgctttttaaccaatcatctatcttggaccacaattgttcatgtgctcgagaacttatacaagatccaatatgactggaatcaaagtctataaggaatttttccaaacttcctattgaattatttattactttactcgacttagaatcaaccagatcatgcctttttgctattaaatttaagaaaggttgtttatgcttgttatgactacatgttgtttatttctgggtatatctatctgtggggacccgtgttgatgccggtatacaaaatgcgattctaaatctgatagggcagattgaatttaaggattatgtcatgtttcatcgcactgtcgcaatctaccagtctaccgaacaaattttcaaagttcactatttttacaatggacatatccatatacttcaagagatatattttcctcttttgccatattaagaaggcttcaaatccactattccaggaatatcccacaggtcgatttcatttaccactttagcggctttctctgtttaccagccctcattcatacatttattataaaatacagtctacattagatagtagttgtcgattttctatggtaatcataataaatcagggatttcatatttgctctccatatcatatgaataaaatgttcctatattgacatcattgatctcatagttgggcggatggacggcaattgaatttagcttgacttcatacatacttcccatcttatacataaaacaaaattacttaatttcaggaatgcgaaatggatcgatgaagcaatcgacttggaattgcaggtttatccattccacattcctccattggatcgtcctgaattgtacacgtgtaggtacggtgtacaaaatatatcactattaccatttaattataatttgtggtgcatttatctaaacgccgcctatagtattacaataatatctcctaagggcatcctagatagtgttggtccactctattgcagaattaccgatcaaatgttgctaatctaagtaatagtattaaagtagtcattatctactcactttaacttctatcttaattttccttatttgttttaataatattttagaaagctcatgacatttaattaaactaactaactgttactattaccttacccatttacagctctatttgaatcgtagaaagttgatggtgtatcatcctttttacctctttttaattttttaaagatattggttaaccacttagctaaatccattcttgtcgatctaaattaatagtatagtacgctatttaaggaagatagctattgttttggtgttagtagagattaattgagatagtaatactagttgaaatagtcaagggtgatcttaaaagggagataacaactactattcaaatacatcataagatcttattcagggttgaattatgaatccgtagcctttttactgaatattgtatggtaataaaaacatgagtatcaaaaattacttcttcttttgtcttatgattgggggattaatatacctcttcccattattccttatctctaacggaatataggactgattatatttagcctattatatctcctatagagcttgaacactcgcaccagagggggaagagaagaagacaatgagcattttttatattctttgctttattatgtttctgcatatgtttttatttattgtgccgcttcgttttttaacatctgactttgtagtggttatggtatatgtgttgctgttaaggattctggtgtattgcacgctttcctaggtcaattcagataagcactaagaagagtttatcataatttaacccatgatcatattcatatgtattcctcgttattgcttttgtactattaaagattataccaaaagaatacgtcttattttacccgcttaccatctttgacttggtctcttttttctaaccatgacaagcaatgatagtcaagatcaaaaataaataagattttcttctgtataattaaacctgaatcttgagaaacgaaatccgcctcagccaaatcaaacagaacagaagtgaaggatgctaacgaaggccgcaaccatatgataagcttctagtttcatgaaaactgtagactagcaaactcattgtttcactagcagtatggacaaaagcatgagcttggaaacctaaatcctaatgttgatggcgtcaatagtagcagattgataactttattagttctctactgggtttacaatttctttaactatgattactcacgccctgaaaatgtcatagaaatatgtccctacaataaatctctcaaataattaataatatacacttactttcgaataatatcggatcatagtatcaaccttttaaaataataaactttgttataagcaatagagaaatttaatatatttgaatttgaaacaggtaactaaattaacaggattggaatctcacctatcaggtcacatcattttattatcataacactacaacttgaatattttgctatttcaagtgcagtatacctaagatccattccttgaagtctgctaccattccttttcctttccctactataatcaaatcaatatccttgttcttacaatatgttaatagtgatttctcaggacgcgtattttcatcgattaactctgttactacagataagccttctctttcagcttccttctttatatctaacaatctatgctccatttcttctaatcgttcctttatttgatgatgactcaatttatcagaatttaactttgaatcataaatatctggaatatcaaatactgtaattacatgaaattccgatttacaattctttgcgatagctatagcatggtctactatcttctttgattcattgattgtagaaattcctacaagtattcttctaaaattcatctctaacaatatatacaatccgttataaaaaaaatctcagataagtctcctacatttaagtttgtatatcatgatcgagcagtcttttattataaaatcttaaacgttgtatatattgtgaagcagtccaggtatttgaatatggatatttcaaactccttatttgtggaattaagttaatggtagttctttgattgattaatatcatttcaatctagcttaatcctgttataatatgatagtaaagataaagcgggcccggtgtgcttcaagacgatatcagtcctttgaggtagattcttttatcttatattaattctaaatatagttgccccggcgtaatattttcaactactaatactcgatttctttacattaaatttatcttcaacaaaaacgggttcatcaattccccagctccatttctttgtaggttttattcttatatatctagattgaggatgatccgtacgagacatgtgacccccttggatatcaacggctaaatcccgtaaatatactaaatttctgcgtattaaaccttgataacactttttgtaatttctcgcaaggatttccgtaaacctcaaatctatttatttgggaaatctccaagatctttggaagtattgtttttgatgcaattccatcattatgggcaagagcagcttcagaatttgtatacgtctcatgtaccacacacttggtttcgtcgtcattaaaataaaactgatattcaagggtatgtggctccttagcttctacaactttgcataattcctgtatcaatttcttatattcttgtagtttttcttggctaacgatatattctgctctaaagcgtatattttcagaatcatgcatctgatttattaccctgtttatcctttaaggatttttgtatctcatcttcattaaatagaagattaaggtttaggaatcacaatcattttaaccatgtcaaaaaaacataatatccgcctctaattctagagtcaatccccgttgaatgagacgttttacagctacccatgtggtagtggattttatatccttagagttcagcgtgtgctttaccaatagatccctatacatttattttagttgtaataattcttgttctaacaatgtcagacaaacttacgtttgccgttttagtgtctttaaattttttgtattacatactttgtttgtttacaagaatttccaatgcctatgttattattattattctcgtctatcgatgtattactagagactaacataatagaaccagccttggccaaccaagagtatccaactattggttccgaaagcttaactgatgaaatgttttttcttactctttatttactgagtcctaataaggtagtaaaattactacgggcctagtaaatttagtaatagatatattacgagtctaatttttcatttctctttatactttaaataatactgttaatagaatgcagaaggaaacaaatattcctgaatttctcgttccttttacagatgctgagaccgtgagcaggtaagcaattaattttttatagtaatatagagtttaagaatcaaaattaatgatcatatagcaaaatatctttggtttagtctcttatgatttgagctcatatatatcaaaagactgttctttttttacttgttataggcatgaatttattactttgaatactaaaactttcacagatgacggaagaaatttctagtatactggtgtgtatagacggttcaaaaatctcgataaaagccgctaggaaggcctttgacttggcaaaaaaatatacatcagaaatcactgcaatttatgtttccgttatacctgattccattagccgtgctccacagtatgcttgggatgaattgtacaagtataacattgaacagatgaacaattggctaaaggatattatcaatgaggcaaaagaacatgatattaatttcaaaatcaagataaagcaaacagatacatctattgttgaggagattattaaaattgcagagatagagaacattgatttgattgttataggcagtacaggaaagtcaaggttagaaagaatagtagtaggtagtgtcgcacaaggagtagtttctaatgcgaaatgctctgttttacttgttaggtaggaaaaatttaattatgaaagattattgaaatctgtattattttctatttttgatttctcttggcctgagacaaacatgtcagtcaattctgttgtagaattaagagagttagtattattctctaatgatgaagtagttgaatttgtatctgggaacatcattgtaccataagatgcattgacagaaataaaataacaagagtagagagtaatcaaaataaaagtgaaacctagaaaatatttgatattcataaaaaaattatccatttatacatcaatcttctatagtttttaaaagtataaaaatataaacaaataccaaactggtttatctacaataaagaattgaaccgactataatttagtagacaaactagtaacagggatgaatatactttaatttgtcaaattgatattatggatattacattgccaataaataaaaattcttctacttttgatgattcaaatatttagataatttcattaaaattccatataattagcaaaataattttttcattgaagtcatctaataaatttagactataatttgattttgtcagttactattattggcccttatcttgacaaatattaatcaaatgtattcgtaatgtgttctgttttattgctccaactttacgaaatggaattgttgttaatactaaaattagtaatactatctgctaatatactcattttcttccttgtttcaatagctggtttaatgtcattttgacttcacctgtggctataaagtcaagagctattttccatttgatattctttaatatttctctctctctatttctattcaaccaatatgaaaatttatcaaaataactaaattgtttttactctttacgccttactgctatccgattcactgaccttctcagcagttatttcttcggtaatttcttttgtttcagttacaggtttcttttttaccactacttcctctttaacatatggtattttagtgacttcaatttcttctctcttgacaggtatctctatctcttcattagatgtaactggattttgttcggtagatgcttgttcccctgtagctttccttctttcaattgatatttcttcatgcgttactggtacctctattgtttttgtttcagttattggctctttggttatggtggcagtggtttcctcaattcgttttgaaacatctactctttctcctattagaggtactgtagttgattcctcagtttctatatcatgggtggattgcaatggatcttccatcttatctatggtcgaatcttcttcttgtgaaagcgtttcatctgtgtcttctcctggatatttactgaaggcttcatcttcagaaacattaaatcgcagtacgcttccatcgtaactttctgccttttctttaggtataccgaatgctactacatcaattaatcctctttgagttatgacaaatccatctgttacttcttgaacctcaccaaaatcagcatcatttaatcctcttgcctctttctttatagtgtcattccaatcaatatcagaactcataaaacattcagtataacatgctataaatagatagatgcaaatagtactataaatggtaatattatagacacaaattttatataaaacttgatatacatgcttatcatcctcttattcatcaagattgtattagtctaaaagaagaatttatttaataaaatcaaattaccaactagaggatgattaataaatacgatttgccattattacttgttacacctttttcaatatttgatattttattattattgtgatttatatgctcaaactctacatagcttagtaaatgatgatctagtatgatatagattttttgttgaaaaatcaaatcttattagtaatcttactctaaattagaatgagacgtttaagaacctaaaagtactatttacaaattctcttttataatttatgcacattaggttcgtatgattgaaaatgtcttatatattatcatatattaaattccaatgaacaaattgcctccaaccttacgttcgtttagagtaaatataatatggacagtatttctgacggttagtttaatatttttaacaaatagcattcacggtttatttttatcctctattgtgtctggacagaaggaatccgtcactatcaatagcactgatttaatcaatcaaggagaatatctaaacaacattggaaactatactgaagccttagcatattttgacaaggttttagttatagagcctaataatacagaggcattacatggtaaaggtttgaccactgataattttggtaaccatacagatgctgttgatgtctatgataaaatcttggctattgatcctaataatatggatgctctaactagtaaaggtgtaattttgtataatacaggtaatcatacagaagccatgaaaaatttcgtaaaggtgttaaaattaaattttagcacgagtgaccgttcattgtttgataagggtgtgtcttactatggactaggaaactatcaagatgcaatagagtattttaaaaaatcactagaagttgatccagataataccctgacattaaataatctgggttttgctttggatatttctggtaaccatacagaagccatagaatactttgatcttgctacttcaataaatcctaataatgccaacgccttttacggtaaagctttggctgcagatcatctgggtaatcgaactcaggcacttgcactcatagataaggctctttctataaaccataacaataccttcgcattaacaggcaaggctgactatttgtataaactccgaaactttacaggtgccatattatatgctgataaggcactagatatagatcctgttaataccaacgccttgattgtaaaaggatttgcgctaggtgtttctggtaaccattcagaagtcatagaatactttgaacaagcccttaagaatgatccagaaaatatagatgcattgtatggcaaaagactcatcctaaatgaattgagtaaccatgcagaagtcaaggaataccttgagaatcaatctcaataaattgtaatccgtaagggttcacaaagataagatatgaataaagctccttttctattccgtatactataacctatagttgtacttgttatttaatttcttcatattgtgaaaatagatgaaattcatataacttaagacatcgctgtttcatataaagcgggcccggtgggtttagtaagagatataatacgagtccaaactttgaatttattataaattataaatcttctctacaatcaaagaatgttatgtagcaggacaacgattttagatatctaaaaatattccatgtgtgatggcgataaccattccatttgaaaacataaatcgttaggaatggtttttactatagataatttcttatctataatttttggataattccaagttaaaagtaaaacgacttaaatactcaaaatttatgaattcaataccttttctatatacaataactagtttcttattgggttcgtgttttatctctaaatcatcaatttgattatcttttgatatcatcacatcaggcctagaagcattttgaccatataacgaaagatattctctacctgaatttagatacagattatagtgagcactttcaaaggtaaaataggtatctggtgatttgtcaatgaattctttgagttttgttttcataattgctcaatatgattaccaaaatattaagtatttttaatctagtagaattatctatcaaccaagtatgttgacaagataaaaagtgacaatatagggagtagaaattaatatattctcaccttttatttattttgaatcctaataaagtagtaaaattacaaagataatcgattttcattaattatccaagtatcaaaatattgatatcgttgttctctgttataaatataatgaaattgtatctaaagttgatgatggtttttccggtactttttttgacaagttttagttacgtattgttaagtgatgttttttctcaaaccctaaacgatcaagatacaactcccaattcatggataagtgaacgagataacctaaatgtaacaatgagtctcactccaaaggttcctactgttgatcaaccaacagaacttcaatttgaaataagagagttgatttcaggaataccttataataatttgaccgcaaacgtaactatagtggattcagatggtagactctttaaatttgcacaacaacccgtttctgatggaatcttttctgtgatctacatattcccagatgatgctttaaataccattattgttcagatcaaaagaaattcaacagcgtttggtgctgctgcttttgaagtggatgtaccacacacaagcccaggcgatttttggtctcaattattccaaccacgtcccttctgatagggagagggcaccttacatctatctatatatcttcagtcggaaatgttttagttattaaattttggtatacaaaaaacatttgttactcatatacaggccataattgtattatatactgcattgtcctggttcagtcttgaattgtctaatttttttccatcgtttgtttcaggatattcgtcttttgtatgtgcattattaaaaagatgctcacatattgattgtaaaacgcctagttcataatatcctagaacacccccaggaaaaatttttctaacattttcaagtagaattattttagttaaatatttttagaaattattttatttatatttccattatctaaaatataatcaaaatgtcattatcaaaaaatagacgaaacttgatggtgctttctctaatcatgatttcaattatttgttctgtccttacttttcccgaattgaatattttacaacttggtcatttagtatcggcgcaaatagcaaattctaatcctatccaaattattagtacttccgcatatacagatgattttggtaatttccatataataggcgaggtaaataatacttcaactcaaccacaaaacaacattgtaattacagccatactttctgatacaaataacaatactgtagttggaaaccactcttctttttcctctatcgacactttaagaacaggtgagttatctccatttgatatagtgatacaggaccctcaacaaatcttgggaaagtttaactttatggaattcattaccacttctcatcctgctacagaagaaaaacctgctaatcttgtactaaatggaagcagttcatttttagataatgctggaaatcctcatatcacaggtagtattattaatcaaggtcaaagtccagaacagttcataaaccttgtttcaacgttttatgacaattctagtttaggagttattggaactcagacctttggcctaaatgttggaaatcttgctcataaccaaatagcaccatttgatatcacaattacagacaacaagaccaagtcacaaggtgcattttattctctaaatgtagagtctaatcaaagttcgatgagtgttccctttaatacaaagacatcatttgcttcaactgggggattcgctactggtgggggagacgctacgaccaatactttctctgtaaataatcaatccccattctcaattaacaataataatgatgataacgacgattcccgatcagatgacgatgatgacaaagacgatgatgaaaatgatggagacaatcaacgcggagaaaggaaaacagatgatgagggcaatccatggtttgatgatgaaaattgtagtgaagagtcaggctcttctggtggtagttcttctgaatgtgaagaagcagaaagagaagaggaaagcgaagcagaggacgaagattctttagaaaaggaccaaggaccggcctccaactctgactctgattcttccggtattagcactgatgatagtaatgatgatatcgaagagagcaacgaagatgaggaaacagaaaacaattaagacgaaggagtaagaggaaggtaacagaagcgacaataaataattcttttcatgaaatgtatacgactagagtattttagtaacttgtgtgagtggtataaaactagagtgtcgttgaatatcattgtaacatagtgaaaatgcctcatatatttccagtgaatgtgcttgatattcagacttggccgattaaaataatatcatagtcctattgatgcagattcattttgtggattactcacatgatttcactagttgaatgattattttcctcagaaaatactgtaaaagttttgatcctctgttcaaactccaagtgaatgataaaaaagtttagcaggtccattgtgtttataatgttagtgaccgatcactgattccatattttacccatagccctgttcattagcggacatcatgatagtatttaaataccatccaatccaaaagttctagatatttgtaactgatttattagcatatgtcggtatctttcaataatttataatggactttctaactttatgaattttatgatacaaaatctaaaaactgtaattttatttatctgttttttgggtaaattaaaattcttgcattgcgttagttattataactccaaaaccaaagtgactcatggtttctacaagaaactcaatctttattacaggattatttcttttctctgcgctactttttttacagtccgtaagtgggagttcaattgcatccgcccaaatagataccaacaataatagcactactgttaataataatcaatcaacctttgttgcagaagatctatttaatacgaaaactatgaccttgggaagtaacgtgaagcatcttgttatactagttccaaatgaaggtcaccatgctgaaggcgaggacaatgaagcacgatttctagatcagcactttgtcccagagaacgcagtcataaacacaggaaccactgtatcgtggtttaatggcgatgtaggtcatgaacgaactattaacgttctaaacacagatggaacttcattatttaacacaggagaaattcaagatagtcaaatgtccgcttcacacacttttaccaatcctggaacttacaactatgaggcagaaggtgacccaggtgtaactatggaaggaacaattacgattgtcgataacagttcctcaacaaccactccaagtttgggtaatttcgatactgtgggtgtattcatggctcctacacaggatatagatacttacctttcagagattacaaatgcaggaattacagtagaaagtacacatgattttgaagatttgaggggtggacaaaaaggtactggagatatacaaaccttgatcatatggtctacttcaggcaaggatttaaccgaaacaatctcagcattaagtgagatttctttagacttgccatatagttaagactaccacaattttttctttgatgaaaattattcactagtactcacaaattagactatgctgctagttcttatttggcaggaacttatcagaccatagtattttatattctttgtaccttaataatagatgcatcatttaggctttgatgtttatatccaggattgtctgaaaaaggcttcccggatgtaattttgagtttttcttgcaggactatctctttctttgggatttctttattgactttaattttttcttttaagcaagtgtgttaataaaaagttggttgaaaaaacatgttttactaattataattgcaattactgtttatttggtgtggacatttgccacctacttttttgaaggtcgaataaacctactacatagagatgatccacttggtcgatttgaatactctgttattgtgaacatgatcataggaactgtgatagcaatattggctatcaaaccatctattatagcgtcaggtcaattgtcgttgagtcagataggatttagatcggtaaaacatacggttgtgctagtaacagttgcaggaacgatagggtttctgttatttgttattcaaggtcctacatcattaaatactattgtaatttcaaatgtgttttctcaaacattacctacatcaatagcagaggtagtagtatgctgggcggtcataggcgctagcatggaatcattttcaaagaacaagtttggaaaaaaactttcagttatagtaggcatcatcatatcaacagtgctctttggtgtttatcactttgctcatagtgagcctttcaatcaggtccatatggttatgatattaatgttacctggactactgacaagcatcgtttatttcgttggacgcaatatttatgctactatagttttccataatttccaggctttatttggggtaatggcttctgttgaaatagaacgcatgttagaactacagtttcctgttataatgcttgcagtggcctcagttttggtattgataattatggatagattcatactccgcaaaaaaatcagaagcatttttggatagaaaatggataggtagacaaaaaaaagagaagtttcctcttcctattcaaagtcgcctttcttattgttattactactacgccattttccttctctactctgcttcatcccccaagaggcccaagtggccgccattatagcgataaatcctaataagataacaacaactatggcaacgttctgataaatagtgtaattttctgcatagaaatataaccagataataatgattattatagaagcgaaaaaagcgatgatagatgcggtgaccctccagcccatgccgtcagagattgaattggacatctttactttcactcacttgtattttcaaaaattaataaggttttcatattactggatcacgggtttttgagtgtgaaaacagggtgttgagtttgcaatgcaaggaatattggaaataaatgctatctaataaagacatatggtctaatgagtttatacctctagatatttcgggaaattgctataccgacttactaaattgagaaacttatattatcgcatctcaaatactaacggaataatatctaacattctctagtaaagtcaaacttaaatggcattatcgattttgacgaccggtgggtttagtaagagatataatacgagtccaaatttcaaactaagacaaatctaactaaattattatcatacttataatggctaattagtaagagtagcataactactacacgacaacattagttctctgttctgagcctgctttatattagatcctttaagtatcatgattaattttctttagatgctattctttttgataaaattatgagaattgcctatgtacaagaagaaatcgatataggaattgaaagcgaaggtaatactgatatgcataatagcgaaggatctgaaccttctgtcagcgaagatacttccgaatcaatttcgtcctcatcttcatcttcatcttcatcttcatcttcatgtatagatactattacaggattaggtagctatgtggatagcattattttctctatcatagtcgtatccgttgctgtagcaacttattttattatgagattcttcattaatagatatgcggattcattaaaccttgatagaaggcaattagccggagtgaattccataacaaaaatgacccttatcgtgataacgataatcatattaatattccgtttttcttctttaagcggtgtagcagcaggagcaattagtgtagctgcaggaactattatcggtttttcatcaagaaacacaatcagtaatgctatagcaggtattttgttattgtctgctcgtccattcaaactaggcgataggagtagaacaacagaagatgaaagctcttattttactcgatctctgaagtttattcaattgcagcccatgcttataaatataaagaatagttattgtgattattgtaatttatgctaataagtgagataataacaagacttttgataatttcatagtgaaaggttttaaccatatttagcataaatattagattcgttcgaccatgtaattactaatgttatgttatttacctgtcttcagatagcaaatagcacttaccatatggaaatctaattctcgtattgaagttaattaaatctgtctaaatccgttcatgtttctgaggatggttattatatcgaaattcgtacgataaattttataaatttgggtattattacctagctacacaaactaatgcaaacagtaatcctattagcgggtggaatattttggatccttacttatatttttataatttcaaaaggttataaagataaaacctatggtatgccactctttgccttatgtgctaatatatcatgggagttcatttattcattcgtcttaccacattctcctcctcaactgtatatcaattatctctggtttgtattagatgtagtaatagtttttcagttcttcaaatactataagaatgagtttcctaacattcaatcattaaagctatatgctgttttcctagtcgctttatcttctgcttttagtataatattgttagggggcacctttcttggtgatgatgatggcgtatatgctgcctttggacaaaacttactaatgtctatgctatttgtagtcatgttctttaaacgaggaaatacgctgaggggacaatctatttttatagctgtatttaaaatgttagggacagccttaacaagtattcatttttatctgtttgaacctgtttcccaaagttcatttgtgttaccgtttttgtacgtttccattttcttatttgacctattctagactgtcttgattgtgaagcaatataagaaggacaataaatcgctatttgctgcatgactatcggcctgaagatgaacatatatcaaacgggcccggtgggtttagtaatagatatattacatgccctatttgcaggattgaatagacaaatgaaatcaatgatatatgcttcatttgttgagcaatattttatacgttatatactgcttctctgactatctactttgcatatctcttcattaaccatcctattagaattatatctagcgaaatacatttgccaaagtcatgattcgaaaagaattgacttgtttttgatactaatttgtaatactacctatctacaaatgcctgtacttgttcttcgtgaatcggtaaattagcttcatcgaccttaatggaagtagtgggacatactgtcacacaggccatacaccaaatacacgctttttctctaatgggatctggtttgtcagtataatcttttctgccctctctattttggtcatctcctgttccttcacttaccgcatttaccatttctattgctggaacatcctgttctgacctgtaccattgatagacttgaacaggacaagcctcgatacatgctccgtcagaaatacatgaatcccagtctaccgctacaaatgttccatggatgcccaaggggacgtattcttctcctcttgttttgtatgcatcttgaacttccttattggtagaggattctgcatctgctcttcctggtccccaaaccaaatgagtataatccccatctgaagttgaatgttttcctactactttgtgattttttggaaactctggatctattgtcatatctttatgttgttaacaaagttgataagagttaacccatataagcacataccagataaggtttgtcaaattaacgtccgatattttggttgacaggagtggaaaaaatcgtcagataataaaataataaaagaatacaatgacaaaaggcaccaccaaaatttcttaatatttgaaaaatggtgctaaagatgatgagaatgagaatatagggagcaccagatctgagaacgaccataagcagtttaattagatgagatctgcatctagagaacaccgaatagaaaattactagatacgtatatatcaaatattaatggaaagaaggttaacaaaatttaacattttctaccgataatcccgagatacgtcctgataaggggattcatttgtctcgacaaatgacaaaatgaattattcttaaatataaacaagacaatactatatgatgaacgttaatactacagacgaacaatcgtcgcccttatccaagttaactgtggaaaaacggagcggaaattctgaaaagttcgatgaggaaaaacttgtaagagggattagtagagctggtacaccatttttgattgctaaagatatttctaaatctcttatgaataaattggcggaaaaccctcccattgataatttcatttactctagtaaaattagagaatatgttacagaggaactaaagcaaagaaatcaaggtacaatagctgaatcatattcaggctatagtaaaaatgatgtaacctcgattaaggaagaacaacttaaaaataataaatacgattcaaaagtttcacaaacaacaaatactcaatcaaaacagtttacaaaagacaaggataacacttctggaagaggaacaaaaacaggacttcaataaggattaattattccttcctacaagaaaaacccttcttttgcttgcttacctgtttatgtgacattcgcttgtttaccagtggatgataattcctttttataggatttctttaaccagattggtgtaataattgttgtaaccgctaccatgatgattatagaagtataaatatctgtagaaagcactccagatgttactcctacaccagcgactataagtcctacttcacctcttgataccattcctattccaactctcattgattttgttttatcttttttgagaaataacatagatggtaatccacatcctaataactttgtagaaaccgctattgctatgattatccctgcaataattaatacatccatattaacacctctcaaatccacttgagcacctattattgcaaaaaataatggtgcaaaaataaactgcaatttgtgagcatattcttcaagttgctttattagcttcgtactagcaacagccattcctgcagcaaatgcgcccacaataggagaaagaccgacataggctgcgacacccgcaataccaaagaaaattgcagttgtgattccttcaatactgcctcttgacctccataatttctctctatgtaatatccttggaatcagaaaaatagcgccaatcaatagcacagcaaatagtcctagaatttttagtatcagtagtgctacgtccagtatttggggcgaagtatcccctgattgcaccattgtaacaactaccgataatattgcaatggcaagaatatcgtctactatagccgcacccaggataagcctagcttccttagattgcatctttccgagttcggtaaggacttgaattgagattgctatacttgttgctgttaatgctgtagcaataagtagtatttcaaaagaatcaagtccatacatggaaagaaccaaaaaacctactgtaaagggtacaatgactcccaaagcaccaatggtaaacgatgcggcgcctcccctaagaaactctcttggtgtaatttccaatcctgcgataaagaggataacaatagctgcgagttcccctatatgcttgacagtttcatcaagaacgactagtggttgaccgtcaaataatggtaagccacccaaagcataaggaccaacgataataccggctaataattctcctaatactacgggttgttttatcctttgaaataactctgcaaatattttagcactaaataatagaatagaaagagatattataatatgaataaaaactgattcagcagccataatctatactgtctattcttgaaattgaatttaatataatagtataaccatgcaactaattatacggttaaacgagttttattatacttctatatgtgtaattcaaaacagacttttagggatctcatctaaatcataataataacccaggatgttatcaacagtatgttctaactgagtattgctgtttattaaaacaaatattgttttgtcctcttcaaatatttttaatattcgtatcttttcatactccatgacaatccattttaacttacctaagaggttatcgtctttttgtatctgttcttcttgtcctatagcagagacttgtgatttttctacatcgattatttgatttgaacctaagatatggactaaagaatcgacatattttttatctatgctagcatttttggctatatacaattccttcatatcaggcgaattcattgaatttattgaaaaaacagctaaaatatcatcgtctacttctaccaggtgtcttattttatcatacttaatacctctatttttgtcatctgggccgtctttcacactatctctatttcacatagagaaatatatcattttaatatgattgattgaattacgttttaactcttccagatcagcatcttagaaaccagttgcttaaagtcaactctttttcaacatttgttattatgctaataatgtaggaatcagtcaaaactactacctctatacttaagaatcacttttaacttcttcaaatagacgccaaggatgcataaaaaatattctatcggtatattattaattgcgatttacatagtctttctttttacaatcccgcccttagtgtttgaaaaaagtgttactcctattttagctggcatcacagtaatcatgattgcaatctatgttttgcttggactagatattattcatagaacggttattgcaatgtttggagctattttatctatcatattggctatcgtgctaggctctatggtagctgaagatagtctacattttgtaatagagtctgttgactttaacactattggtctattacttggaatgatgataatggtggcaatcttgggagaaacgggtgtatttcaccaagttggaataaaacttggcaagattagcaaaggtaatgtttggatattgatgttgctactatgcacttttacatctgttgcatcaatgtttgtcgataatgttactactatattgctcatggttccagttacactttcaattactcgaacactaggaattcatcctattccattcataatggctcaggtcctagtttcaaatattggaggagctgccacattaatcggtgatcctccaaatatcttaattggttctgccgcaagtatagattttaactcttttttgatatacatgggaccgacagtcgcagtagtttttggattttctctgctattaatcaaattgtttttcaaaaaagaactacagagtgagcagaatctagaacaaaaagaagatattcaagagctgatgcacagagatgaaaatgcgatattgattcaccataagggattactgataaaatccttaattgtattagtgggagttattattttattttccttgcaaactattactcatttagaagtatccatcattgcaattggaggagctgcagtattgcttattataagcagagtctctttagaaaaaatcttgcatgaagtcgattgggctactctattattctttgtaggtttatttgttatcgtaggagttgctgaacatgctgggctgataacaatacttgcaaaattatcaattgatataacaggtggagatccatggcttacctttgttatggttatttggttggcaggtattgcaagtgcctttgtagataacataccatttacaactacaatgatacctttggttcattcactaaatgtagaccctacaatcgcagcttcatttggcgttgatagtggatatcaatttagtcccttatggtgggctttagccttgggtgctgatttgggtggtaacgggacactgatcggttcaagtgcaggtgtagtggctgcaggactaagtgaaaagtttggacatcaaatatcatttacaagatggatacgaattggttttcccttcatgctcataactttagcaatcgggaccgtagttctctatggatttcttttgttaatacattagggcgagaattattttaattctttattttcaatatggatgtgaatatctacacaataaattatttcaaattctaattatgtttaacaataaactaaacatccaaggtaaggagcaaataattaattgtattattaactaggagtgtcatggaacgtgtacttatttgaataatctaataattattttagtccgtatgggtatgttaaaactaatatactcaggctctttggattcataagaagaaaagtgataggttgaagataatatctctaagaataatgctttcataaaacaaattttttaatattatcaaaccaagcaatggttaatactagaatataaattcaaggaaataaacagttgatggcttaaattgacttcggaatgaaattagttacggatcatgattaacatattcagttattagatctttattagatcatgtagctgaagtctaaagtgcaataatgatagaaaatatcatagtaacctatgatggcacagaagtttcggataagtctcttgaaatagcatgtgaaatagctggaccatgtggtacttgtatcacattcttacatgttatggagcatatcgaagacccagacaccaagatattcaaaaacaatagagatcttattgaaaaagcaaaattaatgaatttaaagccgtcaatggaaaatacatggtataaacgagcacaagaaaaaattaagaagttaagtgaacaaagcattcaatctgacagcaaatgcttaaccggggatatcgctgaaaattattggaatacgctcatgctaagaaagttgacatgattgttatgggcagcagtaacagactaaagggtatttcaataataaaagcattaggaagtgttactcgaaaggtttcggaattggcagactgtcctgtacttataattcattaaagagttcatctatttattaaattcattagtatgcattgtagatttaaaaatagattatctattgattagagttgaggatacaaagataatggagtaaatattttgatattcttatataaaacgagtggtcattttgtatttaatttattttgatttctttcatcaataaattatactgtaattttgtcttagggttttatttagtgcggtgtgattgtaattgttgttttttcttcgatatttttataaatagataaattgttgtaattgtttcaaatctacctactatcatattaatgataagaactaactttgatatgggatccatctctaaggaagttatgcctgaagataatcccgttgtagtcaatgcagaaacagaatcaaaaagtgaatccaagaaattttccttatccacattagaaataattattccagtaataacagatatgccgataaataaaactatgacaaatactgcttcatcaaatattttttcttcttctttaatttttgtggctttgactccattgtgaggtaccttttgtcataaggtgatgctttggcagatatggatccaccactaatatccttgtcccgtagtttatctaataaaacactgtttcaatcaattaataagaaaacaaaatgaaatagtggacatgactagtttggaatgacccctaaattacgatttaatgaaaaatttaattatcatagtaaaagatgtttaatcatgatgagatttatgaattttattttattgcttattattatactaaatgtattagtctttagtgtttactttgatactgaaaacttatttgcggaattaggttaatggtaattctttgattgattaacatcaatccaatatatcttatttgtgttacaataaaatagtaaagataaagcggtcacggtaggtttttaatctttagtagattgtatctatttagtaaataacgcagaaaagaaaaataagaaaatagaaacaggaatgcgctttgatacatcacttgaacagaattaaattaaaataaaacataatcagttcacattgattttaaaaagtgtgtatcgtacgaacctagagtttttaatccaaataccggaacgagtaaaaaatcattgaaactcttgactcattatttatatcaaattttaaaaaactattttgttgtttatactcatgatcagttcaattaaaaatagatcttgtacttgatatatattacatcttttaagtatcgtgtaccagtatctttagatggtatttttctttgagcttgatacgattgccccaacttcctgggcacaggaggaaattgatattggaatcgagagtgatggaggcagtaatactgaagtaattagtagtgatggaactgaacacacatcggggtcggctggagacgaaacaacggaatcgatatcctcttcctcaccctcaccgtcaccttctcaaaccgtagatgcacttacagggtggggtagttatgttgatagtattgttttttccattatagtcatctctgctgctgtagctgcttattttatcattaggtttttcataaacaagtccgctgattctttaaatcttgacagaagacaattatcagggattaattcaattactaaaatggttctcattgtaataacggttatcctcatcatatttcatttttcttcactaagcggtgtggcagcaggagcaattagtgtagcagctggaacaattattggtttctcttcaagaaatactataagtaatgctattgcgggcatattacttttgtcagctcgtccttttaaattgggggataggataagaactacggaggacgaaagcctcataggagatgttgtggaaatttcattgctatacacaaaaattaagacgataagaaatgagcttgtagccattccaaatcaaacactattacaaagacaaatagtaaattatagcggactggatgtcctttcgattacggtaaatgtatcattgacttataattacaacagaaagtcaatcgaaaaaatattgatagactgtgctaaatacactgaaggaatagtaacgtctgataattttcctaatgaggtagcaaagaattctagatcttttaacactgcagataattttgtaacagatccgtttgttttacttgtaaagtttggagattacggtgcagtatatgatctcagagcatttacaaataaaccaagggagtttctaaaaattgcttctgagattagaaagcgaatatatgattcattccagaaggatggtatggacttaaccgtcccacaagcacaaatatctttacaaactgatatagaccatgacaacaaattcacagacaataacttaaacaaccttcgttaggttgaaaaggaagaagaaaacaaaatgttacagaataaaaatttaaagtatgattcattgaatgattatatttcaagtgacgaaatagaaactaaaaaaaggaatacaaaaatattatttacaaacgtggtgcagaaatactttcagtaacgcgaatactgagaaacagaatagaaaaccctaatgtctcaaattcagaatttcctgttaaaatggtgaagcaaataattccggaaggccagcaaaaagatttgcaaagtataaaggaattcaaaacaaatagtgtgtataattataaatcatgattgtatatctgaattgtacttctgttgacaagaataataatttgatatgttttttgttccatttatcatatggtatattatataaattacaacatcaaacaattattcacgtttattgctctgaatcagctcaatacttgtatttttttaaaatgtagtctgcttaataagaaaacaacatctctttaaaacaatattgcaaaatgtttattgcaaaggtaacggtaataaattataatgatttatcttaaaaattgaatttatacaggaaaaaatgaaaatatagagttttattacttttcgagtattgtttttataggaaaaacatgagaaggaataatgacgataacaaaagtagccatatttctgtattgggattgattctaggacctataatctttatcacttttatgtttcttcccatagaaggtcttacttttgaggcaaaagttgtgttggcattaaccttatggatgagtacctggtggataactgaagctgtcccaatttatgttactgcattgttacctctcatactatttccaatttttaacgttatgtcgtttgagaaaatgtcaaacgcctatgcagatagtattatatttttatttctaggaggatttatcttagcaaaagccatagaaaatgtaaatcttcacaaacgctttgcaatgaatgtattaaaaatttttggcactaatccgcgatatataataggggcgtttatggttatagccgcaattctaagtggttggataagtaatactgctactactatgttaatgttgccgatagctttagccataattactcaacttaagaataaaaatgataaacataataaatttggaacctatttgttgctttcaatggcatactctgcaagtataggtggtatggccacattgataggcactcctcctaatgcgatatttgcttcattgtctgaatcactattgagcatagaagtgagttttggaaaatggatgttaatagggtttccaacaagtttgataattttaggactattatggatatacgtaataaaaataggaaaaatcagtaactccccaatagttgaaggaaaaaatacaattttaaaaaacttgtctgagcttggcaaaatgagtacagatgaaaaaattgtcgcatgcatatttatcggaactgcaatagcttggataacgagaggtttaatatggaaaaatctattccctatggtggatgatgcctcaatagcactaatctccgcgacgctattttttatcatcccttcgttttctaaaaagctcgtcccatatagatacacagaaatataaagaagaaaattatgacaagaaaaatcctgcttcaaataaaactcgaccaggaaatacttttaacagaagactattaaattggaaaaccgctgttaccataccgtggggtattttattgctaataggtggaggtttagctcttgcaaatggatttactgaaactagactagatgaatacattgcaaaaaacctgttatttctaggtggaatgccttatataataataatactgataatgcttgtaatcacagtttttgcaggagaaataataagtaatacagctacagctgcattattgttacctatatctgcatctttggcaactagtctttcaattgatcctttattattaatggttcctataacggtagctacaagtattggattcataatgcctgttgccactccgccaaatgctatagtgttttcaagtgaatttgtaacaactcgaaaaatggccagagtaggactaccactcgatttaattgggattgtaggtgttacagtaatgacagttattttagtaccatggatattttgactataaagtacatatacttttgtttgagaacaaaacttctgctactcctcagcttaataatatatttaaaaaagttaagtgatccgctggttaatatcgatctttagcgaaaggttctgtactcagaaatgggaaaatatttaatttgcttccagtaatataataaagtctgtattgttactaactatatctctaatttcataaaaatgcgtaatatgatggatggtagaatcacacatacgggctgtatcccaccgcaatacagttaatggaggagggattcagattcgcctcttattacactcttattacacatagtgtattgacagcagactgagaatgtatgttgtcaaaaagcctggcaaataaatagttgtaataatgaagatagaaataaacgttaacacaatcagagaaatgatagaagataaaagttatagcaatttaatgcttagttgataaacttattaagagtaaatatgcaattttaactacctatgtatgtcattcaaatatcatagcgtgtatttatcctagggaaatagtaatacggttacagtcatgcgatgagtgtttattagtgttttattgtaacaattactgtaatgattgacgtctattccatataccttctattctattatttcaataacgttactgtagcagtaagaacaactttcatgtaatgttagatacgaaagcatgaatatggtcgtctattccatagccctgataccttattacttctcaaataggacaataatctaggttggtagctttcacaattgtagatttacatcttatgtagatatatgttttcaaagaacctgttcagcatatgcccttgcagcataatggtcaaagtcctctacgctcataaggaaactaaatctttctacagaaccaggctcatacactgtaaagggacctgtaacgaacctactagtttctctcattgtgatattatctgcatcatacaaggtaacatcaacttttaagttcatcacattttcagtagagttgttaattacagttccagttacagaagttaaccctgttgcactatctgttaaagacatatttgataaagataacgcgatgacatcagattgagaattagttacaacttcaccggtttggcccatagttaaagaagaggatatcgaaaggaagagggttgaaaatgataaagtagtaagtaaaatgataattccagatcttttagagtacatccgagacatatgttagatagcaagcgtaggttattaaggttcatacccttcggtatattatgaactgacgtttatcaggataatctgtacattcttttaacttagaacgaataaatttgtcgtagtcaatagtaaggaatactgatgatgagcctcttctatcaaacaaaccttctttgtagcctttattacccgttgtgttataccatttagtttctactatcacttcaaaagctcaagtatatcgcataagcatgtaatcaaaatctctgaggctaataaattaggagtgcatattttttctatcattaaaccccaacgtaaatgcttacacaatttatatgatgaaagggactattctgtttctgattggttttattgaatataagacataatatttaaaattagccgcatatttgaggaacatgaatttaagattgaagcttgtattggtaaaataacatgaaatagtggacatattaatttatgcttccatctttaattcattgattatagttttataaactactctactcaaccaaatataactagtacacataaaaagggattgcttgacagtcgacggtcaatattaaatagagaaacagattatatgatcgttactaccgtgtgaaagatatctcaaaaagctgagtatattgaggatatttcggcttcaaatcctatatgcttatagtaataagccacgattttaaaataatataactacagggttttaataataacccgtttggtaccctcgaagagataacaaagcttctaactactactgccgtataaatatcatgttagtcagacgagattatggttacaaataatgaaataactactacaaatagacctaatataataaattcagaagagatagataaaggactacaaagaaaaatcatgccagtcagcaggaatattgacttaggatctgaaacaggtatttttccatttaacaagatattggtcacttatgatgacagtgagaaatccgatagggctataaaatatgcaatctatctatccaatatttcaagagctgaaattgtaattcttcaagttttgggaaatatagacaaattagagaactcatccatagatgtttcaaataggaagaaggaggacgccaaagcaaaatcaaccctctctaatttaactaatgaatcagaaattaaagatcaaaattactcaatccatatagagggagaaattgtccagtccatggaagacaagatcaaggaaattgaaagcactggttttaaaaataaagtatcctttaagatacgatcaggattcgtagtggatgaaataacaaaggaaacaatagaatcaaaatatgacctgcttattatatcatcttctcatatggattcctggataaaatcgttattcagcgaaacaagaaagataatcagtaatgtggatcttccagttttgttgttacattaatgatctgatactcaaaattacaaatttaagaagagaaaaatgtatttgaatctttcactagcttatccacatcctgatctgggtggaaaatgacaactacaaatccaacaagttatcggtacttgcgttaattgacaaataccttttgctcgaaatttggaatattcttttagtctttataatagtcaagtgagccttagtatatttctgcgcttcgtcaatatggatttgaaaattagctcatcggctttgatcgaattagagggacatactatcacacagaccatgcaccacatacaggcactttctctgattggatcaggtttatcggtataatcttttcgacctcaaattaactatctaaatttatcgaatattattcattattaagattaaaatttgagaacctgatccattatgtgaagaagatgattgctttaaaaacttatttatatcaaccgataataaacaaattttatgagatcttcaatcttgccacattacttttataaaattttagttttgtgttttacatttgttctggttatctcgtttcaggctccttactattcgtattcttctatagacagttcaaaccttgacaattcatcgatgcaaatatcggaaaattcagataacaattccgcttcattgaattcgaattcattagttaattctgcggcaaacacaacggatactttaacccctgattccggctcaataaatctggatctccctgattccatcttggatttgttaggatctgcaccacctctggctgatcaacagaatatcactgaaaatctaacaaatacgaataacaccatggtcatgacaaccaatgagactcaattatccggaactgaaaacataacggtgatagccaatttctcctccaaacctctgggactggagacagattatgcgattagcgaaaagccaattattttagttgataatacaactttaaactatgaatatatgaatgacccaagcgatgaaattacaatttcagacatgctattatcattgcgggctagcattaaaatggacaacattaccacttcacttccattacaactaagagtattctcaaacccaaccaatgtgaccgataatgctgacggttcgaggacttatattaatgacccaacaccaattgaaaatttggaaataggaggtgtaatattttcagaaacaagaaccattgcgacagtttactcaaacggtacgggtacttttaattccaccaatataggctagttctgttataattttattcggtagatggaactgaatacattcgatttttttttgtgacccagagtgaattatctaaaataattgctagtgagttacaaaatatgtcaaataaatttaagcctagattatcagaccttggaagaaaacaccgattaatattttcatctgctttcataaccaatgtagagaaaatttatcaaatacttcagacttgatcataacattcttgtactaaaatttgttcttgcccttaaaacaaataatgatgcataaaatctcctgtatattgcctttagtaatattttcggattgtttttttaactttgttcgaatcttagatcttaatgctaaattattttcagcaaaagttaacaagatcagggattaaatagtatgttgtctaaattatactaccttatctggacgacgcactgatcaacaatctgtgataatccaaataaggtgtaataaggctacaatcatgtcataagtttacctgcagtagtaaaacaaaaacatgagaaggtctgaggcattctatgaaatagagatgccaagttcatcatcataagaaacaagacctttattgaaaccttattgcaatttgaataaattgtctttgagtaatgattcgcagatagatcggaaatttgattttctaaacgaatctggaaaatcgccgttacagaagttctctataagaattaaatgggaacatacaacggaatattaattcagtcggcttcgaattcataaggtatatgaaactgttaattaattaagttttattttaagaaatcaattaattcgtttcttcatacaatactaaagtcattactggtccaatggacttcaggacgctatcagttccctaaagtaaattctgttagtttaattgattgatttaatgtgtttagagaaattaacatagacccaataaaccagctaagtttacaaatttgggacttatttggctctaaatcacttttacaaagttgtttctttcgggaattagttcatcatcaattttaacagtctatggtcatgcaagtcctattaattatgtgccaaaaccaaatgacatagttgattcagctgaggctttaccagatagagtgagcattacatttacagaagatcctgaaccaagggccagtagtcttaaagtcataaattctaataatgaaagaatagataataatgacttggatgtttctgaattagacaaatcagtttcaatcagtctcgatatatcaaaagttctccatggaatttataccgccgactggttagtgttatcaaagagtgatagtcatattaccaaaggaacgtatgtcttttcggtagccgaggataatactactgctgctagtcagaatcaaactaatgatgacaaaaaacagcaacaaccacagctactacagacaaacaatgttacttccatttcttctagaatcattacaacagatgacaatgtggtattaaaatttgatattgtaccattcaagacaggtcataacacctttatcattactacaaattatttgaatggtacagctgttgaaaatattaggaatgtttttctagaatttaataatccagataagaatttgggtccaataatcgatactatgaataagacaaatgtaggaaattattcatctacccgtgcctatttaggtcagagcggaaactgggaagtaaaaattactgttcagaggataggtgaatatgacatcaatcaacaattcaattttggaataggcgagtagtataccacattatatttctaaaaaaaagattgggagtatagtctaaggattcaaatacattagaccaagttaataaaatagagagccggcagattatttgtagcattaatataagaatttattttacagattgattagttgagtctagtatcatcatattctttaatctattaaaatcgaatctatattataagacatgtttcagccattagtatgttttttctaggattcatctcaattaaggacatagtatgatagtttttgaaaaataaaaataaaaataaaaaaagattatgcttttatatttttgaaattaacaaagattgtaaaaatgtttcccgtcacttttccttccggacgcaaaattgtacccgctttgatagtagtagatatgcagaatggttttgtaagcaaaggcggatcctatgataaattaggaatgaacacatccaattatagagaaataataccaaatatcaaagagttaattcaattctgtaggagcaaagaaattcctattttttacaccgaagcggtcagagaggatagcggtatcgatcttttgacgaagagtacacaactttttacctaagtcaagacaagaacgactcaagtttccgatttgcataagaggtacatgggatggggttacgattgacgagttaaagcctcaagacgaagatcatactgttataaaacgaagagattctgcttttcaagatacagaactccgggtttggcttcagagtgaaggcgttaatctgctgatatttgcaggaatcgatacgtcaatttgtgtagagacatcactaagagacggattcaacttaggatatgatgtcacattgatatctgacgctacagcgtcaggaaataaggagcattacaagaccaccttagaaagagtatcagattactatggattagtaatgagtatagaacggtttaagaaggccatgaatgatttggataaagtaagaaaacatgaagttgatttgagcaacatttctgatacaacattaaacgcatttcttgaggaatttaatttacttgatcctagaacctttgctctatcttcaacttgaaccttgaaagtttaaaatcatttatttatataaagttaagcagctaaagtcgacgatccgaggtcgaggcaaatgagttatgtgggttacaaagaccttgagtagcccattttgataatttacagaagtatctatgttcctcaaatattcgtaaaagtctttaattacttgtctgttggtttgattggttactttgatattatgtttttgacggttgtgattaacttagcatgcaaaaatatacttttaacctcattccttatacaatcaaggattatgtgaatcaatgtgattaatggaccagtttagtttagtaatagatagattacgagtcccaagtttgcttacttttttaattatatatatattattacggaatccgataaacaattttacataatactttgtttttttaataattagagaatattttaatagatttatctcaacgtttggaaggattgggattatttgcaatcttgttcttttgatagtttgtcagcaactataagaggttctggaagatattgatttgtttttgttattgatttaactacttctatcgatgtcgataaactgattctatgtccaacactgatatatgccactttcttcgagatttcattggactttaatgcatatccaagaatttcacctttatgacttacaaagttatctgctcgaacattgccgcataacaaactttttgcgacaccaatagtaggtaggtttgtagatatgccaatatgacatgctaatccacatcttctaggatgaaataccccatgaccatccactagcaaaagttggaatggtcttgttatcaatctcaatgttttaagtataggggcagattcccttagaataaataaacccggaatatacggattttttatctcacttttgctactgacagtttctataatttcaaaagtttctttactgattattactgccgaacagcatgcagttttttttctataagatacgtctacaccacaaatagatttaactttgctatcgaaatcattacttgttatgactttttttgcaaatgtcttttgtaattttattacttcagcgtaggaagttttgttacttttgttcaatttttatgtatttgtatcatatatgataactctgaggtagcaatttcttcataagaattcagagtgcttcgaatccatcaggtatatgagaactgtacttttatttaacatttggtagatcggatatttcaattcaaatgtccaaagtaatgattttcaacataattgttgatatataattcataagtatttccagtagaattattaatataattccattctatattttcaatgtccatgtttctaaattttttcctaatttgagtatcgagatttttatatactgcctctcctataattatttgatttggtttagcataatttgtcatttttgtgacaatatttatcgtataacctaaaatatctaagtgtggcttccttagaataggaactatattttctcccttgatgggactttttgaatcatcatcattacttttagttacaccgttataagccaccgccttttctgagctagttatgctctctggtcttaaaccatattggacaattgcgttttctcctacgtcgatacctattcttatacccaactcaggataaccatttaattctaaaatagtattcatgccttgttgaataatagttaccatcgcatatgcacagccaactgcattagtacaaggaagatataagtcatctttttccgtaaaaaagaaagatagtattgcatcgccgacatacttaaagacatatcccccataagcctctattatcagcgacatttcttgtgtaaatgcctgtattattggtactagtcgtttaaggggtagattcattgaaagatttgtagagcctacaagatcgacatgtaatactacaagaggcacagatgttccgataaatttttctaaaagtctttgtgtattttcttgggatacattgaagtctgattttactttcaattgataccacattcttttttgagcatctttgattgcagaactgatattaaaaacaggatctattagtagcatgcctaatttaggtactttggatgcttgaagaaccaaatcttctttttctttgtcaatgacttgcatcttctctatagcatcgataacttcctttatatctaaatccaattggaatgcaatattttcgataggaattcctgattcatgtaaagttataatactcttgtatagatgcatatccagattagtacctctgtataattagttcgaatggatttgtgaataattcataaatattcaattgaaattatttagatcttttatgatatttatttattattagacgtttggtaaatgagacctatatactcattaatgtttcgaaaattaaaattcttcaatcattagaaaaataacaatgcgtatgacttggcttttgaatgctgactctatttatatttaaaattaaaacgtactgctatggttgtaacaggtgggtttaatgttagatataataagaatctaaaattctaagtgaacttgaagtaccaactcataagtcgctaggtttcttgatcatttgtttaaaagtctgattaggatagtattacatctaccaaacgacaaagtaaattcaaattattcattgtccgaacttattcaaaggagcttgatgactatctgaacaaggccgttatgaaatattttttgcacccaactatctcaattactttgaaagtaaaagatgaaactcgtaatagactaacagatagcgactatttgaataattagaaatattactaaaaatctcaagtaatgatttggtaaccatacccaggaggtaattaattattaattatgctgattgctgctcaatgtatcataaattaataaaatcaagacagcaaatgaggctattcctgatagataatatcgtattattaatacttttatcattatggtacagcgtgacaataataaagtcatccaatatactagcagtcacttttggtctattactactaactatgatgccaacgacgcttaataattattcgacctcctcctcttctataaactctgtttatgcacaagaagatcctgctactgcaccatttgatgcaaatgattctattgattctcaagatataactcaacaacaagactatgctaacttacgcttaccaagtcaggaaggttttgaggtgagattacttgcctccaactttagtgagcctcacaacatcatttatggtccagataatattctgtggattacagagcgtgctgcaaagtcaattactttggttgatcccctaaatggtaccatattaaataatataactgtccctggtgttcaccaatcccaaggtcaagacggactgatggggatggtgcttgaccctaactttagcagtactggccatctttatgtagcgtacacttatgatgctaataattcaactggtgatgaacttgaacgccttacaaagataaccagatttacttacgataataccacaggtacaattagcgaatctgttgatattataagtggactagtgggaagcgtagatcataactccggacgtctggcttttggtcctgatggtaagttgtactacacaataggagaccagggcaaaaaccaactatcgctgtactgtctggatattgaagctcagactcttccaactgcagcagaagtaaataatcaaaattggacagcctaccaaggaaaagtcttaagaatgaatacagatggatccatacctgaagacaatcctgttatagatggcatccaaagccatatctttacttatggacatcgcaaccaccaaggtttgaccgtgggtccagatggttatctttatgcttcagaacatggtccaaattcagatgatgaggtcaaccgattgcaagcgggaggaaactatggatggccttatattgcaggctataaagatgatcaagcttatagattcgttaattggtcatctactggcgatcagtgccaacaacttaatccaagaaatgtaactgctggaatagaagcaggagtgtcagctaccaatgagagcgaatctgatcttcagaactttgttcctccagtagctacattttttacagttgcaagtgattataattttactgatcataactgtggtcaattagcttacatctgtaatcctaccatagcaccatctagtttacgtctgtatgcctcggatacaattcctggatggaacggaaccttgcttatgcctactttgaagggcggtaaaatttatcaattgatccttggcgataatagaacaagcctagcacaagaagcagttgaaatgttccagtctgaaaatcgttatagggacttggcaattagtcctgatggaagtacactatatgtaataactgactcgactggacctgtacaggccataggaggaggagcaactactgaactttggaatccaggctctctgcttgaattcaaatacgtagaaaacagcaataatatgacaggcatgcaatagcgcatatacaattacaactgcagtaactaccttcttttttctgaatacttattttattttttttgcaagttttagatacctgtctaataatactaataaaagattaggtctaataccatagaaaaagccatcacatggacattaaaagtgcaggtcacagacaaaccctttgataaggattcatcctagtaatggagaagggaccagcagaaggtcataataaatggtatgattttggtagcataaaaattggtacagcaatgtatttggtttctgtaaatgtaccagaatctgctgttctaagtggagaaacgcatgagacatgagttgtattattgttaaaacctgtcaaagcttgaatatcattcaatttctcctaaccgggcttgtttatattcatggaatggatattaagtaagagaatgcactatgagttcagaaaaatcttatcaagacatctgggaatacatcatgttacggccattgcccgtgatcctcaaaagaatattgacttttagataggtattttaggatcaagattagtaaagataacagtaaattttgatgatcctacaaactatcatttgtgttatggtgatgagttaggcagagcagggagtattatcacattttccccgttggagcatgtacaacaaggatggagaggtataggacaggttgatacgatatcttttttgatccctgaaaattcagttaattattggatcaacagatttatagataaaggaatcctcatagaggaccaacaaaacgatttaacagtgagcaaattataacatttgttgatcatgacgggttaaaactagaactggtggccagtaaagaagcagaaaataaaaaaataaatgcgtggaagggtggctcaataccccttgatcatgctattagaggtttacattcaattactcttctttagaaggatttgaaaaaatactttctcttttaactcaaaaactaggatttgctagaatagtaaatgaaggtaatagagttcgttttcaaattaatgaaaatgttggccgagaaaaagttcaaactcccattaattctactccatcaatcgtagacataatatgtcttccatatagtcatcgaggaacaaggggtccagacaacgttcatcacgttgcatagcgaacaactacaaacgaaaatcaggctcaaatacgtaatcgaatagttaatgttggattggatgttacgccagtcattgaccgcgtctactataatttgatttattttcaagatccgggagatgttttatttgaaatagcaaccgatacccctggctttctggtagatcaagaatctgcgggattgggaaataaacttgccttaccaaaatggttggaaccgaaaaggatctacatccaaaagacattgccttcacttaagacaccttctaacggaaatattggctctgaaaagcaataaaatgattactctacctattaacattcatcgtcaatctgcataatagttgcaaaccattttacaaagaactagcagtcataatgagaaaacagtttcgcattttattaatcttgtatacgaaatttatcatcatattcttttaaaatatttaatcgaatcgattcatccaaatacaaatggaacaagaatacttgtcattatggttactaacactatcgaaataagattctaatggaatcccggctcttgccattcttcccatcgtaatatgcccagttgaataaactattgcatttggaggagtacctagaggcattatgaatccaaaacttgttgctatagctaccggagccattaacaatataggatccatatccgttgaaactgcaagtgatgctgcaatgggtaacaataacgctgccgtagctgtgttacttatcatttcagcgggttctctaaatgtggcatcatccgggttaaagtttaaactcctggctcgttatcagaatgacttccccctaaatattttaatctattttctaaatctgttcccataggatagattatatcattatttgtatactcataaagatacacctgaaaagttttacaattgggacaatattgataatataatctatgccataattttgcatcatcattaaattcagggttattatgccttaattgagggtggaagtgttctttacaactgtggcattgcataggtggtattaggtcgtaacattattaaaccgttatgataatgtgaattccattccctcaatttattacaataatatgaattcatggctcttatgaaaaatttgggtaacttcattgtagttctacagagttaatcgcaagtcatatgagacttgtacttggtaaaacgtggcccccaatctggagacgaatttaatcatctcatagtaggtggtacctatgatgggtaatatattgccggattcaatgattacttcgcatatcgatataaaatgcgttttgattcgtatgctattttggtaattaacttcgtctttttagtatatccagatataaagtgcatcaaattcggtaaaaacaatgttaaaatatataataatagtataaaattcaaattttgggatgttgaaataggaactcttatacaaattgtaatgcatagtaaacctgaacgaaagtgagcgaaggtttcattaaagttgctgatactagagacataccaccatcacaaatgaaaggggttcaagttaacgatgaaagtgtatgtattgctaatgttgacggaaaatattacgccataggtagtatttgtactcacgaagggggccctctagcagatggtactcttgagggatatgaagtcgaatgtccttggcataattctaaattcgatgtaagaacaggagaagtaacaagcccaccagcaaacgaaccagaacctgcgtatgaagtacaaatagagggtaacaacatcttgataaagatacgaggtaaaagtaaattaccgcccatacctgagctagaattattagaaaaaattaaagtggagggaaccgatgtaatgtcatttaagtttagtaaacagaataatcctatagaagagagccaagcaacactgctatcagactatactgcaggtcaatttgccttttttgacatcggtggtgtcaataatgatccaaaaggtccgatcaggcattttaccatttcatcttcgccaacagaggattttataatgttcacaacaaggatgagagattctccatataaaaaaagactttcaatattagaggatgggaccaaagtcaaggttaggggtcctgagggacaatttgtgctacatgatgatcattctataccggcggtgtttctttccggaggaataggtgttactccttttagaagtatgataaagtatgctacagataaacaactatccctgaaaatagtaatgttcgattccaatagagatccagataacattcttttcagaaaagagtttgatgaatggacaaagttaaacaaaaatctgaagatcatctatactgttagcgaggacaaacatgacgagaatcaatcaaatgttatgaatggttggaaaggtgaatatggaagaataaataaagcaatgattttaaaatacctagataattctctattaaacaattcgatattctacatttgcggtcctccaggcatgttgaatgctatgaaatcattattacaggaagaattaaaaatttctaaagaaaagatcaaggtagaagaatttacgggttattgaaagcaatgatgacaaaaacatcatggtctgatggaattatgaagtttaaaaatgattaaatagtaacgacagtaattaactccttactagttcttttttgtactctttttgttataatagattatcttcaaagatgagattgagatgaaaacaatttattattagtgtagatgagaaatgccattaaatcataactaagagaaatttaccaatctatttccatagttcgtttcgaattaaatagatttacttttatttatttgtagtatatgcgagaaatatgattttgccaaaaagataaagtaaattaaatattcattgtctttcagcttgtttcatttagaggtctttttattttttataatttcgtttgtcttttcttctccttccttaatcgcattcttgattgtgtgaggtgagaaatctgcattttcggacatatgaggatatggttcttcacgttttacatagtaaatttctttaatctctgctccatgatcttgtttgtatattttatatttttgacgtattctcttgagctgtttttcatctatctgcaatttgtcaacattattttctactatttgataaagttctttaatataatctaaataccttgatattaccttggacatttgtacattatgttctgttttatcagaaaacataatatctctagccctgtgataaacctctggcatattctttggcagactgtctatgttctttggataattttctacaatgtatattcttttatcccttttcggagaagctgctataacctctcttaatggggtgttactcagtagactaccatcccatgcaaagactccatcttttacttttatccactgaaagttatatactggataggccgatgtagcaagtatgtgtgtagcagttatttgctctttatagctatcaaatgttaaagggcgtgcgtttaaaacatttacggctgtcaaaattaagcgtgcattagaatttccttctggtcttaatttgttataattaatgtatctttctaaggtttttgctataggcgaatgatcgtatagaaaggtccatttttgtggtgtaaaatattctgaatcctttaaagcgtattctggtgcccacctgggaataaacattttactatttccaaaaatggcagaactgtaaaaggactttatttgttttatttttacctccatttccattctatctgaagaatagatttcttttattcctgcaaccgctgtagctaaaggtgagtgaaagggataatagtcaaacttggaagatatctgcaatgttttcatataccagttccaaggagaaaatggggaaagtttatcgatatctataaagccttcagataattccaaccaaaaatcctctaagagctgatctgtgttattctctcttttgctgccagctattatcgcagcatttatgccaccaatggaggtgcctgcaatcacatctagattgatattatttttcacaagagctttatagacaccacagccaaaagcacccagagaaccaccaccttgaagaataagtacattttcaatggtatcgtcaaacatagtcaaatattctctccttagacatgtaattacttagtattacttttttacttgtcattctcgttctcactctacatgatggttgtgaattagttgatcataaaatctgactgattttatgtttacaaattcaagcataccgtacctagacaattcccttccaaaaccacttttttttaatccaccaaatggaactctaggatctgaagctacaacattgttaacagataccattcctgactcgataacactcgaaagcttttctgctctatctaaatcttgagtccatatacttgctccaagaccatattctgaatcatttgaaattcttatggcttctgcatcatcgttagctattataatcggagctactggtccaaacacctcctcctgagctatagacatttttggtttaatattcttgagaactgttggtctgtaaaaataacctttattccctacctgtttccctccagtgagaacttcagcaccttctttaattgaggttttaacctgagaatctattttctctaggctgcgagcatttacaagaggccctatatcagtattatctgatagtggatcgcctacattaagcgtttcagttttttgaacgaatttttcaatgaaatcgttagctatatctttaactacaataaaacgctttgaagctatgcagctttgaccacagtttatgaagcgtccctttatagcacctaaggatgctttctcaatatcggcatcctggcacacaatgaaaggatcacttcctcccaactctaggaccgttttcttcacttgagatgtggccctctgtgcaacttttgcacctataggtacactccctgtaaaggttacagcattaatatccgaatcaatcagggactctgcaatcctagaatcacctaatagtgtttgaaacaccccttttggtacccctatattatcgaaagcattttctatattgattccacattgcatagtagcactagatggctttagtacaattgtattaccaaccattagtgaaggtgccgcaaatcttaatgcttgccagtagggaaagttccacggcattatactgccgattactccaatgggctgaaattttatcattgttttcctagcatctgtattaataacttcatcggtagaaaggatctgtccattatctgcgtaatactccattgcccaagcacatttttcaacttcggatctagattcttttattgctttacccatttcatttgtggcggtcctagcaagattttctttatcttttcgtaattcattagagaaagcatggagaaagtctattcttttgtttgaattttttttccactcttgaaatacacttttggatttctttactttgtcgtttatctgatctttggtcatattttcgtaatgattgataacctcttctgttgcaggatttattgtatcaaattccataattgaagctgctgcagaatctttcatggatttattacacctcttcctgcaattttgccctcttttaacatcgtcaatgcttgtgttgcctgttcaagtttaaattgatttgaaattagcggttttattactcctcttttagtcaatgaaactaattctaccaaatcatttatagttccagtatatgatccaattaaccggtacgctcttgttggcatacttacaagacctaatctcaattcgccaccaaatagtcctaccaaaactactcttgctcttcttctaagaaattgcatatcaatctctactgtttttgatgtattgacaaaatcaattaccgcatcagcaccaagattgttggttaattccattattgtctttacagaatcttgtttttttgaattgattatatcattggcaccactatcttttgcattttttaatttgttgtcgtctatatccaatgcaattatcctagaaccagtaacagctcttgctagctgtatggccatcaagcctaatcctcctgtacctacaatcactacattgtcatttggttttagtttcgcattctttactgctccatatgcagtaagcgcagaacatgacagcgttgcagctgcatccatatccaaatcatcatttatttttactagatatttgtaattgggtaccaaaacaaactgtgaatagcctccatctagatagattcctagcgatctcggtttatcgcaaaggttttcctccccacttctacaagcaggacataagccttcacctatccatggatatacaataactttttcatttttaatgaatccttcagcttgatctcctagactttctattgtgccggctatttcatgacctggagtcaacggatattttactcccctttctgtggtttttaagatttgtccatcaatgccttcatatcctccctcccacagatggatatcgctatgacagactccggaagaatgaaccttaacaagaacctgtggccccataggtgcgggaatatcaagttgttgtacctccagaggttcatgtggtttaacaattcttgcagatttcatattgatgttaggaagttactgcatataaataatgataaacaaaaataatggaaattcaaggatatggctggatttatttttttgtgaatgttgaccatttaatcttggtgatagttggtttatgttttcaatattcaagtttatgttaaaaaataatatactttattttattatcatgatataaatggattcatttttgacgtatgtgcccttaatttctcttatgatagtcgctggactttttgttgtggcgatagtaaatttttcaattttaagaaaaaatatgcaaaagcaaagtgaacagtggataaaaaatttgaaaatgcaaagtgaacagcagatttattctagaataatggaggcaaggcttaaacttgaaaacaccgaaacatttaccaagatggctaaggaaagtcctgtttttgtagaacgattttctttagttgataatcctgacgaatattatatcatagtggcatttctggacttatttgaattcttgttctcgcttaacaaaagagatgttattgacactgacatttggtttcgatggaaaggtcttgctgaaaccataatgactataccaaaatttaataaagtatgggataaaacgaatcaaattcattctgttgaattcagagatttcatgaattccctctgagtattttgatttaggataatctactggctaggatggcaatgatatttcccgaaagttgttgataaacgtacatgaggtagaccaaaacacaatagtttccatatgattaacgacattaatttccaaatagtcttttaattatgattctgtaaacaggatttaaaatatcatgaagttaattaatttctttggcgaattactatttttagtataattcatatttcattaatctgtatttttaacccttgttgtaaaagtctagataatttgtgttactttttattatttattttgtgcctcaaccaatcaatcacggtgcaaggattttctttccatgacctatttttgtttaacgttttcatcatagatttctttgaaatctctaagtttaacaacattttgtcttccttctacttcctgtttccatgctacaaatcctccttcaatactaaaggcgttaaatccttgtttgttaagctcatctgctgcgatgtctgctcttttacccactgtagagtaaatatatactggaacttgtctgagtctatccaaatcaccattttttgagtcccttattagctttgtaaacgggatgttgacagctccgaatatattgctatttccgccatcagcctcttgttcttccaactcctctccatctcttacatcaattatgatatatttgcctggttcgtccctttttttctgcaagtctttaggtgctattctatttgtcattaacacacaataccatactataactatatttaatttccataagcctagattactcgagtaaaaacactcaaattgaaaaaatgcatcataattgtacggaaagttatccactttaaagtatttgctaaccattaaagtcacttttgacttcaccttatgaaattcttttttctaggaattttaattaatgaaataggcgcgatatataattcatcagcctgatatttgcattcctgtgtctcatttctaaacaatacagaactttgattaatttagcatatgcaaaaagacgagtgatcctaatctattattctcctatataggaatgtatatactataactctgatatattgatttgattgtttaaatgagcctagaagaagatgcaataaatctccatcgaacactaaagggaaaaatcgaaattcacaatacaattgccttaaatgaatcttttaaaggaaagaacgatgtgcttgaccttatttatactcccggtgtggcatttgtagccagagacataagtaaagataaaaatttagcatttgattatacgtcaaaatggaataatgttgctattgtttgtgatgggaccagagtattgggactaggggatgttggtccggaagcggcaatcccagtcatggaaggaaaatcaggtactattcaaagttttaggcggtgtaaatgcttttcctttgtgtatcgacaccaaagataaggaggagataattaaattagtaaaatccattcaaccaatttttggtgcgataaatatagaggatattgaatcacctaaagtactggagattgtagaaagactacagaaagaactttcaataccggtcttccatgatgatcaacatggtacagcaataatcgctttggcaggattattaaatgcgattaaactagtagaaaaaaagatagacaaaataagagtggtaattgcaggagccggatcagctggatatggaatattcagaatactaacagaagcaggatgcagagatattgtcgtaactgacagtattggagcattatatgaaaatcggactgatggcatgaaaaatccatataaaagagagatatcagagaaatcgaatcctatgaaattaagtggaagtcttattgaggttataaaaggggcagacgtattcataggggtgtctggaaaaggtaaattgataaatagagatataatacaaacaatgaatccggatccaattgtttttggattaagtaatcctgatcctgaaattctacctcctgatgctttagaagcaggcgctggaattgttgctactggtagatcagactttgcaaatcaaattaataatgcggttgttttcccatcaatactgcgcgctcttttggatcttcgaatcaatactctaagtcaaggtatgctggtagccgttgctacagccatagcaaatatactcgatgataaacagttaaaatcagattatataataccgaaagttgatgatccccggattattcatattgttactgatacattaagaaatgcaatacaaagtcatatagaaaataaaactgaaatataatacaatcagtttacgatcacacaggtatcggctaaagaattcctatcatctatctgattgtatagtaaacatgagacgaaaaaaccatccatcatctttccaaactttctcatttgtcgataaatgacaattctaattagatggtaacaaggtttaaaaaggaagactctcttattagtagatggcaaattatgaaaatataaaaaattgtttagaccaaaacggagaggtaatgataagattggacaataatgaaaaaattgaactgcacaaacataatgtaagatttgatgacaattcaaaagaaataataattgatgctggaactgaaaccttttggattggtgctgataaggtttcatactattggatacacaaagaaggttttagtaaagaataatatcttttcttgccctttccatttgtagaatttgtagtcaaaaaattaatctgatgtaattatttgtgagtggttagaatataaataataatagtcaaacagatgaggtcattatatcaattactgaatttttgatttcattatccttaatagacaataagttgaatatatcatatggttcaagttgatttttcagcaactgatataaagaatttaaaagtacttttgcaattctctaaagatgcatgtccattggaaagtcttgaaggaaatatggataatgattatatagatactctaataggaaaattggaaaatgcgaccagttaaaggatgatactaaatgaatttaatcaagcgaagtcattgtaatcattttatctctatcattgtttattgatagtaaacaattcaaaacagtaagtgtaaaatattaaaaagacaaattacagacacatgtagacctaggctttgagggctgtgcagggttctttgatttgacatgatttaacacattacctccctttgtaatattgacatgaaattttattataactaaatgcaaacaaatccaaccattattttacaggttttaattcagttctcgtactatagtcgatagtaatcgccaatctgatatatcttatcatcgagatattgcacggttggccctatcaccctgtccttacatcgagattggatgtaataatttagtttcatgaatctacaaggtgcgggtgattccatattttactatcgattgatacggatgatcgttattaaactcggtataacctcaagcgactcttttatacagtcacatttctctctttggatacggtacagatagtatgagacgtgcaatattacaaatttatctaaaaatttgattacttagattaaggctccatttacaatgaatgtaaaactcaaattgatttttgaaatatttagtcaaaaagatactttactatttagttgaagatgatttcactgaattttcattatgctgtatattttggctaattttaacaatgagttcctgaatttcttgattttgttgatttatgaactcagttattttggctaaaacttcctcaagctccataccttttctaccggtaccactgccatctactaaacctccaaatattgaattatgcatatcatgtaattccttatcaccatgactttctcccaggatattagataaaatacctatggtattatgttgttgtcccattacagttaacatcttgccaacacttacggtaacaggacccgctaactgtttattaataaattgtttattgaatcgagatgcgttagaaattacatcatgtggagttaagtcattttcaccatgattgttattttgggtttgattatgcatgttctagaatagagaataaagtatataattatattcatgttttgtatggtattaatgaaatcctcttcaataatttaattaattttacaatcttgtatatattttttaatatcttctaatataatattttattattttggatcttttacaccatatgggctagttatattttttaaaagcattcaaatgctcagaatataaaaccccaaattatttgcaatcatacaaatattgttttctagagcgctatctgcaggaggtacagtggcgaaacactttctaattcaaaacaacaaaaatgcaatggaccggttaaagttttttcttttccatagaaaaaatctgtcgaccaatcaacatattcgtgattacgaattctatcggttgtataaataatatccggtattggttacaaaaatctatttgtcattgtaatcaattgccttatctataagaatatctattgtcaatcaaaaacatattaattctatcattgcaaacggggcatttttttaaatatgcatcgttttcatgtggtaaaacggacaaagtcgaggccatccaaaagcaattctggcaaatcaagaaatactttaattttctaaaatgcaatctattgttatagattcgctcttgtcgattatcctctaatttcctcttatgtaagaaaagagatgacatctgttttgagacgcatccaatgtatttataagttgttgacaggtttaagattgacgttactatcttcagtaaataatttttaataaatgataatgtgttcgctactatagaataaatgcgagctccttagaggatacgatttactggatttgatggcaaggatgcgtgtggcgtttgaacttctaaatcctaattattcatttatgaggtgtagctagaataattagtgaatatctccatagtaaagttttcctttgacatgtttttcacatacttcatggtttggtcgatgctacttttctaatttttcagccggcgaagtaatcattgtattatgaatactaagttgaattgcgatttgctctacatttgataaagatatgttattcactaacaaatagcctttcaacgtaacatatgccattacatcatttctaatagccactgaatcactatctccaatttgacctttctaatccttatcagttacgttccagactctatctaaaaggatactaatgatcttcccattctgtgtggttttcactttcgtaagtttaggttttctttttgagccactttgtgattattgttattgtagttgttgatgggaagattcgatttcaattttatttatttcatatctgcatatctgcttttaacgcaagaggaaaaactatcttttcttcttcagaaaaatgattcctcagatttgtaacaaattcattaatttcattctgaactttttggcgatattgtttatcctgtttactttgttggtaaaaattattttctatatctggtattttatgttttataaaatctacaacccaattatgttcctgcattattttaatagaatcagtagattctccttttgcattgtgcattataacacgcattatcctcgcttcttcttcaacagcatgtttgattaccgaatcgctcagatcgtgtatagtttcaattgcttttgtaatgttattctcttcattatatctagctatattgtttaaagtgaatccaaattctatatgctcttgttttagtctatcaatcatatcgggaatagattcattaaaattgattttaaaagccatatgtattttatttaataatatatattaataagactacttaatttaaaactcgtctctacatttattatcggtttatttcaaattcgttaaataccatgaaatagtataaatctcaaaataaaaagatgtcagtatgattaaatgattacatgagattataaaatctgaatatctttagattctgccttaaaacctatccttgtatgtgtaccatcacaatatggtttattcttagaacccccgcatctgcataacactgtaaaggttttatcatctaccattacaatgatgggtccgttttcggtacatttagcttcgactctagccatattctattgtattatggtataaatatataaagaatattgtttctgccttgtataacaaataacaatatcataatgtgcaatttactttagttaccacagattattgtaggctgtttttgtagtggaaataaattatttgtttgataatgccctgattctcatttatctacaatggttggctaaacatacctagatgtagattcaatattttcaacttcaaagacaaaagacgggttgcttaactaatatcaataattgttattgcttgcaggataaattgatcgcactcaatgatttgcccaaaaagaagtaaaatgatatcaaatcaaagtctcgtcatggtattacgaatgagtatgataattttttagtacttcatgtaccttgtttctgaataaagttaatccaattcttttagcatagggttgtccttttgcgaatgattcagctaaattatttacatactccataccaacatttggaggcataggtggttcgaaaggatcaacatacgcttcaattatcgttggtttattctccttcatagcattatgtataatagatgctgcttcagaggctttttttattgaataccccttaccaccacatgcttcagcaaacaatgcaaaatcaattggagtaaactctacaccatattcgggatttccaagaaaacccatctgttcccatctgatcattcctagagtattattttttataacaattacttttattggaagattgtattgtacggcagtggcaaattcacccattaacatagtcaagccaccatcgccaacaaatgcgatagattgtcggtctggaaaagcaatctgtgctgctattgcatatggtaaaccatttcccatacttgataaagtccctgatagagaaaatttcataccttttcgtatatctatataacgtgcggcccatgaggtgttggtgccgcagtcaacagagataattgcgttctcttctaactcctcagagaccatcattgcaatagcttgtggctttataggattatctgttctactgcttcgttctctcaataatctattccagtttttcattgcttgctgttttgattttagaaattctagatttttcttttgaactaaaaggggaagtagctcgcgcagaattatctttgaatcacccaccaaaccaacttcaacaggatatcgtagaccaatcttttcagattttatatctatttgaattcctcttgcttgactaggttttggtagataatccgtatatggaaatgaggttccaatcataagaagagtgtcagcttcactcatagcatcgctggaaggttcagtgcccagtagaccaataccgcccaggctgtaggcgttgtcatcagctattaccgctttacctaatagagctttgacaacaggtgcacctaatctttctgcgacagcaatgacttcttctcctgattgaagagctccttgtccaactaatataacaactttgttgcctgaattgagaattccagctgctttttctattaacgaatcactcggtgaagtttctgtaacatatacatctgatgtatgataagcaacattatgtttggaaaatttcccacttagttttctttcttggatatcgattggaattgttagatgactcacgcctctctgtgctaatgccgttctacatgcaatatcgacagccatttctgcttgctcaggaacggttatcatactattgtagactgtgacatctgaaaataactgtaacaaattaacatcttgttgatagctagaattgatcaaatccgagtaggtggtgcctgtaatagcaataacaggagtattatccgccttggcgtcatataacccgtttaaaagatggattgctccagggcccgaggtagctacgcagacacctaaccttccggtatatttggcataagcgcaagccataaacgctgcagattcttcatgtcttacgagaatgaatttaattttatcctgtcttactcttagtgcctcaataaatccatttattccatcacctggcaacccaaaaatgacatctacattccaatcaagtaatgcttcagcgattatatccgctgtacgcatgttctcgtgttcagtcatattcctataataacacattattatataagatcaatttctttccatgataattctctattaatgattatgcacctgggtttgattcataatctactcgtttctatgtagtttataggacaaaatgatgctgacggttattcaaattcacgatggtgttctgatttggaatgagcagtaagcagatcttttaatggtccttcgattaccttgacactacctttaaacaataccatttctgactcgcccttctttctacaatatatgttttgcacccatctttcattatctatatttggaaaatcggatctaaaatgagcacctctagattcttgtcgcatcaatgcgctccttattatggcctcacaaacaattaatgaagattttacttctaaagttaatatgatattttcaatattgtatttagcattatcaatttgaaattctcttaaaatattgtcttcagagtaaaatgcctcatttaattccaatagaatctttaatcctttttgtaatcttccattatctcttattattccaacatattgctccatcatatcttgtattttattgcgaaaaacaagtggttctctaaccataaagatttcatctttgaattcctttagtgttttttcattcatgcttataggtggtgataaataattactcttgactgaaatgtcatctgttatctcttttgctaatctagctgcttcactgcctgcaattttgccaaaaaccattgtatcaagtaaactatttccacctagtcgattagcaccatgtatttgacttattgtttctccggctgcaagtagacctttgatttttgttctacattttgtatccactacgataccgcccatcgaataatgtgcagttgggccaacttccattttctctttagaaatgtctattccatcaataattttgaactgttcatacatggtaggaagtcgatctaaaattttctcctttgaaagatgagttacatccaaccacactccaccatgttctgtacctctaccctcaagaatttcattataaatagcacgggctacaacatctcgtggtcccagttccattctttcaggatagtaatttttcataaatctttcatttgatgaatttaacaatatgcctccttcaccacgtatcgcctcagtagctagagtccctgatgctttctcgggccaaaccattcccgtcggatgaaattgcaccatttccatatctactaattctacacctaatcgataagccaagaaaatgccctcaccatagttttcaaaaattctagaactgcttgtcgaataaatcctagtgtatccaccagtggcaagaataatagatttgcattcaaataatacgattctcttattttttagatctgttcctattgctccactgatttcttttgagattggtttttctttttcctcttctttatctgactttaatagcaattgtgtgatgtaaatatcatccatgattttgattctcctttgatcaacttgattcattaatacacgtacaatttcatcgccagtccaatcttcataaaaaactgttcttctatatgtatgagcaccaaaaaatcgttgtgttaatctgccatcgtctttctccctatgaaaccttgcaccccagttaactagctcgttaataacatctggcgcgctcttacaaagaatttcgactctttcatgatctgcaaggaattcgccttcttttaatgtatcgacagcatgtatcatccaattatcttcagggtccatagtgcctaaagcagcatttatacccccctcttgccaatactgtatgaggatttcccctcttactcttgctaataataagaacatttgcaccagcatcatgggcttcaatagcggccctaagccccgcagaaccgccacctataattagtacatctacagaataagtgggatcaatgtattcatttttggtcaatctgaatactgtcatatactactacaattgaatatttcggtagcagcaaaaagatcgaataatctttagatttaataattattgaaaaaaagacccttttttatttaagttaaaaacgtcgtcaaatagcttttaaataaacgaggagtaactaatctatgtattctataaatttttcaaaaaaagatattgaagtaatagacaccatatgcaaaatattagaaccggttaattccaaagctattcaagatacattcgataaatctggagactcgattaatacatacaactctatcaaaggtctacagattagattacacaaacaaaaattccaaatctctaaatcaaatgatatgcggagcgagactgatagtatgggcaaaataaaagtgacttcggataggtactggggtgcacaaacccaacgctctgtagaacacttttccatcggaaaggatcatatgcctatagaaataatacattctttagctttaatcaaaaaatgtgcagcaattgttaattcttccttattgatgcctaaaaataggagattatcaaaggttaaagccgaacttattgtaaagacagctgatgagattatctcaggaaaactagatgatcattttccgctttctgtatggcaaacaggttcagggacccaatcaaatatgaacgtcaatgaagtcatttccaatcgggccattgaattatctgggggactggtcgggtcaaagcatccgatacatccaaacgacgatgttaatatgtctcaatcctccaatgatgtctttcctaccgcaatgcacattgcatctgtgcttgagattatagggaatcattcaatacaacatttccacaataacaaaaataaaatatcattactacaaagtattcttaatttacggaacgcgttgaatgaaaaggccatagaatatgcagatgtagtcaaggtcggcaggacacatttacaggatgcattacctataatgtttggacaagaaatttctggttgggttgctcaacttgatatggattacaagtacatagaactagcacttgatggattatatgctcttgctataggtggtactgcagtaggtacaggatttgattcatgtaaagaatttggcgaagaaatgtctaaacaaattgcaacagagactcaattaccatttcggtctgcttctaataagtttgctgcattagccagccatgatcctattgttgcattgagcggtgcattaaaaactttatcatgctctcttatgaagattgctaacgacattagatggatggcttctggtcctcgttgtggaataggtgaaattcgtataccagagaatgaacccggttcgtctataatgccaggtaaggtgaatcctactcaatgtgaggcaatgactatggtatgttgtcaggttattggtaatgatatgacaataggaattgctggctcacaaggtaactttgaacttaatgtattcaagcctgttattatacataatatattacaatcaattaggcttttagctgatgcatgtaatacatttcgtgaattttgcatacaaaaaagtgttagaggaactgatgaaaaacaaatacaagataaaggaatagtaccaaataaaaaatatatgcacgatatggtatcaagatctctaatgttagtaactacattaaaatctattatcggttatgataaatcagcagaaatcgctaaaaaagcacataaagattgcatctctcttcgagaggctacacttgcgttggggtatttgtctggagaagaatatgaccgagttgttaagccagaggatatgacatttcatgaaaattgtattgagccaaaaaacaattaaatggatattataacttctttatcttttgttcttttaatcctacaatattatatatacaataataagatcatatttcatttgattgtttaattgagtttagaaaaagaggcactaagcctacactggatactgaagggaaaaattgagatccataataaaatatctattgatgaagtcatataagtggaaactgttgaatctgtttgatgattgtcataacagtaattatatattaactgaacagagcctttttgttatatagtttaatatgaaaggaaatagaagatgattaatgggtttagaatcgattggtatttcagagataattaataaaaatgtcaaagtaattgatcaagaacaaaacgtttttgatgcttccaaagttatgatagacaacaatataggttctgttgtcgttattgataataacgacagcaagaatcccgtaggcattatcaccgagagggacatagttagaatagtaagcacattttcattatcagacttggaagttcctattagaaaactcatgagctatccattaattaccctatcacaaaatgcatccgttttagatgcaatgaaattaatgtatgagagaaagataagacgagtaattattctggaatcaaaaacccttgtaggtatcgttaccgagcataatatatttaaactactgatgagtaatagagaattaattactaccgttgtatctgatgattttccaatcccgcagaaggatttatacgaagatttttcacatttttggtttagtaattctttttacaagtaagaataacggatggtatgactcgaccatcatgatcttgagaaattaattattaaaacagtgtagaagaggaatgatcttcatttcttttgtcaaaaggatttttcagatactacatgttatcatttgttttacatttccttcataattttgacacaaagaaatgcataaggataatagattaaacgaatgattcgtcccgaaatttggtccattaaggttcaggttgttttgcggaatgttatttctaccttatacaggaatgtgtatttcctttgtaatatggggaaacatgatcgtaaacccttacgattacgaaaggttaggggcaatatcattgatttactttgtatcatagggaattgctgctcatgtagctgataacattggatcaaagaagattaaaccttggggcgagttacttagtaaaaaacagtcttgggtgattattataatctgtttgctattttcttatcttctgggaatttattactcattgatatacgcgcctcttctaatactgataggaattgctgagggttttttcttatttgcatataattttgaaatatttaaaggaatgtttcacaagaacttttggttttctgtttcatggggtatgttgccatttctggccggctttgtaatccaaacaaattcaataactctgaagtcagtattgttatcattaatcccattctttctaagttattttgaaattatgatttctagaatatataagggggataggaggatcaataaaacgacaaacaaaacaaatctatatgaaataatattaaagactcttagtattagtactatatctattacgattgtattgctcttatatcctttttttctacaattacatgaaacatataatcacggtttatgactaattcagactaaatgctaaatcatattgttttctaatagctttaaaataattgtaatgatatttaaaataactaatgttgaattggtcatttcgggattgtattttaatgcgtgattttaattatttttgagcaatcaatcgagtcaataattacaaatgcatttttaatttcttctttattactaagatttgacaactcttttatacatcatagacgaaataaataaaaagttgttataatatcgttgataaaaatcgaaagaatatatgataatcctaatggaaagggtgatgaatttaacaatggatcccgaattttagtagatagactttggcctcgtggactcagtaaaaatgaggtaaatattgatttatggataaaagatgcggcaccaagtacactgttaagaaaatggtttgatcatgatgaaaaaaaatgggatgaatttaaatcaagatattttaaagagcttgagaaatacactaaatccataaataccattttatgtaaggtagaaaaaggccccgtaattttgttatatggagcaaaagatgaaaaattcaacaatgcgattgcattgaaggaatatctcgagaatattaaaaagtagataaatagatagatggatgtatttggaatttctcaaacatttgtcaaagcatagcaaaataggcaattttcagatcgatgatacaagccgttttaataaaatattttcagttttttggttctattataagtgaatattttttcaaattgaccttttgattactaacgattgcaaataattccaagttgttatataggtaaatggggttattactatatgccaatagatccggaatttccaaagaatcaccaaattataggaaaacacaaaaacgcagatggaagatatcattttgtttggggtccaggaagaactgacgcagaatcctctgaaaatgctgatgttcaagatgcatatcaacaaagaaatgaaggatacgtaggtctaggagtacatggaacattcgtagcattagactgggattcgtgtatcgctgacggagcttgcattgaagcatgtcctgttcaagtatatcaatggtatagatcagaacaagatgttcctgcaatagagataaccaatgcgacaagtgaaggaataggtgaggatcgcaatagagagggaagaaaagattttacagataaatcagacccaataagagaacgcgactgtatttggtgtatggcatgtgtgaccgtatgtcctacccaatcaataaaagttgatgaagcaaatttacaggttcacgatgaaatgtcaaagtctttagctgaaactttaatgacaaatcaatgatgctatttactattgtactagtcctagggaagtaatcaatattttaagatattatggatctaaaaataagatggctttagtaaaaagtacagttagaattaagagaggtttaaatggaaaaggtaaatatgcaacgtccaccgagaatcgcaggttagtctgggaatatgttatttggcccttaatattggaacttaataggagctactttacgtcaaaggagtatcataagatgagagatagggtttcaatagagaaaaacatccctatatcaaagatgactggaggtatgatatctctcttggttaaagaaattctcatgcaagatgaaatgtattattcaatccattacaaattaattccatatatgagaaaaagggcccgtctagattatggaaccgttctaagggaggtaagttcaaaaaaataaattgttaaagacttgtacaatcttattttatcctctattgatcctcgcgatgtggacaaccatttaacttctgtctaagcaaagaataacttagatgcccggatacattaaaaacttgttaaatttcacgatgcaaacaaaaaattgtttacttaatacaaaacgcaagccattatgtgcttgataatcattttgttaggtaattctttcatccggaaataataatcacttaaataaattattatgtggtatgttcataaataatagtacgaagaaaattaaaagtgacattcaaaacaacagctcactcagagtaatagaaaataatggaatttccaatgaaattaactatgaaaaaagtatagaacttaaagaaaacagtatcttagactacgaaactctttgtaatttgcggcgagaccgattaggtaatgtattgaatgaaaaatatcactataatacatctataagaaaaggtcaaaggtttttactccagcatgtgaattcaaaagttgatttagtcatactttatgcagatttagtgggatccactaaaatgagtatgactttatctgccgataaacttgttaccgtcattaaggctttttcgcatgaattgtcttcagtaatagaaagctacggtggctttgttctgaaatacgtcggagatgctattatttcattttttccatcaggatttaataaatatcttgtgtgcgataaagcatttcgatgtgcaaaatcgatgatatcagtacttaaaaatgatattaatcctatttttcgtaaatacggatatcccaagctggaagttaaaataggaatagccgaaggagaaaacgttgttattcaatatggcaaagataaaagttctcaaatagatttgataggatatattatgaatgttacatccaagataacatccattactcgtcctaataagatttctgtaggaggaaccgtttatacgctattgcatcctaaaacacaattaaaatttgaaagagttatcttagataatgcgaactggaagtttattgacaagcataatgataaaccttacaaagtatacactactaaatagataagatattttgccatctaagacgaaaaatcttttaaataatgatacactgataggaggtaaaagaaatcacattttttaagtgctttgaatgtaatctagaatagtagtcgaactgaaaaactttcgaataaaatttaagtatttagtaacataaaatatatatgaaatactaattgcctactaaataccatttcaattagttactcattagtcaatatcttttatcagtctatcactatcactggtgatttaaggtatcaaactgaataatataatatatacataaaatagataaacagtattgaattggtcatttgaagaattttgtatagagtgtatggatggaatattctgctacctaagatatttcgaaaaatgtaatttttgggtgttaaaggattatggtttttggttatatctatctttaagatatgaaagtcctttatgagtagttatgtattgtaaattggtttttataaattgtaacatacgattatccacaatataggctaatgttctgttaatttgactttcagagacataagttatagattcaaaaattttagattttgcgatgccttctttagagatttccaatatctttacaattagatcttgtttaagagacattaataactaaatataatcatgactaaagtacataactaaatggaaatgtaaaataaagccatcaaaatcaataagaatattacaaatagtacctggaacaattacagttgtttcatccgttctaattattattaatctaggatgtggtattgtaactcttgtttttttactttcaattactcttctgttgttggtttggaaagaattgcaacatactatcaatcaaatatcttcttaggcatatgaaatttaaatcgtttaaagttgtctgccaatttctctcatatatgtagatcgcatttggcaaattatatagaacttgcgtacgataatataatgcttttagagaggtagtaagttctgccataattctccaatcttttggactaaagtattaataaaaatcaagagacataataacagtgggattaatagccctatttattagtcgatcctataatgtccaaatcactatgaatcaagaattaaattagtttgggagtaatcaagtatacacttcgaaaattatgacgattaagacacgactacatcttattcaagatatgatgtcttattggtttttgaattgactaaagatctaaatactaatagaatgtaaatgtactccgctttttctgagatagcataaaccatgtgggatgaaaattttcttaaatcaaatgctaagtcaaaattatttcactagtcaaaccttttcatacaagtgggaacgtgtagttatagcaaatttattaagatattatatttaccttatatttgagaatggatcttagagttattttagtaccatacgatggttcgcaattttccgaaaatgcattggagtattcggtatatatggcaaaagcgatctttttaggtgatccaaaaaagcgaatcattcaaatcatattgctacatgtagtacaggaaataccctttacaaaaaatcttttaggtaaaatgaaaataatccataagaatgagaatccatctttaaatgatcatgctaatagtatatatcaagaaataaaaaatttaatgcaaaaagatatggatgaaaaaaaggaggcctataaatccatagacggagttaagctagagtcaaaatttctttatggcgatcccgctaatcatatcatagattactctaacaacaatagagttgatttaatagttatgggaagcaatggactgcaaggtttagctaaaattaaaggacttggaagtgtttcaagaaaagtatcggaatcagtttcatgccctatgacaataataaggtaatagcattagtaacgatatttgataccatatatagtagatgatgtatatttttccaataagacaatgtttgatagatatagtccaatagattattagggatgagactatgtgacaaaaaatagtttattgaaattcatgcctttaatttaataagtataaggagatatacagtagctggatcccaaagtagtatcaacattattttttattataaattgcaacaaaattcattttgcttcaaatcttattattttaaattaatatagaagatgaaaagaatcctataaagttccaatcaaaaataattttttcaatggcaccattaaaccataataagccaaattgtaaaatgctgccaaggcagctacttccgttccgaaaaattgagatgcaaatacaactacaagtgtattatttatataactcataattacaaaggcagcaattctagatgatttatccttttttcctattatatatgaagcaaaatagcctgttaatccataaataaagaataacgcaaatgctgcaataagcattgttactacaaataaagactcagagatgaaatagtcagagaattttgcatatattcctagattcataaacgatattagaataactgaaggtatgaaagagccgacttcaattttttttgctatctttggagccttcccctttactaaccaacctgcaaataaaggtagaaatagagcttcggctaataatattgtcatatctataaaaggaattttgaatttttcttcatcgacgaacagatagaccagagagggcaaaacaaacggaacgacgacagatgatgaaataatcattcctacaactagtggcagttgattacttctctcaaaaacattgattacaaatggcgctcctaaacctgtagatatccctgaaagaagtaagacagcaatagcaagcgatggataaattatatttgtaactgcatataaaataaggggaattaccaaaagtttgattgcagtcagcaatataataggaacaggccttttaaactgtaaccctaaatgttgaggattcattttaattaaatttagaaataacaacaatcccaatagaatcaaaagatgaggttcaaaaattattccaaatgatggtgccaatatacctagtaccgttgatacagcaattgcaataaaaagaaccaaatcttctttctctaatccagatgtatgggaagacgggttggctctattttttggcatttttctgttcttttttgtttatttatgatgtatattaataatgtcatttgttgaaaataaggcatcgcatacttggagtgatacgattttgtgtataaacttgcaattctctactaagtcagtttatacaatagtaatgtcaacaactaaatgaacccatctaaatacctaattcataaacttaaacaggttaatttttttgaaataacgccgtgaattcatacataccatcagtcaatgtagctatttttctttcttatcaactagaatttgcttatattgatcgaaaatgatggtaatttgatgccttttaatcgtatattagtaccttttgatacttcagagttgtcaatgaaggccttggaaaaagctgtagaattatccgtggtgaataaatctcaaatctttatactacatgtaattaacgaaataccattaccaattcactattcaaaaatagaattaaaaaacaatgaggtgaccatatctccactagttaataagctccataatgagataaaaaacgaaatgattgtgattatggaggatgtgaaaaatacatatgctagacaaaatgtttctatcaccacagaaatcaaaataggtgatcccgctgaaataattattgactttactaatcagaataatatcgatctcattgttatgggtagtattggacataaaggaatttcaggaatgttaaaaaaattaggaagtgttgcaagaaaggttgccgaagaagtacactgtgcattgttaatagtaagataactattgaaagtttattgaaataatggaatctaatttttatagtataagaaataggcaaatctattgaagttattttcaatctaattcatggtcctaatcaagaaatatataaattcgaatgaaaatattccacctctttatactttttgtcgaatagtcaacagcattctttttaatggcctgatctaactataatagtgtatcaggattctgttggagcaacagctttcaactttggacttgtcgtagttgatatgcaaaatggctttgtaagcaaaggtgggtcctatgaccatttgggaatgaacatccaagaatatcaaagaattattccaaaagtaaaggatcttattatgttttgcagagacaggaagataccaattttttataccgaagctgttagagaagctagtggtattgaccttttaacccggtttcatagacttttgccattagcaagggaagagcggcttaaagtccctatcacggtaagaggcacatgggacgcccaaacaatagatgaaatcaaacccatggcgagtgacctaatagttattaagagaagagatggtgcatttcaggatactgaactgagggtttggcttcaaagtgagggaattaatacattagtgttctgcggaatcgatacctcaatttgcgtagaaacgtcattacgtgaagcatttaacattgggtatgatgtaatattggtgtccaattgcactgcatcaggaaacaatagacattacgaaacaacattagaaagggtgaaagactattatggtctcgttctggatacagaacgtttctataaattgataaattcgcttgaagacttgaaatcaggcaaaatggataacaatgaactcgatgagaaatatgcaaagtttctaaaggaatttcgtctaatagatatcaggaagaaataaccttcgatactaaacagaagaagatgaatcgaattggttaattattagttttttataatatttttttaatatatattcatgtcaaatacaaaacctaaaaattctagaagagccgatcatgatgtcaatgcaatatttgttaaccggtggtctccccggtcgatgacaggcgaagaaataactgatgatgatttgatgagtctttttgaggcagcaagatgggctccttcttcttttaataatcaaccttggagatttatttattcaaaaagaacggcaagggaatggaccaaatttctggatttattaaatgaaggtaataggatctgggctaaagatgctggggttttggtagtaataatatccagaaagaactttgaatataatgaaaaaccctcaataactcatcaattcgataccggtgctgcatgggaaaatttggctttagaggcttcaactagagggattgtggcacatggtatgcaaggatttaattaccagaaagccagagagagtttaagcattcccgataattttgatgttatggcgatgattgccataggtaagaagggatctattgaaaaactgcctccaaagttacagcagctagagcaccctaacaacaggaaaccactaaacgagatcatcatggagggaggttttaggtagaggtggtctaaaatacccactcaaaaaataccacaggaaattcagtggactgaaagataattttcatttaaagtatttgaaactcgaaaagagaataatctaaatcccaagaaagttatttctttacgatatctatattagtaaaacagtaaaacaatcaataatctctttttaaatttatcctatcaattagtggataacaaatactcattttaggtatgaatagtgggtgattttatgattcttcaacttaatgcgaaatcgctgttaagatatttttatccaagttatatgttattttgaatttactttattgctttatccatcattattcaatttcttctaagtgttttcatagctgatgcccaagcgattacctcgtctaacatattgtttgccgatttctcatgaattatatgaggtttgaaagttgaaaagttttcaaaatctgtaaaaagagataactgtacctgagcacgaactgttgcaattttaacctctgccataactaaccgcagatgttcaactgcacggacacccccagcgctaccataactaacaaatcccgcaactttgttgttccattctttaaagagaaaatcaatagcattttttagtgctccggaaatcccatggttatattctggagtcacaaatacgtatgcatcgaaagagtcgatttttgtagcccaaatttttgtgtgctcctttgtgtattgtcccatagaaggcggaatcggttcatcaagcaaaggtagattatagtctttgatatctaccaactcatagtcggcgtcgtctctccgcttggctaagtcgtatacccatcgacttactgcttccccattgcgtcttggtctggtactgccaatgataatggcaacctttagtctttggtcattcatgtagcaattatactgtcatatcaattatagtttattattttcaaataaaattagaaattgagcatatatattcatctggataatctaactaactattttattaaaataacggaatttaatatacaaagaaaaaaatccgaattaaagtggttcctatgaaaaagtagcactagcatcaaaaagagacaacagaatactattataataccaaaattatttcaatcagaattcttggtacgctttgaaattacctacggttcattgataaacaatatagagtttatttaaaaagatctacaagccctatttatgaatgattataacatttatagaaaatgttactgcgttaaatccttttactaaatggcattttcaaatatgaacttcaaaaatggagtcaataaacgatcaaaatattatgccgagatatgaagaaaagaaatacgaaaatctgtattgaaattttttggtggttagaccatttgtcccattgtcagaccggatctgcaaaaatagatcggtactttgtataaggagtattagtatcaggattaatgtatttccaattgttctcaggcactgataacatgataaaatcctttcccgttttttcatccaataacttgaaggcattttctcctaaagatatactatttggagcggtcagggaagttatttttgatacgatattcatacagtatcctaagatatcgattggagaatttttttcataaccgtattgaatgattgcattttctccttcgtcaatacctatcttgaccttcaattgcggataattatatttttcacttaaaattgaattaatctctttttcaataacatcgatgattgatttagcacactcgattgcctttgtacagcttatatatttagtatttttatctacatacggaaaaaatgaaattactgcatctcctgagtattttaatatataaccgtgatagcgttcaattacgcttgataattcatgtgtaaaagcccttattaataaaacaagatcttttatgggcaaagtcatactcatttttgttgaacctacaagatctgcatacataatgataagacccattttagaatttctatggttcatgagaaagacttgacttcgtttcattgcgttatttatcatcttgggccataaattatccagaataagcggagcatgtacttggaaccaatatatcattaactcttcttcctgtttactatcgttcaatattttcatcactacatctttattgtcaaattcagttgtttctgctatctggatcaaggtttggtaggcaattaactcatcatattctataatgtaatcttgttttatttttgcaaattctacttcttcaggaatcataattttatcttcctcaactaattttttattgctagtgtctaataagctccctgaagtttgagaactattttttattgaattgtttgcttcagatagaattggtgtgaatgatatatttaggtcaatatgttcgtatctttctttaaactcaaaaattatttgttctaatttgtttttttgatttacagtgtgtttcaaatgtggtttcattctttgcctcacctcatctttagaagtttcaccgattcggactggcaacctttctacagcagcttttcaaggattaatgctttatcaagatattttactagattctttatgtgaaaatcattagttttttgaatcatgccatacctatactcatacgaatgttatttaacaataataagaaatcttaactacgtaacatgaatataatatataatgaatattaaaatgtgaaatggtcaactcagattttcatccagtcctgttcctctaaatagtttattagtctgagcattccatgtatccttatttctccacccacctggtttttgcatacttcatagtgttttaataggcttttgtcttcatcttcagacagcaaattacccgattctattaaatcaaagaatttgtcctctttcccagtatgatcatctatgaaaaccgcatatgattttaagaacctcgccacgggttcgtttagattactcttatcattatttagtaacactttgctgttatctttaccgtagttttcttttaacacatttatttctcttctcaacatttttgctatccttcttcctaattcgtgttcgatcaaaaacatacgaacttcctctgcaaaactatcttttcctcttgtttcaggaaagtatgctgtttcttctttaccgtgatgaaaattatctacaaactcttctatgattactgatatgatttcaatatgttccaagggaacttttttatttgcatacaaattctctgaacatttttgcgcaatttttcttactcttcttattgttatatgatcgtttttcagattttcagtagaactcaaacaactttgttaagtgaataatacttttatcttttattttttaatttggattgacaattcaattctctatgaaaaaattatagggtaagcaattttgtcttaatatatttaattatttcaaaagagaaatcactatggttaagtaggatattatactaaattcgtaaatgcaaaatttcaaagcaatattattcatagctctattgttaactacgcttgcatctataggatatatttcaaattctgtaattgctactcaatctgatttcactggtcttaaaagcgcttttggacccataattggattgagtgtaaatgacacaggaaatgtagattggctaatgtccgggaattggagatcattattaactggcgatccagatagcaatcttatcctatctaaccagtcttcaggcgcatttacggctgcaattgagatgataagacccgacggtactgatagacatactcatgctctaacacattttgttgtaactgacagaatgcaaaatgctgataacaattctacaacaattaatggcatttctactatgagcttgctagagggtcctgcagtagatattcctactacaattgaaagatcaaataactggaatgtttttgtaataacgatagatcctgaaagcgttgattatcattttggtaaatcgccatttatatatggtatcagtgccaatcctgaatttatgaaaggtctacattctcccagatagaattatccgattctaagtaaaaaatcagatttttacttttttctaaaatacattttgatcttattttcgagtcatgttaactgcgtttgtcgtaacaaatagtattaccacaacctattttcttatttataggcaaatccatcatgtgggccttgattatagatattattagaattaatcctacagggtgagattgtatttctaatatcatctctatcatcatccatgattctttatggatagtttaacgacatattgagaaggtggaccacaacctgggggacttgtcgttcctgaataagtattttcttgattgttttctccattaaaggcagttaaatttctcaaagattcagacgataattccaacatgtctataaatacaaggccattacatcctcttggaatcaatgcaggtgatattgaactaataatatgcgtaccttgaactaaactagtaacattataggacggttccattaattcaattagtgtatttctaagactgactaaagtaaacgatggggagccatcttccttgtctagtcccaatatgtatactttaagagtatcattttcattattaattgaaaaaggcccaattcttagatctgtagttatgttcgagccgtaccctctaggtcccaaatatttagttgcagctaaaggtgtatcattgttcttttgtccgcttatgcctatatataaaagatccgacacaggggatcgaggtatgtcaatcaatacattttccattgatatatagattgttagaggaccatgaacagcgggatcatatttggtcaacatattgacaggataaaccctatctgattctgttacctgggaaatctgattcatggttatattttttttcgaactgtcgatcaaaagttcgaaattgacatttccgctctgcatattgtttgacaatggagaatcgatccattttccagttattctgctaaagttatcatctaacactccactaaaaatattttttattatgcctgatgcattatctggggttgtagtacctaaaatccaaacagtattgtttgtttgaataatatgataaagagcctgtttatctgaaatgtaaataccgctaatatcaatactgttgcttattggcgattgtgcatttgcgtattctacaacaatcatacaagaaattgaaacaaaaacaaagaagggacaatagataataactttccgcataattttgcacatataattaaatattatgagtatgatttaaatttaaatcttagatcataataacaaatgataattaaaactcgagtcgggctggaacaagagctcctatttgactgattttttttatataaagaggtagattggatgtttctccatatttagatcgcaattaattcctatgcttatttaataattaatatcggctttttagtatgatgaaatacattatggactatacttcccataatggctgttttgatttttccagttcccctacttcccataattataacattcacatcgtgcttatcaacatattcatttatgatagacgctacataatgtccctttagcaatactggttggtaatttacattaaattttcgagattttgcatcgaatctttcaaaaacttttttattctttttctaaagaattaattacagagtcaacaaccttttgagattgaacatagacaactggaggaatttctagtacatttagaacagttaactttgatcctaatttggaacttaaataaactgtgttttaatgctctaaaggagttatcagatccatctatcaaaactaggattttagagtacataatataccatatgacaacaaattataaattgctattcacaatatgtggtctattttatctgaattcaaatcagatgttaaatctctcaaaatcaatatggaatgatgtgaatcctgcacattacccatccttcatttaccatgaaactaaaaagataatggatagaacagaaggctacttgatactacaaaactcgtgttgcactttaactatttaatactatgctacatgaaaagattagttcattttccaaattcttatctctttaagtaacgaataatatagacttgataaaagaaaatacaaaatgtgaattatttcctgagacttcctgtacctgtggttactgttgtgtagatggataacggaaagatcaccaccgatttacacattcgtaaataactcaaaaaaagattctctcagtgatgcagtgaattaagattctatagatatcatatatagaaaatgaattaatttttttttactaaaagtagttgaataatggctacctacaagtgtaatgaacctcttattaggatcgacaactaagtttagacaaatcgcaaaattaatttttataacacaagaaataagaaatttaaaaatattttctgctaattttagaactgatatacaagaatgtgacaaatagtgatatacaatatcataacaatgtatctatgtttaggacccgagtaaaataaaaatacaatattaattttgttgaaattggcgtcgtaaaaatctgaaaatatggctaatcgcctttgttaatgaagctaattgacacatctaattctgttattgcgtcaaattttctgactgcaataaaataacgttaaatgatatatgtttgccaaaaaatgaaatacgttcaaaagaaaaaaaggtagataggcctaaggtaatcagatgtcgctatcgtaaagtcgagttactacctccgccactgcctcctcctccttcttctccaacatacttgaatgctataagcgcaccggggctccacagggtcagggtcggagtgattggaccatctttcatggcttgcactggtcctctcgggtcagtaattacatagattgtacttccatctggactaaaaacaatatctcggtaacgattctctgagcggaaaagttcttccggttcacccgagactgacgtaccgttttcgtctaatgttattttaaatatcttacctgcctttaatgttgtcattagtaagttattctcccaacctggaagagcatctgactcataaagacgcaagctcgagggtgcaacggttggatagcatgttgaggtcatctctccacatgacttggctgcctctgtaaagttaaaacctttatctaccgtgtaaaaagttttaattggaggaacaaaatttgtggcgttgaattcgctttcattttttacaatcacaccagcaggtgcaggtgcgacatcattaaatgtcaactcactacagttctctgcagcagaccagttataatactggtatgctttgtcgtcaataaagccagatacatagggccatccatagtttccacctgctacaagacggttaacttcgtcatcagaattatcaccatgttctgcaacgtagatgtcaccagtagaaccaactgctataccttgtgcattacggtgaccgtaggtgtagacgtgactttggactccgtttatgacgggattatcttcagggattgagccatcggaattcattcgaagcactttgccttcataagtactccaattctttgctgccacgtcctcagcggttggaagatgctgtgccatattattcaaacatgctaaagccagttggtttttgccctgatcaccaattgtgtagtagagcttgccatcgggtccaaatgtcatacgaccagagttatgatcaccacttcctgaaagaccactaattaggtcttgtggttcgctaatattgttaatagatggatcgtatgtaaaccgagttattttggtatttagctcaggtactcctccttcagctccactacccgacttcccctcataagtgtaggcaacgtaaatatgatgtgtattgttgaagtcggggtcaaatgccattcccagaacaccatcctggcctttagattggttggcgttagggatggacatagtactcagctttgtaccattacttggatctattcttgtacaatattctttcctatccgttctgtgatccagagtgtatcgtcaggaccatatagaagatttaggggcgcgctaagatttctagctaacacatttaccgagaaaccctcattattcaaaagttgctcacgggcttgctgttgtgctggagttaatgtttcattatttgttaaaggaaatggatcttctccttgtgccaataccgtctgaacaatattactggctgtaacggtagaggaaaaaccactaaacatggccggtactactgacaaaagtattagtccaaacaatgctaaagtcttgatattgcgattaaaataaaattttgcatttatatgggatatcaatgcagaaactaatgattaacaaactatttaagaaagtatttactgattcggtatattaaattacaattattgtacgatcttaggtgaggtgtatgtttatagttatggttaaaaagaagatcatcccaaatcccgtctctcattctcttaatctaacaaattaaacccaaaaaatgatgaccaatttcattgttgactgtaaccatccccttatcaggttggtctatttatttgacgataatttgtgactgatctagatttaagtattgagaacaagtgatactatttattagtaatataatatgtccttgttcaaatatttgtcttaattttctattagaaccttgttatggggatatgtaaattatactactttatattgatcgattatttgccaaacaatagcaaaatagacattcaaataagatagttatctcaattgccctaaaagccttattactattaatctttttacaatactatatgatctcacgaaatgccatcgccaaagtgggattatttttgggtccgattctattcttgataatagttatctcgcccttattaccagtagacgaattaaccttagatgaaaaaattgtattagcgactaccgtttggatggcagtctggtggataacagaaccagttcctatatatgtaacagctttgatgccacttgttttgtttcctgctcttagtgttatggaatttgatcagacgtcgtctaattataccaataagattatcttcttatttttgggcgggtttttgctagctaaagcagtcgaaaaggtaaatctacataaacgcttagcctataaaattatcaagatatttggaacaactcctagaatgcttgtggcaggatttatggttgtaacgtggctactgggagcttggatgagcaataccgctacagctattctgatgctcccgatagcgttggcaataatttcgatgttaagagatgttgaaaagcatcaaagatttgtagtatgcttattactatccattgcttatgccgcaagtattggtggtgttaccacattaataggaacccctccaaatgcaatttttgcatctctagcatccagtattgctggggtagatgttacgtttagtcaatggttattaattggattacccattggcgctatttcattattcataacttggcaatatatgatccgattcggttccaaaataaccgatatggggcaagatatttttggagaaaaacatgctttgcataagagattatccaatcttggcaacatgagtagagatgagaaattggtcgctatagtgtttataatcacagcaatagcctggattacaagaggaatcatatggaaagatattctaccgatggtagatgattccatgattgctatagcagccgccatagtattatttatactaccttcaaaagaagaagccaatgttaataatcatacatcagatgatagaactgatgagtgggccagaatgcctcaaaaaaaaattgacgttcaagagaacgaaactaacaaactaaataataataatgtaaacacatcgtctaaattgctggattggaagaccgcagttactatcccctggggtgtccttatccttattggagggggcctggccctcgcagatggatatacatcaaccggtttgggagattggattgctcatcaaattagttttatgagtggtaccaattatcttgtcatgatcctaattttcgtgacacttgcaattatacctacagagatgataagtaacactgctacagctgcattgttacttcctatctcggcttcacttgcaatttcgatgaacatagatccaatcctatttatggcacctgtagctatagccactagctatggttttattatgccagtgggaactcctccaaacgcaattgtttattcaaccggtcatatcactatgggaaagatggcaagagctgggattcctctggatcttatttcaattgctttagtaaccatactaaccagtatccttgttcctttggtattttgacgaaactggtcgataaagaggaactgaaattaatagatacgaatctttttttctttatctatttataaaaacaaattaataagcagtattagtctgccaaaaataaataagatttaaggttattacaatctttactgatgtactgtacgtttggtcatacggaaatcgaaaatccattatccaataatgaccttaaggtgtaagagtagcaactaaattgctaatagatgagatgttttaaatcatcattactatgggaataatactttgaatattgttttttaatttctatcttaaattatgataactataaaattataacttcactgatagaaattaatgtaaccaactaagaaatccatatctgttagctatttaaactttaaaacccaattaattcctatgaacagcggggatatcgaaccaaatgactggtttagacgatttttcaacaatagtaatagattaggatatggtggatatggtgatagtgatttttttgagatgaatccattcagggattttgatgaaatacgctcacagatgcaaaaaatgtttgatgagcttaatgattctaatcatgatacaacttcaaaagaattggtaaaagagtatcagacacccgatggatctaaaatccgacagattggtccaatagtttatggttattctatgaccatagggcctgacggtaaaccaaaaatacaagaatttggaaacgtgagaccttcagaaagaggatttgagatgggtggtagaagcagaccgcgtttgtctgatgagagagaaccactggtagatatcaacactaccactgaccaagttacaatcgttttagaaatgccaggagtaaaaaaagaggatataaaaataaacgtaactgaagattcggttgaagtaaagtcaactgatgctaaaaggaaataccacaagaatatagatttgcccaaaaacatcgatattgaaaatgtcaaatctcaattcaacaacgggattctcgaaataacgtttaagaaaataaaagaaacaaaaccaaagggaaaagagataaagatagattagcagataaccatatacgatcttttcatgtatatcaccgaagttaactggattacagtggtagaaaaatttgttcgagattatttactaaacgagttttgacattgtgataaaatagacccaatctaatcagtataggtgcatagtttttcttccacttcttttttgatttttgaattttatctattacttctttaaattttccaagtttaacaacgttttgccttccttgtacttcatgtttccatgcaataaacccacctttaatagtaaaggcgttgaatccttgtttgttaagctcgtctgctgcaatgtctgctctattaccaacagtagagtaaagatatattggaacttgtctaaggcaagtacttacggaagacgaatttattaaatcaagaatgtaaagtatggtaaccacgggttcggtgggcttcgaatccatgaggtatatgggatctgttaattaaataaatatttgtataaatgagaggggtttagtaatagatatattgagtctaaatgcggcgagaaaataatcaaaatacactattaataatttacaaacaatacataacggttttttattggaaatgaaaaaatagaacaaacattcccaccgacagtaagataagacattgtcttatctttagactatcagacacaaacctattgttgagtagttgattaactataatgctcattatagatactctaattctgataagataagagttaaaataatttagcattttttaaattccaaaaacatgttcctgagtttggattgctataacattttaatttaatcatacaaacggtcttctaaatattgttatattatatttaaacaacataaactagtaatgtctacatgactatgtaaataatgtttgttattggaaattgaaagcaatagttaaatatttcaatcatataaacattttactaatgcaatcatcatccttatcctttcttgtggtagatgatgagcaggaacttgctagtctttatgaagaatttattaaagaaatgggctataatgtgacttctttcaccaatcctttgtatgctttagaacactacaagcaatgcatagacaagtattctttgattttgacagatttaagaatgccgggcatgtctggaatagaacttgcaaataggatacgagaattaaattttaaagttaaaatattcttgactactgcatttgacatagatgatataaaaaattataaaaattatcaaaaagcaaaaatagataaagtattacaaaaacccataaaactttcaacactaaaaaaattcatagaacaagacttggtagtccataatgttagtaaagataacaactaataattaaccattcaatagataggtcagtaattcaaaagagaagcgaaatagattcaactaatctaacaataatgttgttggtatgtatttaatcctataagtttgattaatgagcttctatttttatgaccatgccatgatgtttcactagttcttgtttttgttcttctgttagtctgtcaaagtctttttggttgtatatacaaaacgctttcatgtttagatcaaattgtttaggtaaagaacattcataatctaaaagctctattgtctttcccataaagtagaacgcaccggcatcagctaaaatagataatcccatattccccattttttccgcatgtttaaccatttgttcgttatcggcccaccagttggatttaccattcaccatgtttgttgtctttttgtttgattcattctctttactttcgtttaattgttctacctctaaatttacatctgcaattcctcctgctttttctttttgacctagatatttctttaaagaatcgccaataactagtcttttttcttttttttcgtatttttctacatctattgccttgtatccagttgctaaagtctctcttactaaatctgtggtttcgtagaaaggattgataatcacaatctcttttttttcttctatttgtaattgtgtataatatgaataaaactcacgtagagttatcaaatcatcataaataatcgcataatgtaaacctggatttgaattagttgcatgattaactacatcctcgatctttatattttgaattaccttattatgatcggtggtaattataagtcacctctttttcaaacaacctcgtttagaccatcaatgtatttatgattaagtaatatatagtatatgtatttcaacgtcaatgtaattttcattattataatgatgataggaatctaaggtatatgtttccggtgtctctgaatccgggtccgaaagaacctgctattatattatatgatgaaaatggcgttgttgaaaatatactaaaactgtctaatttctataatatagttgagggtttgaaaacgttgattaaatacttgtttcaattttgccgttttttaattgaagattataaattaatatctgtagttaaattaaaaaaatagtaatagatgtcatctatttatttagcaactctctaccgttttcatcaactatcgattgaacagttccgaatacaggaagccccttaaagtggtcttcagtctttgaggcatccataccaagatttagtatgtttccgttaaagagggtaacatgtattggaacaccttgccattcaacattttcgtttgttgtcaagtcggctgtacctctaaacatggtagtattaccgtttaccaatgcaatctttgaagcaggttcgtcagtcatcaggtccacttgttgtggttgttgaggactaacgggcattccgctagcattatttaatttctcgatggtgtgcttatgtgcagctgttccatcaacttgggtcattgctatatcaacaacaaagtttgttagattgccatctgcaacattaaattcccaatcaccacccaaaatccacattacattttctgaagaattatcggtccttcctgccaaagtatctgaagctatgcttgatatctgaccttgagcacgaaaagtatctattgcattggttgaattatttgagggtgcaatagtattagtggcattggtagtattagttgagttggtagtagtattttgagccaatacgttttgactcaaatagatacttccaactgtcaatgaaagtagcgagacgagagaaaatactgcataaactattcttttagattcattcattatcccctattagctaaaaaactataaaagcttgataaagtttgtccattctgagtaaaagtcaccaatggaagatacttctaaggaatatgattcatgctcttcaatacgtcatagcaggttttagcaatggaataaattaaatatcttcaaaaagatatggactaaactattgagtctataatagaataactggtattaaccgggattggcaatcaattgattctatatccgtgaaattacctttttggcggcgatgacagaaaataatctcattatctaaaggggcaaactgggcacaaaaaacccattttaacaaacaaagaggaaattccactatctattgtcatatcgtttactagtctccactatattaatcgattaacaaatgtacttgataatataaaatagtaagatcagatagatcaagattctttgtttttacagtatcatcgttactttttttagtgtgcatggggtggtggtgcgctaccttttgagagtgattcattatacgtaccttcggttttttcgtgatattccagattagattgatctaccttgattgcctgaggaggacatacagatacacaggccatacaccaaatacaatcatgttctctgattggatctgacttgtcggtataatcttttctttcttccttttctgtgctaccggttccttcacttgtcgcatttatcatttctattgcaggaacatcttgttctgttctataccattgaaatacttgtacaggacaggcttctatacaagctccatcagcataacaagaatcccaatctactgcgaccatagttccgtgaactcctaatcctacgtattcttcccctcttgctttatatgcatcctgaacttcatcgctggtggaggtttctgcatctgttcttcctggaccccaaacatagtgaaagtgttcattatcagaatggttatgttttccaattactttatgattttttggaaaatctggatctattggcatatcgaaatacgtttaacaatacttataaccgcttacagtcgtatcagagtatagagtcatcaacacactttagctaattttctctagttcatatttgtaaaagacaattattaatattgttatataatttattttatttgaagaatcatttattaatttaagatcatcatctactttaaatgtaaaactttatgttttgcaaaatgatattttacacttgcagttatttcatattcttcatttatttaagattatgtcacctagttgttttcgttattaatgtgcctgcactttgtttctgattttatcagatagctcttttatctgttgattttgttgatgtatacatgtagttagtttgtctataatacctttaaagtctatacctttaacatctttctcacttatgttactctctagacctccaaatattgtattgtgcatatcatgtaactgtttgtcactataattttgtcccataatattgtataaaatcctaatagtgttttcttgctgtcccataactgttaacatcttggcaatatttatgataacaggattgtcttcattatagactttattgtagaattgcatattaaaattagctatattagcaattacatttgacggaatcaaatcattattacgttctttattactttgatttttatcattcatgccgtaaaataggaaacaaagtatataattataatattaagttcagaaaattataatcatcacttgtttatcaggtattaattaattttagaatttccgaatcattctaatttcttcttttattatcatcggattatttaaagtactttgatatttaatccatctacaattttgaaatcctttaatcgataaaaacgtaaacacaattgtcttccagcttgttatcatatgtttttaggggaagatttgctgaaggattttgcgatataccggtttctaattcaaatctagaaaaatgcagtggacatgttatggtttttcgtcttcatttaagaaacctgtcgataggtcagtgtactcatgtgtacatattctatcagttgcataaattttgtcttgtattttagttacaagaatctttttatctttgtaatcaaatgccacaagtttatcattatctaagacgtctactttgcatacatttatccatgccattatctatataaataaagaatcgtcaataattgttattcctttttcaaatgcggtgtttagataaagaaatatactataaactatcattgctaaacatcaattactaaaaaatactcttagatagtttttactctcctaacatacaatctgtttactacaatgaccatcaatcaatgtttggttatccaaatcgtctattgaaatattcataaaaaaaagttgaatgttaagatcaatgcccataatatttcaactaaacttctttgacatttcttcatgaactattaaattcgcttcatctactttgatagaattagttggacacactgtcacacatgccatacaccaaatgcagtcgcgttctcttatcgggtcggatttatctgtataatcctttctaccttctttatttctatcatctcccgtaccttcgcttgtagcattagtcatctctattgcaggaacgtcttgttctgatctataccattgatacacttgtacgggacatacctcgatacaagagccatcggcaatacaagagtcccaatctagggcaacgaatgttccatgtactcctaaacctacatattcttcttttctttgtttataagcctcttgtacatctgcattttcagatgactcggcatccgttcttaccggaccccaaacgaaatggaatcttccatctgcattcttatgtttcccaattatttgatgattttttggaaactctgggtctattgtcatgctatttatcctattcattcaagtatttaactgagtgagattcagttgcaaacatatgtgtttatctaatcttgtctctagtctggatgtgatagaatcccaaaaacaaaataatatattataattgaattgtatgcttgtaaccagtgggctaataggagatagataacatctttaaattcaacaatctttgtaatttaattctactttgtctaaatacaaaatagtatctgtaaatcaaaatattgcggagtaaagcggcatgactttagcactccagacatcttcgcaactaaaagtattagtcaattcgatagcgattttcatgtaaagacaaggaatttgaatttcaatattgctaaaataaatagaaaataaagtaagtgatttactttattatcgtgttagagatgttactataccgtacaatggaactgtaaatataccttctgtttcttcatgacttagagtcaagctagcgatatttccatttagaatgtataacactactggaacatcagaaaatatagtctctccgttaatttcgatgtctgttgtacctgtaaatgtggtactatttccgtccaatgtgattgaatcacctgaagaagtatctaaaggaccagcgtcatttattccattgattgcaaaagtgccctctacatctccgccgagtgtatatgaggttgcattccatctaaagtcctgcagttgaccatcagtaacaataaaactccagtttccaccaattactgatccgatggacggcccaatggctgattcattttgtgtcgcttcaacttgggttatagtaggaggtagtgtgagtagttgtcctgtatatccagtagcagagaagctatcaacagcttcttctgttgtttgagccattacagatagaaataagttgttatttcctattattagatttgctgtaaaaaacactgccaccataaaggttaaagtgaattttgaatttattgagagtttattcatagataaaaataatccaagcattaggatataaatacgaggtaccgattgcaaccaattgcaattagagtctatattttacaattaaatgaactcctttagtaactattttaaaattctgtttattgtgataatcataaatacttatctatataagacaaatcacaaacaagggttacactctaacaattggactcaaattgcctttttgtaccttatcttacaatatatctaattacctgtagactattaacatcatttctttaattcgagacaaatccaaaagcattagagaaagaaagacgatatagattgtgtatcgaaattaatttcggtggccttcatttatccatatcagaccaattaagattcaacaggcgacgatgatgaatgcggtcttgtaagagaatgtaataatgattccttagttataatgaatatgcctaaactataatatattataagtagataatgaactggacaaatactgatacaataaaaaaagaagataaattttgtctgctctaatctggatctcattttagaggattctgttgcttctcagttaacagacctttccaatgacttggtagattctgtacccaaccatcatatacatttggaattgcaagtactccttgacctcctgttccttctagttctgttacctcgtcatcggtcattgtgtcaggggaagaaaccagtgagacttttcccacaatctgggcatctctggaatctccatcgttatttggatccccatctactactataacctcatttgagaaagtacttgaaacatatgcgtaatatcctccacctttctttgcaccgaaattaactccatggcatcctgggtcacatggtaattctttgactatttcatcagtatctgtatccagtatagttatcgtgcctccagtgtttgcagttaccatgtattgaccatccggactgacgggtgtctgtattggaagaaaaccaaccggtccagttgtattacctgttattggatcataattggcaagtaggttaattttctttattagcgtcgcgttggttgtatttatgacacttatagtactatcaaaaaagtcagcaacgtatgatttgctcccatctggcatcattccaactgcaacaggagagacacctgtcttcacttttcctattattttaccttgcatcatatcatatactgttgtagttccagtaagtgcatctggagttaccatgtatttgtcatctgaactcatccaatgaccgtgtggatgagttgagggtgctgctggagattgtaacaagatgaacttttcaaggttaaagtcaggatttggtgacactacagttacaccatcttcaccgtttagcgctatatacagttcgtcagttttagttccagtcataacatgagatgggtcatccccaacctgtatgtccctcactagttcaccagttgtgcggtcaaatatggttgtcctgttatcaaaccactgagtttggtaaatgagttgttgatttttgtcagtccacatgttatgaggattattcatattgatttcaggtagtgaaaccttcttacttacgctccatgtagtaccgttgatggcagttgcggttcccggtttggtttttccagcagttttttcaaactgtgtatcaatccatatttctcctactgcaggaatcgttgggtttgataaaggagtcaaagtaatgttttgaccataagtcttttctaatacatctttgacattaacgacagtcccgtttgttactctggcatctacatcaggatatgaaacatgccatggttgggagatatttgtataatcctgccagtttgatggagaagttgcaataaaaaatgttcttaacaactttaaggccaattcactatttgtgggaatcgtagccccatttatcaaagtaagttcttcgcccaggtccagtccctccgtttccggatcatcaacaataatagcagctagcataaagggatgaaggccgcatgcaaatacgtaaagaccaggttcttctagcgcgacaatggctcctcccttatacgccatcatttggctaaatggcatatggctagcattcttaggatttattatactagttacggtgtgaacaccattagtactgtccatcatgaagttaactgttcctgatttgttgattattgccaaggattcactaccagtatttgatatatccccatttagattcctaaaccattttgctggctcatcgctaacagaaaaggatgcgaaattgtgatatggagaagcgccagggatactatcttgcactcttgtatcgttacttgacgttgtacttgcgggaagtactctaaaggtagacatcatacctgcttccatatgagaaaacacatgacaatggtattgccagtcgccaggacccacaccatcacctacatctatgacaaatacatgggttttacccggatgtatctcttttacatcaatgatattactagtacccggatcaacccatctgtgagcgtgaagatggaacgtatgagagtgaccattggggtttgatgacggacctattccaacaatgtggaagcgaatcttttgattctcttctgccactggtactgggtttgtccacagaggagtttgagtaccattcttagcaatttccattccccaaaaggtggaccctaccatgaataataggacttctttatccaattcatcggtagatatggaagtaatatttccgtttattagggcctctatcattttgtcttgtggatttacgattactacaccgtaaagtcctctatcgcctaatttgtcatcttgatataggtatgttccaggattagatgcaacaaaatcttcttgggtggtattcccgtccagatggttgattgttacatgagcattatcaccctcgcttatcacgatagcaggtccaggaatagtggctgtatcactatagttatttgtgatatttaatgtggtaccattagattgattaactacatgttgaatcattttatatgctggctcaccatctggcagtatttgttcttctatcactatatcatgaacatcagaacttgaatttaggaccatatctccatcagttgtatttgacgaaacttgagatgataaagtatcaaataccttactatcatcgttatttgtctgagctatgggaataaatggttcagttcctcttgctattccaggagatatcattgttgaagtcaaaattagcgatgcgataactgctatatagagaacatttgttatttttatccatcttgtatgactattatcgttgttattatatgacattttaaatctcctctttatttattgaattttcagaaacttgtttacctacagaatcggatataacaaaatctccattcatacctccgagaagattaatcgtcgaatcatcataatagcttgaattattattggcttcaatagtaaaaacatggtttgcgagaggacctattatgtgggagttgataatcttatttgttcccggactgagccatttgatatcatccattgtaaaattgtgaaactcgtttcctgttgattgaatattgaatctaacggtactattattggctgcagttaatgttggattagttcccaattgtttatgctttccaccctttgaataatctatttcagttccccaaaacacatcatcattgacaaataaaatatagtctttatcgatatcgctgacatttacctgttttgggacaccattaatcaaagcatttacttttccgtcagagggatttattattatacttgaaaaaagcccaactgtctcaagaccgtccatgcttttacctaaaacatttctccctatggtatgatcatgaaaaggccatgagccagccgtaccattcgcagcattccatttaacagtaaatggttttgtaggagaagcagcctgatcagaaactttgtttaattcctttaatgtaccgtcagaagttattttataatgtgcaccatgggtatgaacacctggataaccccatcccatttcattaacgagagtgatgattacctcatcgccttcatttactacgatggtaggtccaggaatagtagtctcattagtataattagaagtaatgtccttagtttcattactatcaacatctcgcaccaaataactgttgagattgtaagcaattcgatcttcacttagttcatccacgcccatctcgatttcatgggattttatatgacggttttcttgttctaactttgtgtttgactgagcaaatacatttccagcgccgttagatggtaaaagatttgcaattatcaaaccaactgcaagagctgttattatatacttcaatttggctaatttgtatatgtacattaacttgatcgtatagataataaaacggcgttatataatagatcggtattagatgcaaatcttagtaatctgtagcaatcatttgtgtacatgaacaacaagtctatatggtactgcaaacttgatgagtatcagatataattgttagacagaagagtcaccaatatagggatcgataaacgatgtttaaatgaaacaagtctaaatagataatgaaatgaaaaactaataattattaaggaatttgtcatatacatttatactctttcatacaaaccaattggcacaactgattacaattgcttaaaatgcaatccttagtttagaaactttattatatgttcgatgctaaactattatacctgtctgtatctcagcttgagcaaaactgattacctatgccaaaactacaacaactcagataaattggcttattgaattaagccaatacttcctccctgcaccaatattcatgcatggttgatgggatatgactcgacgtgtgctagtgctcttcaccaacaaatcaagacattctagtgtatcccatcaccacccatctattctgacaatttgtgatatggtatacaattcaaacaaaaataataccgaagtgaaaacagtattactgtaattatagatgagaacgcaaatcgtgtttctagtcacacagttcactcaccatagcttcttttaatgaatgcatatgtttgcaacataaacgtcatgtttatttttttcaaacatttatagttcacatgccaatcgatcaagacttttcaaaaaatcaccagcctgtgagcagaaatcaacatgtggataaagaacactatcgtttcgtttggggtccaggaagaatagatgcagaatcatcaataaataagaaagtacaagatgcttacaaatctagggaagaaaattacgtcgcactgggtatacatgggaccatggtagcagtcgcacgggactcatgtatagcaaacagggattctatcgagttccgccagtacaggtgtttcaatggcatagaaaaaacaatattatacgtaccataaacaggttctataagaaatgattatagtaatatcaaaatttccaacagtatatcaaggtcaagaagaggagtttagaaaatggttcgactggtcaaataatctcctaaaagaaaccccagggttaatttcaagaagacttgcaaaagacagaaatggaaactacattgcaatagtcgagtttgattcatttgacacctttaaggctatgcattctagcgacaaacataaacagattcatgagagaacgtcttcgttatttagtggtatgcccaaaccagagttctttgacttagtaaatgcaataacatgattgtatttttttactaatcaagcaaaatataaaataggttcctttcaatatattgctgagatagaacatcatatgcgatataaagatccgtaattacataagaaaaggctattagagatttatgagagatgaaaatatagcgtatatccagtaacatctactctaaattaatcacataattatctatttgcaaagataatcttttgttggtagtatttactgaggactaatcaaattggttagagttattgacaaataactagacagtaaactaatagctatacaatagcgagaaaaattagaattttacaattatttatgatatttataatttagtaatgtttccatccctaatgcgataattcattagatactaaaactaaaaagaattcatatgttaatattatttgtatttctgtacttctaggtagtaaggccgtattgactattgactcatacacttacctacagaatcactagtaatctgaggaattcggaaattcagattacccataaaccattcctgagagaaaattacttatagtttaacattcctgcattacctgcatttagtaaactattatatattattgatgtattagataatagagattcaaataggggtaacattactaatttcaaacagatattaatagactgggacaattgtaatgctctcaaggaattaccaatgacctgagactgaatttaataagctaaatgaccattacatttgttctccaaaacccaatacaagataacaatcaaaagattgttttgagtaaggtgtaataattataaaacctgactgatcaactaaattttgatgaaataaatatgtagtttattaaagtaacaattgagtcagaggtgtacaacactccaccactgttaatcttcaaatttaaatcttatagtagtattacttatttctatgtttacgctttttccaaatatttcatggaacatcaattccaatataattttatggtacaaagaccaatttctgcccaaatcatgttttagagtatagatatgagtaccattctgatcagaatgattcatttcaataagagaactcttcattcttgcttcaaaccaggagataaatgattctatatccattctgtttttcataaacaatgaaatatcataaactacgttctttcctacatcttgagccattttaaatatttcatcttcgttcattctattgaataattcaacaactataggctttgcaatgggaatcatcccgaccttgggttcgtacataccccattctacatatcgttttagaatctggttgacaaaagtgttcaaagaaatctgatgttttttagattctgttttcaaagtatttaatatctcatcttcaagtctaaatgtcatggtagatgtttttctagattcatggtctttgatatcttcgtatttggacatttgtagatctaaagagacgatagttttaacttcttctttttatccttaatagaaattagagaaaggaaaccgtattccatccaaacaccttctcatagaatgtttgagctctatctgagtcatcaacaggattatcaaaatgtgttacattcggctttttattgaatctcctcatttctattttaataggtttatttcgttttattctgaaggagaattattcataaaagtatactaaaagtcaaattatataaaattctttatggcgatttcaattacactatgctaatcatgaggaaaataatgaagcatttcttaataaaaacaagaatatctaattgactaagtactgtttaatagtaactattctcatccgttaggattaagttccctgtgatagcagggtcctaatacaaaggttaaggtactctatatagtaatactacaaatatgctagaataagaaacaaggcatttattgaaacctcattgctcttctaacagattacctgtaaatggcagcaggtagattctatatgtagaagaatatagaaaatctaattcctaaaataggaatctatttgtgaaacggatattacaagattcttaaaattaataattgccatctattttttatatgttaaacttttatgcggttaaagatgcaacagagcctccaattaaggctcctaatattgctccatttataccaccagcattgagacctaaagtagcacctattaacgcccctgaaacatttactccaagaacaggctcgcttttaatggttgatggaattaatggtctattatatttatttttagcagaatctgcagcaatacaacttatcacacgtgcaattggaccagtattgtcttcaagtatctgcttatagatatcgataacactggtttctatatctgcataatccttgtcgctagttattacatcaataatgcgaattatctcttttgcttcgttttcagatacgattttattctgctgtaatttagataagctatttttcatatatttgttaaagtcatttaattcattatgtgatcttaacatttcatttacgaattcaccatatacttttcctgggctatctttaatggtgtcaatataattttggatatcattatttgacatatggtaaatagagattccaactcctttaaatgtattggatagtaatttcaataattctccttcgaatgcattagtgaaatcacaacaaaacagtatctaaaaagtcattttacgagattaaattcttactgattctaacttatcacttcgtttgttactagaacaatcttcatcgtttattctgatatctatgatattgaatatttactaaaagtaaatctacttgtcaaaatagggaaaccctagataaatcgtataagaaaatatcagaagttgtatttatataccgttacgatatattattatatcaaaaaatgagaagtaatggaatcaaaattactcgtatgggacgatttaagttaggcattttttgaatgatgagttcataactggatcctaaattagtcggaattagatcaataaaaaggattaaaaaaataaaaatttctaatgtaaggttagagttgtaacaatactccgaatatttttaaatagggtgttggtgatatattattgcaaatgatggcccgggtttctgttccgttcaccgagccattattgtggtagaggggaaaggccaaacacggaactggctgataatagcctctctatcagctttaaaaatgcaatttgtttttattaatctctaacaaatgaataatactatactatatagaaatacagtctcaaaaaatcaatataatttatattataattatttgttattagacttgtataaaacagtttgatcatatctatttctttttacaagtaatgccatttcaaatgcaccataaattgtttttactaaatctttgtacattttggagtttttactttcttcttttaaattatcaatattcccatttaaactcgaggtcatctcttcataattattttctgtgtcttcagcataccagcctcttgtccaaccaacaaaaggaaatttgccaaatacaaaacctagctgtgaccaaaatgacatcagttctcctgcaacatgctgaatattatcctgacctccagtaattataaatgcagcaactttatctctgattaggtatcggtcatgtgtaataacttgattttgaacgcagttcattctttgaatcattttgtagtatagcgaactcgcattaccccatcttattggagtagcaattaataccacatctgcccacagaattactttttcataaatctgaatcatctgatcttcactatctctttctgaaatggaacatggaaaaatgcatgcattagcattttttgaatagtatccttcgcaatgattaaattctaaatcccgaagtttgatcatgatagtttccgcccctagttccttttttgcaaattctagggcaaaatgtaatgcgtcctcagacgtgcttttacgagatgctattttatcatttgcgtttgtggttgatatcccaagaattcttatttttttatcatctactaaaagtatattatcatttgatttgtgatccaaaaagctttctaccgatttttctagtttcaaataggattcatgaggttggaaaattcttttcccaactgttgaagggatagaatttacatataacttatttcccgcgattttaatatcataagaattaacactatctcctccttcgtgcagagatttaccagttttcacagagtatttccatccatgccatggacaagtaactatatctccatttagaaatccattactaagcggtcctcctttatgtatgcatgaattagaaatggcataaaatgatccattaagattaaaaactgctatttctatatttttttcttcttcggttttaatggaaaaacttttagattcaccactctttatctctgtagataaacctatgtaacgatatgaagaatgactataattttctcctcctcctcctccattcatgaattcttattagaatgcgatatttctatataaatatctgctaatttttgcattatcatatcaaaattaaactataagataaatcaatgaaagaaagaaaaagaataacactaaacctttgtaatacgagcgaatatattaaaaaaaaattagatgggtatatgattatttgaatgatttaactaaagtattaggaaaaaataatttattttatttctcttagcttacattaaccttgaattcttcattgccttctggcttggttgcatttatctttggtacattgatttctaatacgccatcgttgacttttgcctcaatttgcgaaggaactatttcttgggtaaacggtatttgtctatgaaaagacttgtaagacctctcactatagacatattttttacctttttccttggttttttcagtttgtgaccctgaaacggtaacagaatgcttcgttgcttttacttctattttttccttatttatgcccggtacttctaaattaatttcatatctgtctcccttatcgataacatcacatactggcagtctagtatccgtaattctatcaaagaattcaaagggtgttattcctctcattggagccattgaagatgaccatgcttgttccataacattttgcatgttttgcatattttgtctaaaagtttcaaaaaaatcatcgaaataatttggatatgaaatgcttgatttgccttttttactgttaacttgatttttgacctcaatgctttctttattggatgtactctttgaatcattattggatgactcagatgtcgatgatgacataataaattttagcagaagatgtttatataaatttcatatggcatcaatatctataaaattatcgtgtatagatataaataatatcagcgaaaactatcgctcctctaaaccttctttatggtcctgacgaaaccctttggatcacagaacgagtaggaaaagatattatatgtatagatccaactaatggtacaaagctcagcagcatatctattcctaacgctaaccaatccgcaggtcaggatggtgttctgggaatggcatttgactgcgactttaataatacacatcatacttacgttgcctatatcctatgagcaagattctggtagtggaggagaagacgaagatggttacatcgatgcagagacattaggtcctggagatagtagtgcattccaagttagttcgtttcactagagccttcctgatacggcaagtacatacgacctgatagtcaacgacgatagagtggttgtaggtacaccattggaaggagatggcaacagcggcggctgcggcaacgatgacgagggagatgatgacaattaagtagagtacaaaaagcaataaatgatgaatatttcgtttttatcagtaattttgtggtaaacatgaaaatatagtcgatctttttgagtaattatagatattacaaactcgagaatttttcctattttacctaaaaaactacttggtcatttctatcataattttgttttagacagattgcaaatcctacatgaccgcagtcatcagtatcacaagtaatgcaccatggcataccgtctctgtaaccaacaattacattattttgaatacttttatcaaacaaaattacatatttattatcaaaatagtctttgactactatcaaagtatctccagaatttgtatcttttgatattaaccatttcataaattccatagtgcctaaatcaagggcagacaatgcagaattcttctcagatatttgggattttccagacaagtctttttttatctttcctttccaatttggtacaggtaaaaaaggtattaaagatatctataccaaatcacttaatctctggttttagattgtataaagttttaattttgaaaggaactgatattcttgtgtccaaacaaaattcggtcgtttttgacggttcaggtactagttaatatgaagataaactgcagcttccgaactaatggaaccattgaaggaggtttatgttactcttaaggaatccacaacaaggtatatgtctgtaattaactagggagttatctacaataaatctaaaaaacaggttgtaaacttcatccaaaagattgtcattttcatcataatgatattatgggttgtggtttatacaatatccgcttatctagaccctatttttaaagtaagaacagatgtttcggagaaataaatttgaggtatttaaaataaggattggacttatttgggaaataaattatattattttgggtaaatcgatgtactactaactttatagaatttgatataattctgtttcttcattatacaatccgattctatatccattatcttgttctcgtgacaaaagaattaaacaaaaattaataatatcgcagaatctgtagtcaaggatttagctaaattaataagttacaattcccataaattactgatttatagtctacaattacaatttttaaaatatgtagtgatactcatagttagaaagttgttattaaaccggattgtttgaaccatcatctgaattggatggctgctgtgtttgccttggttgtgatcccttgtccttgtcttgtcgtttcgcaagtctctctgtaaatttccagccatatttgataacataaggggcaataaacgtcgttataattgtcatagttcctatcattggtaaaataatcggtgtcgctgctccaacatcaattcccccctttgctacaactaatgctatttcaccaccagaagaggaacaccctaatgcagttcttgtcgaagttagattgtttagtttctgaagtctggatgcaatatacactgtcacaaattttgcgcctattgaaactcctatcaatattaatgcagggactataaactgggggattagggaaaaatccattagcgcacctacagatacaaagaacaatgctgcaaaaatatctttcacaggatttgccaaaacacttgttactgcgtgagatcgagactctgcaattaggacgcctgcaaaaaatgcacccgcagctactgatattcctaattgaaatgatacaaaagctagtgcaaaagccacacctaccgcagcgactattagtacatcatgttggttggttcttgcaacaatatccattaatctgggaattatttttgatcccactactaatactcctgcgataaacccgatggttattcctatcgacattataatttcattaatagaaatttctccgctcgctccagcggattggaatattgccaatagagaaattataataatatcttcaatgatggttgtacctaaaattaaagtagcagactcgtctttcatcatattgagctctccaagaaccctcattatgataacggtgcttgttactgatatagcaagtgcaataaacaaactattataaaatcccaatcccaatgattgtgcaacaataaaacctatggctaaagttccaaaggcttcggtggaggcgataacaattgcttttcttccaacatcctttagtttttgaataggaaattccattcccacggtaaaaagcaataatattacacccaactcagcaaatagattgagaacatctaggttatggataaggctaaatggtggactataaggaccaattataattcctgctacaatgaaacctataactacaggttgttttagcctgtaaaaaaccaaagtcgttatagatgcaataatcattataactgcaaaatcctgtaaagtctgtccgatttgtgcttccacacagaaaaataatatataacgctatttagagtttcaaatcattaaatccaaaataatttttttaaggcaatgattacttagcttaatcaaactaattctagattcgtcttaaagacctatataataatctgttatcctagttatcaagagcaaactcgcctagtcttgattaactagctcaaatcgctaaaaatttttccatgccttaattatagtcagagatagcattttcatgtttccattaacaatcaactaataccttaaaatattaaaggaaccaaaatagtttttagtaatgttaccttcttgattgacataatatccagtgaaatctcagctattcccatttttgcaattgatactcatttagatgaatagacatttgtattaatgagaattatatatcttagtaacattaactgatggaataagcatcaagggccataaagcggtaaagtaaagagaatttgtctctgtaatccaccttatggctaaatagagagtgactgccagaactaccttggatctaattgacaatttgtttatttatggtaatggtaggacgatcacttcatcaattaataccttaaaactagaactaatatcaccacactcttttaggtagatatatcatcatctgtatttgatagttaaccctaaatcgtaaatctttctatttggattttttctaactcagatcaacatttattgcttgttaggccttattttccactcgttttacccaagcgatatccctgtctacccttgatggtttcccctcttcgggtacggattatcttttgctaccttaattggctcccttcaatcttgttcgaagtgtcttcatagcagaagcccaagcaattacctcatcgagcatattgttagtcgatttcacatgaatttcatgcggtttaaatgttgaaaagttttcaaaatctgtaaaaagagaaaactgtacctgagcacgaactgttgcaattttaacctctgccataaccaaacgcaagtgctcaactgcacgtacacctccggcgctaccataactaacaaatccagcgactttattgttccattctttgaaaagataatcaatagcgttttttaatgctccggatgttccatggttatattctggcgtcacaaatacatatgcatcaaaagagtcgatttttttagaccaaatcttggtatgctgttttgaatattgccccattgaaggtggaattggttcatctagtaaagggagattatagtctttaatatccaccaactcatactcagcgtcgtctctactcttggctatttcatatatccatcgacttactgcttccccgtttcgtcctggtctagtactgccaatgataatggcaatccttagtctttggtcattcacataccactttacctgctctataaattatagtttatgggccggacagattcatcaaatcgtaatccaatgaaaaaattgagtaagacattatggatatattttattcaaccctctagcaataacacaactagttatacaacgagaagtatcaagagtaaattgtgatcagaagtagtcggagtttgtgatttctctatttagtcagacatttatccgccgcatactatgctaatataaaagatcaaaatagtaagaaatagcatacatcaacaagtaaagttcataataaattaactactagaatataaaattcaagactaaaaaataataaagatctaaaatgatagcttgtatatgagagtccaatcgtcaccctagtcttcaccattgacttatggattagattgtcctagttattatatcagatgataataaaagctttggaatttaaacaaatgtgaaaaattgcgtttttattctcatgcttatttgataattaacatcggacgtttgctaggataaaatacattatgagcaatactccccatggaggccgttttgatttttcaatgttctctacttccgataatcataactttaacgtcatgctgatcagcatattcaattatactaaatgcaatatgatgtccttttaccaatcttggtagatagcttacatccaaacctcgaaattctacatcaactttctcaaatactttttttattatagacgtgttaaaataattttttactaagggttttgaacctcttattaatatcgctaatgaatttagtttattcctcaaattaatttttataacaaaagaaaatgtactaatctagttaaggaaaattgttagattaaatacaacgcattcttaatataactatgaatatagatgataatccttttgttatcaattcttcaatgaaaataaatcatgttcacctaaaagtatcaaacttatcagaatctgttaatttctataaaaaaattcttggatttaggattctaaaagaagatctatatggtaatactacatatttgacaccgggtcctcattataaagataaggaccagatactcgatcctcaatcatccctaattattttaactcagctggaagataacttatatgatccaaattatttgggtaaagtaaaaagggaagcaggcctttatcattttgccatattactacctgaaagagaatgtttagcagcctttcttcgacatatcaaagagaatcttgaaccgaaatattatgagggtatggcagatcatgctgtatctgaatcgatttacattcatgatcctgacggtatggggattgaaatttatagagatcggtcgccctcagagtggatctggaataacaacaaagtccatatggttaccgaacctttgaatgtgacaggtttattaagtagatatgattccaaaacttggaatggaatgcctgtaggtacaatgatagggcatgttcatctgcatgtgtcaaatcttaaaaaactcaaaatttctataatggtgtacttggtctgtatcacactgccacttatcctggtgcttatttctttgctgctgatagatatcatcatcatatagctacaaatacctggattggaaccaatattttgcctgctaataacgctgaacaacatggaccctgtcttgatcattatgcgattgcattacctaataataacggagaaataagaaaattaagaaataattttgctaacctaagaatagatattgataaaaatatgactgatgacgataagcaatatcataacaatacattctatgtctatgacccagatggaataaaaatacaatttctatttagttaggtttgtagtatgaaatcgattgacaattggttgaagaactagatgtataagtaaatagcaaaaaaaatatcgatagtcgactttattatggaaaactaattgtcacatcggcctctttttaagataaacttatcatattgctcttaaaacattaaatgtacaccatccatagtttttaccattaaatagaacgcatggaatcatatacaattctgttatcactttaactcaagaataatttatgaatactttctttggtaatatttattttgtaaagctcatcatctttcatcacaagaatttgttgatgtgtttgaaatagcgtgaagatatctgatacagatgtatttgtcagattttttattttgtagagacaaaaagcgagaccttctaactttttttgatcatatgctctttcaattttaatagtctctttaatagatacctttgcgatatcattaagaagaaagtcaacacaacataattccttatttttggacttttttaaaatgttaggtaaaatgttgctaaaatatttcattatattttcttgagaatacttgtaacgtgagtttgagtcgtttgtatcataccaatctaaagcttttagtaattctacaaaagttgcatctgatgatggtataaaacatttgaaccatttatcttcatcaaccatgaacctgtcaattaatttaagcaggcgaatcaatgctttatcatcctcataaagaagtaaatgatgtctctttggaatttcattttattttttaagccattgatctacagcatcttttactatcgagtttaccgataccttttttttctttgatctatggtgcagggattcatagggattaagttcctagtggcaatggggttctataaaataaatgaatattattacagataacaatttcttataacaccactaatttgatcattctgttatggttacgaattaaaagatacttgtactaatttattaaagccaccaaatgacactactgaacctggagtaattagttgcataaaatctttataaagtggctccatacttgtgtcgccttccatgcttttagaaaattcttttacatgttctacatctctataggattggatctcaagccatacctcttcctcctcagaagcagaaatagtttttgacagatttacaaattccattatgttgtttctattttcaagagaaaatacctcaaagttagaagccccgtgtttcataaagaaatctctagatttcctgttaacttccatcattgcatcatggtttttctttggggcacggtaaaggaaaatctcaatatgtatattgggatatttttcttttaaggagctagtgcttgcgtggctcatgaggattcattctcttaaagatataaaaatcataaagggatcaaaagtatagttgttctattacattgaagaggacggattaggatagaatgcataactaaattgacatgaatatttggaaaaaggtaataatctcggcttgatctaccttcattacaataacacagtatcattcagtttgggcacgtgaggaccagtgccgatatcggtattttaagtaggattccagcttttttagcagatggtaagttataaagattagttgaaggaatcttacaacttgtaagtgcgtaaatataatctatctccttgaaataatgggtgttcatatacagattctaaaaaataatcttgaaaagagataaatgaatatataatcttgacaatgagtttttatgtgtacttcttattttttgaaaaacaacgttacaacgattcaatagacaatttttagttcttacgaatggatatagttttttatcggatgattttaacgcgatagattaaccgaatttcgttccagatagtcaagggtcattattcctaagttctgagttgtgaagaagacagaaaaagatttgttttataaagatgaaaattaagaattaccctacttcttatgccttcctatgtcgttactataataaggtagttagttcagtgagattaagttccgtatgctagccgagttctatgatatgtgaaacaaatttggtctgaatagtggattttactgttaacttttttaaaaatctcaaatggattttgcatcttaattatcacgattttctcgtactaatcaactttctcttctactttttctgacctaccatatgtttcatctatacgaattgatgaaattattcgtggtattcctataccctgaagagatagatgagcatactctattgctttcaaaatatcttgaattgaatccgcttccatttggatactagtgccagttaccataatcttaattcctttaacttttttgatactattaatagcaatggctaattcgtcaagcatactaggaggtaattgatcatttgaatagtgttttcctaagaagattatattcatctctgcaactactttatgattttctagaatcatttttaatctaacttatttttgataattaaggtttgatttcagctaatatcgataatttataggaaatttatatgatttgacaaagaataggaatagggagaagtccaaagtcaaattatggtattaatctcggtgacaaattggaatagtcgtaagaaataataatcataaaaagtagacagttgaaatgaaagacttgtggttgttgatatttgagaaaaatacaatatagaatactttggcagtattatcagttatctacaaaaatgtaacttattagaatcttgctgatccttcaataaatggttatatgatatttatggaaaggtggatggaaactaatgaaaacgttcacgtatgttctgttttaacagtagcacacgacaataaatacagacacatacagaattaagactaaatgtaagaatcaggaaattgcgattttgttttattatctcctttacttacattacccaacaccataatgatattcttctttagtttaaaaatgcatgttcttttaaatagatttatggcttaatattgcgggctgctcatgtttgaaagtaatttcgattttatcaccctgttcataggtacagttattaatttgtcttggaacgttgtctgatgcttcaactatgcatgttccgttctgttttagaattaccgtaacctcttcgcttataccgggagacaagacatcaaatatttgaaatccagaaataaagaagacagcaattacacccacagcaaccaaagccaatgcaattactttcggagataaatccaaacaaaaaagaatatagattaactcctatattactttacctacatacacacaagctctgattactgagaatatacaaaaagcaatgaataatttactatttataacgccttgtgttattcaattgaattaatcatagtacttaattcaatagtctgatttagattttgcactttctaaaatatcttatgtaacaaatactatcatgttttgacattgcaataaccatttacataaatcaaaaatatttttgaatatagagatcaaggtattagtatggatggtgataatttcacggatgctcctattttaggtaagactattcaagatatcaatgatggtatttccacagctttagtttttccaaattagtttgctaaagagttgcatataggaaaatcatgttaaagtctgattaaagacttagatgagaacaagcatttacttatatcaaaagcttttgttgaaataattttgaagttaccgatcaggaccacctgaagccaatgataaattccgttcgaaactataaaattggtgttaaataaggaaatgctagatatatgttatataaactattacacgaaagttaattcaaatgatatttataaaattgtggggtattacccctcaatctagtaaaaaagcaatatcgattactatagcaattcttttgtttaccggagtctacgctgtagccttttcaatagagcaatacgggactgcacaagctcaaggacaaccaaatagtactagccctatacttatgaatgccacacaagttaatgccacttcagccaacgtaacaaagccagttgacggatatggaggtccacctacaggtccattgactgccgtaagacatgtatttgatgatccgactctgagggtttatcacttttgcaaaccaaatgataagataatgatggtatgtcagctatatgacagtaattctccaaatgcaacgttgataggagttgaatatatgattgactcaaaaacatatcaagtattaccagatagagaaaagccaaactggcattatcataaagaggaatttttaccagatagagcaaaccccaaattcccattgttaaatgaccaacaacaaaagcagtggctaacaaaattatctgaatcttatggaaaagtcatactcaattggaatccaatggactcactacctgtatttcctccacaaatagaacaggttcagcatcctttcatggtgaatcagtcagttaacaaccaaacagaaaaacatgtaggtagctttaaccagacattaagctactaaactatttttttgaaatagtttttaaagttatataattaatttagctagtctgtcgctatagtcgtatgttcaacttctagtaatttgtaacttctaaacccgacgaataattatgaaagagcttaatgacataacaaaagagaagattaaacagggtatccattaattaacaatcctaagaaatagactattaatatgacaaaaatataataaacagtattgaccttgacaaaatccgaaaaacaacagaaagtgggcaaaaagatagacagtttttgaagaagtcagtcaaattggaaggagaatggaattttgatattcaaaaaggatatcaattcaaaacagaattagcatatgagaaggccaaggaagtaattgaaatagattcaccttcattcttgggaggtagtggtaacagactaggccctatgggctattgtgtagcaggaataacgtcttgttttataaccacattcgtaagtattctatcaagtcatggaatcaaacttaataaactacgaataaatgcagaatgtaacattaattttgccaaaacatttgatatctctgatgaacctattacagaagggataaatttcgaaattgatgcacacatggaagaaaaaaatacaatggataagcaaaaacttcaacaactcattgctatggctgaggagagatgtcccgctatttacagtatgagtcatataatcaaagtaagtgcaaaattaaaatagcaaagttacagaaatccagaattaattttaggcaataaaaatcgtagataactggaaatttctttcttaaaaattttatcgtaatttattattatccataaatttattattatccatacgtagtctagcaaatcgaaagaaacctatatacaataaaatatggagctataaataaaacagacacccttatcgacttacatcctttttacagctgtatttaatatgtctattgaatcttaagcatgttactcaaaatagtagcgcgttcggagactttgaatcgatgaagtatatagactgatttttttatttatacttgtatagaaatatgtatagttatgtattctccctcgatttatacagatgttacaaatatcaatatcaggtcttttcagatcagtttattattagcagtttagaccattaaaattaataatataaaaattagatccaacattataaaaataacagaataatcataagtcattatgaattaaatccgtctctataattttttatggactgaatttgacaaactttcaataataaatgtctgattaccaagagccataagaatagataaagggtagaatttagtatatgaaataaaatatgaataatgagtatcaaggaaaaccttcaccaaataaaggtgaaatactgcgagtttgtattcaattatactcttaccatgatagaagaattaatgaaaccgagttgtctgtaggtgaactatatcatgaaatatttggtaatgatggccggttagactttaataattttaaaagcgatatagactggctaaattcaaatggtctaatatccataaagaataatatcatagttatcaataacaacgtagcaaaaacgttgatagattacgtttttaaacataaaaatgaaatctaatttttttagaagatttagatctccacgaactttttaatttaacgataataacttcaagtattcaatctttagtatcttaatttgaattccaaagaggtctaaaaatgaccatatacgactagacgaataagaaacattgcacaaaataatgttccaaaagtctttatacaaataaacaaattcgtatcgaatacctaaaattatctctgcattttttgaagaatttgcagttaatttccaccatagaatgtcaatcaaagattatataaaaactatacctcatttgttttggcggcagccttcaagaaatttggcccgtacaaaaggatagcattcaaacaaaaaggatttaatctctttgttcttttcaacctgatattaataaaagatgaggtactccaattaccgtgatatactgtatctatttctttatctttcgtgttgattagccatctgtaaaaatattttattctccagagataatcattccaactggttatccattttttatccggatcttcagtatccttttttctttttaaatctaagaattgcattattttttcttaatcctgtacttgataaaatgttctgctctttccgagatattctgcaaatctaatgaggactttgatcgatccattttgataattgtcggaggtattaatgcttgtcaaatatttataaaattcttttattagctgcctattagtttcattctctactttaatttctatattctttattgttgtaattaatttagcaggcaatgatatctcctatttgtaatgtattcaatgaaatatttgaacccatgtgattaacgggcccgaagggcttcgatccctcgacttccggctcccttcttaattatgatattagatagaaggcaggcgctctatccatgctgagctacggacccttaaaaaactttgattgacacttccctataaaattgttgggcctaaactcggtcgggttcatttgaaggtgcatatttcatttcactatttcagggcgattacttatcatttctatgatgcaagttgcggccacacaaaccaatgacaaaaaaccttatgagataggattttcaaccaccgagattttaccccggtgaataaagcctgacagtataaggatgattcttgtttcagccgacaaatacactacaggtaaaccagagtggaaaaatgacattatctaacactatgactggttaaagatgagaatccattcatccattcatccatccattaacgcgatgacacctagccactaggtagattagccatcttttgagtaccccactatattaatgtcaaattttttagttattgcatagaccttttatagacttcggtagataacatgggtaggaatcctagtttgtgctcttgaagaatatttgacgagtttagaaagcgcttttagcgattaagttcggtatcttggtatgcgcctaggacatcaccaaccttcaaagagtattttgtgtcttaaaaatcatacattcgatagacgaaatatcctacttgacacctttagtgacatcatatagcctagagccctaatcaacactattaataggactttgtacatcgagtctataggttgattggatattagtattctatctgataaatcgcattttaaatggcatgatatcaacataatgccttggtttgaagatcgagcgaaaacaggctagtcaaaatacatgactgaaaaagtagatagaacagcaccatcttttatcattcaaactgcaatatgactttctccaaatcagatgtttattcagtttttttacttgattgaaacacttttcagaccaaaacccctaggttagtattatcaggcattcgggtccaagtatcttaaccttaaaactgtgagttgttttataagagggtttttagaacaaggttaataaccgctgtagacttaaaaaagatatcaactttaaagcaaatcttattaattacgaaaattatgtttacaaaaatgaggtgaataaaataattgcaatatgaagaaaaggaccaaaagaacacggaatatgatacggctaaactaccattcgttaatgaaaaattcgtcaatttatttgaaaacttcttcaagcagttaaccgaattaaatagaatttcaacagtcggtccttttatttcgatgataaatgatcctcaaataaatattaataatatgcgagaatatggaaacgttttgattaattatcaaatatttcttaataaatatctgacacaaatgattaactcatattttctagctctagataaggtttctgccggaatgccgggtaaagattcgcaagaaactcgtaagctaataatcaattcttttgaagatgttttctccaatatgttcgagtcaactgatttttcaatcaattataacaatttaattaatattgttattgatctaaacaagagttatcaaaaatttcttgactcctctgttcctttcttgaacaggcagtcactcagtaaagaagaaaaagatttattgttcaaagatctatatgaaataaagaagacgacgtcagagatcagaaacaggatgaaagagaataaaaatgaataaaacaattctagaccactatttgaatgaatatgtgaattttataaatgagccagaaaactttaaaaaattaacagagatgaaaaggttattatcaaatattgaaaaaatcgaaacagggcaaacagagtatgagatcatcaaggagaccaatctttttagactgttgcattataagtcgaataaagagcgtatatacaaatatcctttgattatagtatatgccctaatcaacaaatcatatatcttagatttgcaacctaacaaaagttggataaaaaatatactagatcaaggtatcaacgtctaccttattgactggaaatcaccgggcaagtttgataaatatacaactattgatgattatgttaatcgctttatctacgagtgcgtggaacttgttaaaagtattgaaaatatagataaggtatccctgcagggatactgtatgggtgccactatgtcgttaatctatacctcattatatcagaaaaatgttaagaacttgataaccgtagcaccggtggtagataccgataaggataagacagtaataaagaacatgtctcagaatatggacatcgataaaattttatcccattacgaaaattttccttatgagctattgtacagcctctatgcttctttaaaaccattcaaacagggtgttagcaaataccttaacctttttgataatcttaaagatgaaagttttgtccaaaatttcttgagagttgaaaaatggttgtatgatactcctgctattgctggagaaacattcagacagtggataaaagatatttatcagaataaccttttctctaaaaataaactggttgtgggtgaaaacagaataaatctctcaaatatcaaagtgcctctattgaatgtagtggcggatcaagatcatcttgtttctcctgagtgtagcgtatcattaaataagctggtatctagcacagatacaaatttgatgagattctcaaccggacatgtgggtttgatagcaagtgggtattctcaaaatgtggtgttgccaaagataggcaattggataaagattcattaaatcaattttagtttttatgtgaattcttttgtttgcgagcaaggggtatgataataacttgtactaggtcaccctcttctatcccaagcgcttgtcgttctgcttctgggattgaaattctaccaccgctttgaacattagttttgaacatagcattgtaattggtaaagccttgaagcgaggaaaacatattttgaaatgcgttatattgaaaattcgaaaattgtctaactaaatcctgctgaaattctgtagttttctcaatcgtctttttcaagtcaatggtcttatcattgttttcactttcattactcatagaaaattaaatatcccatcaatattttaatgttgtaaagattttattagtttaaatcaagagtctataaacttttcaattattttataaaattccaatggcttttcaacatagggagtatgaccacatccttccattattaatgtctcaacaatcggcatcgctttaaaatattctatattttctactgggatagttgtgtcatttcttccccagataaccaatgtgggaatagatatctcaaccaatctatttcgtaaagtctgttctttacgcatcgcaagtagtgtagagatgagcgaatattttgcattaggaagcctcattctatttacataatctttaacggtagtttcatccacagcatattcttcattattagccatcatttcgaaggctctatgaacattttcgatagttggatataaaccggcgaatatatactggctcagaacaaatgttggcttttccagtgtacctgcaggagaaattaagatgattttttcaaaaaaatccctatataacaagctgtactccaaagctaattgaccgccaaatgaagaccccatcactacgggatttctaattttcattttttcaaagaattcttttaggaatttaacgaagaattcgatagtgtactctaccaaaggcttttcactatacccaaagcctacgagatcaggaattattacattgtattttttaaataaaggccataattccgcccatctttctgcggatgctcctaaaccatgtaacaggactagggttttctttgattctggattatctaactttacatacctgactttgtaaccgagtatttcaataaaatccatactttgtttgatgtttttgtgttgattaaattccagactcaatttgttgaataattgtgtataattgatatgtttaatatatttaattttcaaaagaaatgctaatttttattagcataatataggataagactccatcaaattatcttccatataattttagaaattttaactaacgaccattctttacgcatgaaatagcaagttgtagttcatatttttgtgtgcgtgtagtgctttgctgctgttgttgttttatgccttatgccttataccttctatctatctatctatttttaacctacttttttttctgtcggttgtaattattttattttattttatttttaattacagatcaggtgcgttgggctattggtgatggcaggctgaatatctcgcccgaaggcttgataattacacctccattccatcaacgccatcttctatggccgccctcctccttacggaaggttgtcttttctcgggaaaggcttcctccttagatgctttcaggagttatcctaaacagcttagctgctcagcttgccctgtcggacaactgataaaccagaggctgcgctgccctgttcctctcgtactaggggcaacttcccctcagacaaccacgcccctgtcaggcagagaccgacctgtctcacgacggtctaaacccagctcacgttcccctttaatgggcgagcagccccacccttggctcctgctgcagaaccaggatgggaagagccgacatcgaggtaccaaaccgcggggtcgatgggagctctcgcccgcgacgagcctgttatccctagggtaacttttctgtcaccaccagcccccaatagtgaggacatgatggatcgctaagcccggctttcgcctctgaatcccgtatcattgggaatccagtcagactggcttttggctttgccctcaccggcggagttctgtcccgcctgagccaatctttgggccccctcgatacattttcaagggggtgccgccccagccgaactgcccacctgccgatgtccctgttaaacaggttagcgatacggtaacaaatggctggtgttacacttttgcctagatcagtcccggagaactgaccataacggctcccagctactctctgcatttgacaccatatcgcaacaacaggctgcagtaaagctccacagggtcttctctccccgacagaggttcggggactgttcgtccccgttatgtggcttcaccgggttgtaggcagggacagcggggccctcgttgttccattcatgcacgtcggaacttacccgacaaggcatttggctaccttaagagagtcagagttactcccggcgtttagcggcccttagcccagttgaacccaggttttaggtaccgccactggccaggatacagaggccatacacatcctttcggactagcgaccacctgtgtttttattaaacagtcgggaccccctagtcactgcgacctgcagtccctactcctcgtaaaaactgcaggcactccttataccataggtacggagctattttgccgagttcccttgccatacggtatacccgatagaccttagacttctcatccagggcaccagtgtcggatctcggtacggtcttgaaagtatcttcctatttctgctttcattgtctcctggaatcaagcaaaccctccttgcggaaggccattggtatctcgctttaattctcgccattacggcactcctcaaagctagagtacttagacagaacgacggttctgcttaccctatccggaagcgacagaagaggtataacgaactttcaaggcactggaatattaaccagtttcccattcaaacaattctgttgaggttgtttttaggaccggctaactcccggctgatgacgcattgccgggaaacccttgcccatgcggtcgccgagattctcacccggctatgctgttactaccaccaggatctgcactagtagttcggtccactggactttacagcccagcttctacccaaacactacgcccacctaccacgcaccgacatcgtcggtggtctaaagtatcggtagtctacttgagccccgaacattttcggggctttcgagctcggcaggtgagctgttacgcactctttgaaggatggctgcttctgagcctaccttcctgctgtctttgctcgaaaacaccctttggtttgacacttagtagacatttggggaccttaactttagtctgggttgtccccctctcggttatgaggcttaccccacataaacccgcctcctagcttctacgacgcttgcacattcggagttcgaatggatggcgagctctttcgagcccttaccgcccgatcggtgctctacagtacaagcaatctcagctaaggcaggactgcgatccacttcggtgggaactagcgatcaccggactagattggtttttgacccctaatcccagatcaggggaccgatttgcacgtcaggacccttgcagacctccagcgagctttcgctcaccttcgtcttatccaggactagatcgtccggtttctagccttactgccatgactcaagaccctttcagatccattgcctcttttttcagatgaaaaaatgcgcaaattcggtttcccttcgccttccctctgttaaaggttaagctcgccatgacagcaatctccctggcccgtgtttctagacggaacgtatgactctagaaatcctttcgagccatacacgtctgtaaccgattggtttcaggcgcttttaaccccccttccggggtacttttcaactttccctcacggtactagtattctatcggtcttgatgaatatttagccttggatgctactttcacccatcttcactggccactgccaaggccagttactctgaatatgacagaatcctgctctcattcgcctacgggggtatcaccctctattccggtactttccagtacactttagcttcgattacaggatcctatacgtcatatccgtaacaccacatctctatcatgttaccataacagattcagtttgggctgttccgctttcgctcgccgctactaacggaatctcaattgatttctcttcctcgtcctactcagatgcttcacttcggacggtttgctctccctagctaactaaagcatgggagtgtatagagagacctcattcggaaatcccggggtcgtcggtcgcatgcacctaacccaggcttatcgcagcttgccacgtccttcatcgcttatcaagccgagtcatccaccaatcggcgtctttgcaccagtccagtagttattataaactaatttttggagttttttcctttctttctttgtcctttggatctagttagttcttagttccacttgtggtagaaaagtctaattcaattcaatggttggtatatgtatttcgtattggtattggtatttcgtattttgtatgatgtaaaagtatatgcatattttttatatacatatacattaaatctctgtttgcactacaaaccagttacacataatattttactacatttcactattccattattacgcgaatagaatattattattatcataaataattttgaattagtattatctattctatgtattttactttgataatttaatggagttttcctatacatgatgattattgtaaactcacgtttactacatcaacttcattctttatcttctactccttctcatttacatgagacaaagaattgcatccgatactacatttgctgattttttttaattggaatgatcagatagatgatatcataattcttcactttagtgatatctattataatatttacacagactacacctataaaatttgggctagtaaatataattatttttttgcataaaattacaacatacaattctaatttttcaaaccgtatgaaaaatgaaggaattgattgatcagttttgatttgattgattgccttatctttatcatccactcccaagattaagattagggatttatttattttattagtataagtattgtaaagtctcgcagattagaaagagcacaaggcccattctaacccactaccactactacaatataataactaaggaggtgatccggccgcaggttcccctacggccaccttgttacgacttctccctcgttgctgaccccaggttcgatagtaccaattaggcaccacctcgccaagaaccaacttcgatgaagcgacgggcggtgtgtgcaaggagcagggacgtattcaccgcgcgatagtgacacgcggttactagggattccatattcatgagggcgagtttcagccctcaatcataactgtggtaaggtttagagattgcctcctcctttcggaatcgaaactcattgtccttaccattgcagcccgcgtgtggcccgagggtttcggggcatactgacctgccgtagcccccaccttcctccgtctcagcgacggcggtccctctaattagctccactactcctgagaataatggtagcaactagaggcagggatctcgctcgttacctgacttaacaggacacctcacggcacgagctggcgacggccatgcacctcctctcagcttgtctggtaaagtcttcagcttgaccttcactctgctgtcgcccccggtaagatttccggcgttgactccaattgaaccgcaggcttcaccccttgtggtgctcccccgccaattcctttaagtttcagtcttgcgaccgtactccccaggcggcaaacttaacggcttccctgcggcactgagttagcaataagccaactcatcaccgagtctgcatcgtttacagctgggactacccgggtatctaatccggtttgctcccccagctttcatccctcaccgtcgagcgcgttctggcaagccgccttcgccactggtggtcttcaatggatcaacggattttacccctacccatcgagtaccgcttgcctctcccgcctcctagctctatagtatcttccgcagcccatctgttaagcaggtggatttaacggaagacttgtagaaccggctacggatgctttaggcccaataaacgtcccgaccactcggggtgctggtattaccgcggcggctgacaccagacttgcccaccccttattctgcaccatttttagaggtgccaaaagatctccttaacggaaatcactcagagtaaccctgtcaagctttcgcctattgcagaggtttcgcgcctgctgcgccccatagggcctgggcccttgtctcagtgcccatctccgggctcctcctctcagagcccgtaccggttacaggtttggtgggccattacctcaccaacagcctgatcggccgcagtccaatccaggggccatatagatttaagtcattacccattccagaagtgatgacctatcgcggtttatcctcagtttcccgaggttatccacgtcccctgggcatgttgactacgtgttactgagccgtatgccacatattgctatgttgactcgcatggcttagtcccactctgatagcagtcgggtccggcaggatcaaccggagtcaaataaagtaaataacggctgtagaattattatttactttattataaatcgtcggttgattctcatataaataaacaaacaaactaacttttttttacgagtttgtttgtctgtttacttgtatgtgtttatataataattcgtccaattctcttcttacttcttacttcttacttcttatctcatttagattttagattgtagacaaaataaggaataaggaaaagtaataagatttgaaaggacgtttattgagttctttctttattattaaagctctattttttagagattaacaataaagagaaagagtacgatcgaaaaactagatttgtatgttgttttttagttacaaataaaaaattacaattaactagatttgttctataggatcatctttaatgcaattataatagcattataatgacctattattcgatatcatctatctgatcattcccatgtcagattcaatctatcaggtcagcactgattttttgatcgaatctccaatatgttatgaatgaatctatttagacgtattctaatacccaatccttttaggatcggtctagtatctaaatacccacgattctatgattattgtaaagagcgcatctggaggtctgtaaatcacattatggcattagccaacttcattaccgacgccgccttttgtcttggacgcgttcaatactataacgttaaatgataatattaactttagggttggataatattttgagacagaattccactcaaagtgaatactaaataaatgtacaatcaatttaaagaacttttgtattgtttttttccgcttttatttaaaccaaaaccattttaccttaaaatcctctcaaattttaaatggtattaattcatacaatttgatatttgagacccaatatataatatttaacaaattattcaaagtatgattaactctaaaaatataaaattagacagtgctttcgtaatctgtaattaattggagatgagattaatcttttcgccaagtctgaaaatacgcttttaatcagaagtatctagcatccaaaccattcatgtaaagtcgggtagtttcaattatttcctagtaatttacttgatttgctgggccgatactcaactaattaatttttaaaaggtatcataagataaagaatagtgcagcaagtaaatttggcatcagataagaaagatgaatattattcaaagaaacttcctgagaatgtaccatccttacttctttcttccttttatgtaggggaaaaaaagtctgttttcctcaaattttatgatccttctgagtcacaaatctatttttggagcgagtacttttttgagaatgctgactcaaaaaaacaccagccatactgttttgttaaaaaaaaattttcagctgaagcaaagagtatagtagatcaagatccaactaaattcaaaattcaagaagtgaaaaaattagatgatatagtagacgaagaaatagaaatattcaaagttttggctcctgacccactgtcgattggtggaacggataatagttttagagagaaagttacttgttgggaagcagacataaaatatcatgaaagctatctctatgacttgggattaatccccggtgccttttatgaaagagtcgggaatagcttgaaatttcatgagttcgcaatacctaaaaaagttgaccaatatttagataacctttttacatcgaataaattccagaataatttcaacagtaatgaatatgacaagttcttactaaaatggtcacgattattgaatcaacctatacctgacataaagagagtagctatagacatagaagtggattctgaggagggtaggatgcctacggcaagggatcatgaccgaataataactgccattggcctgtctgcttctgatgggttcaaaaaagtgtatgtactcaaaagagatgagaaaatagactttacaactttagatccaagcatcgtattatgtaactcggaaaaggagatgcttttgttagtttttgatatcttaaaagagtatcctgttgtattaacgtacaatggtgatgatttcgatatgccttatctttatacaagatctcaggatccagcgattgatcctgcagatggaaagccaattgataaagaccaggtaccaattcttgtgaaaagagaatcatttatgaagagaggtattcaagccgatccagtcacacttaagtcgggaattcatatcgacctatttaggacatttcaaaataaatcagtacaaaattatgcctttagtcataaatattcagaattcactttgagagccatatgtgaagccctattagaagatacaaaaatcgaatttgagggcagcattagcgatctttcgttagaaaaactcgcagaatactgtcttaaagatgccgatcttacttacagactgagtgcatttaacgataacttgcttatgaaactaataataattatttcgagaatctctagaatgtctatcgaagatattacaagatttggggtgaatcagtggattcgttctttgatgttttttgaacatcgacaacagaacatacttatacctagaagagatgagttacttcagaaaggatcatcatcaactactgctatcattaaggaaaaaaaatatcgtggtggattagttgttgaacctcagcttggcattcactttaatgtggtagtagttgattttgcaagcttgtatcctagcattataaaggtacacaatttatcatatgaaacggtgaattgtcctcacaaggagtgcaaagacgattcacttaatcatatcgaaggaactacccattggatatgcaggaagaaaagggggatgacatcaattctaatcggaacactgcgtgatttacgtgtaaattattataaacatctttctaaagatacgagcttaagcaaagatgataaacaactctatggagttgtaagtcaagccatcaaggtaatcttaaatgctacatacggagttatgggagctgagatttttccactctattgcctacctgttgcagaggctactgcagccattggcagaacgactacgactagaacaatcaaaaaatgtgacgaaaataatatcgaggtaatatacggtgacacagactcgctattcttaaaagaccccagtcctgatggtttaaatacgatttctaattgggccaaatctgaattaggggttgatttagagatagataagcgttaccgttatgttgtatttagtgatctaaagaaaaattatttgggtgtacttgaagatggcactgttgatgtcaaaggactaactggaaaaaaatctcatacaccgccattcattagaaacgcattttacggtattttgaacgtactaaaggatatctatacggaaaaagactttgcaaatgccaaaacaaggataaaaaaaatagtacattctcttgcagaagatcttgaaaagaaaaatatccctctacccgatttaagttttaatgtaatgataaataaatctccagagaaatacgggatcaaatttttagaaaataaaaatcatcacgccatatctttagatggtaaagataagaatatggaaagtacaaagggtatccctcagcacataaaggctgcaaaacagcttgtcgaattgggtcgacaactcaaagctggagacatcatttcctatgttaagacaaggactattgaaggggtaaaacctgtcgaattagctaacaaaatggatatagatactgagaaatatttagacaccatggaatctacctttgatcaaatcctgtcatcgcttaatttgaattttaaatctataattggaaaacctaggcaatccaaccttgatgagttattttggacttgaatatcattcaaataataaattcgttgaaaactaagtaagcaagcatggatatattttcttatttagaacggttctttaatcccccggaaaacacaagtgcaggatgcagttttggtgatatccctattcccattacttttgatgaatcaaaaatctgtattgttggaatccccatagacattacaacaacatttggaaaaacagcatcttttgggcccgaagcaattcgaaccacttcagcaaagcaaattgaaacactaatttatgaaatggattctgagatttatgaaaaggctttgattttcgatatgggagacttaaattttgtgaaaccaaaagagggtaaagtaagcgacattaaagatattaaccaattttggttggactttgattctattatgtcttctgtaatgggaacaataattgattcaaagaaaatgcctgtcatcctggggggcgaacacacaattacatattcagcgtataagcagctttctgaaagacaccccctattgatacattttgacgctcatcgtgacatgaaatcaatctaccagggtatgccgatgtgtcatacaactccattttaccatctgattaagagaggttatcttagagggactgatttagttcaaatcggtataagacaaggtgatagggaagaaaataaattcgcaactgaaaatgatgttactacttttgatgcatgggattgcaacagttccttggtagagatagtagactggttaaattcacacacatataaacgggatatttatgtatcatttgatattgatgtttttgatatatcatatttaccttgcactggaacacctgaaccgtttggcttggatccctttcaaatattaaagttgataaatagcattagcgacaacgcacgattggtgggacttgattttgttgaaacaggattgaaaaataatgattatagagaaggaacgttggctacccaaactttacttcggatcttatccagaccatatatgtctaatatttgatggtgttccttctagttcggtgttccttatacttagttccttctggtcattgtgttcatttaagtagttgaagcattctatgaagcaattttaggtctttttgagaggtattcaggcaaattaatgggaagaacaggtttgccttctatttgttcttttatcatatctatcaattcctctacttttatggaatgatttactttttttaacctatctcggactgaaatcgaattggtggtcacttccttttcaccaaatattatcgtataatgaatccattcagtttctgcttctctaatttttttagatagagtatcttccctatcatcaatgtctgcacgaatattatttatcttcaactgctctaagagtttgatacatcttgggataaattcgtccctaacaggaattatccttacttgggtattcattaaccaattgggtagatatggagttttaccttctttcatcattttagcagatttttctagtagtgcaaaaatgacacgctcaattgctccactaggtgaattatgcaaaattatggggtttttcttattgcctgactcatcgataaaagttattccgtatctttcgccgttctcaatgtcaatttgatcagtagatagggcagaagctttaccggagttgtctagaaaattaaactcccattttaagacaaaataaaagaacctatcatcccacatctctactagaacaggtttaccaattttagtaactaagcactgaacaaattcttgattattgctgtaaaattcattagtaaatctgatggccatctctaaatcactgtcaatggatattccaatttcttccatcacagaaactgataaatcaagtcgtttcaaaaattcgatttttgcttggtcaatatcctgacaaaatgcatgacaatcaggcatactaaatgcacgcaatcgccttaatcctactagctcaccgctcttttctctcctaaaactgtatcttgttaattcgtataaatttaaaggcaaattcttatacgaaatttgaaagtctttagtcattaaaaactggccaaaacaggctgcaaatcttaaaaacaaatctttttgatctgacttgatattatactgtcttgcaggaaaccgattaaaatagctctccatcgatggatggtgcgaatcatacattattggtgtctcaacctctaatcctccatattgggaaactttcttagttacaaactgttctagcaatgattttaacaacctgcctttcggataaaacctcatgttaccggaatcagaagcaggctcataatctgcaatgcctaacttccgcattaactttacatgagggggctggtcttccactgttctttttcgaagtatttcatatttgaatagattctcaaggttgatttctgattttttgaatttataatcattgtaaggtaccatcgacccatctgtatttagtacataccatcttgatttcaaatcattctcggcagatagggcgttggaatacattccttcgctttcatgagcgtcagatcttgagggagcaatttcaacaataccacctacctgtttttctggattttttttaactataaggcgtgaattttcagctaatgggtgcccttttaccttgattcctagttcttttgtccatccaaacggagctctcctaactacaattgtgtccgaactttctcttaaggcattttgcagctggaccaatatattaaatgcattttttggaggctctaaggtcgagctaagatgggcatagggataaattaatacagagttgcactggattttcttgagatattctaaagtttcctttataaaatcttcaatcagactttcatcatctcctttttctatcgatgttaatataacgacgcaattttcaaatcgttctttttcattcttcaacaatggttcagcaaaatctatttcctttttgacgggtaaatattctacaaaatctacatgtaactgtaatattctcatatttactaattgaaatatctagtttgatatattccatacctattcgacgccgaatgaaatgtttttttcttagaattaatgctcatatagtgtgggaatagtggatttcacaatggcttgctcgtatgatgattctctagaatactgtacatatgataatcccgcttcttatacggataatcaattgggttattcactaatgtttatcgcttccaaagaatcagaattaaccaactctaaaagcttcaccaatatagaagatctgatagaaagagtaatttcacatgaaactattcacatagttatcttagaattagaaggaaaggattcatcggataaattagatgatcttgaaatttctgttacttttggagcaggaaggacccatataattaggatgaatttcttaggatatgctaatgataataccggtttagtgactgctactctgtaaaatctgtaattttgtaattcttatattgtttgatcgtctttatgatctcttttttaacgttaattttttgatttatcgatgatagttcctttatgaatgcaacttcgtcctctagaagataatgctcatccttgaatatctgattgtagattaacttttgatgtattgattgaagcctccgtaaattattatacaatctggtcaaattgatattgcaatctgttttttctaaagttttgatgagagttaatttatttatatttaatagactatccgaatagactcggtcatgtctatttataactgcaaattcatcagtttcatcagaatatcctatcaatgtggaaggcaaaatctttgccaacccatttttcgttatctttgaagcatgtttactgtccaaaattactatggaacgcccaaatgacaggattgcttcaatcacctgattagccagcctattatcaagcttgtctttatttgatttaatttcaattggataaatagaaattttctgaatatttactttgtaactttcagatattgtctttagtaacattgttctaacaaatatattttttagatcatcatccatctcaattgtaccatttctaatatcctttaccttgtggttttttgttttacatgccgccaatatgaaatcaaattttctgtttagtgcttcgtttttaatttcaatatatttttcattacggttggaagtatttccaaaaaagtcgttttttggatttagatttataaaatccaagaatctattttttaattggatctcattcatattctcagattacaaattattacaaaattctcagcttgggtgtttgcaaaccgcctttagtccttttacaaaattgtctaattctgacatcatcttacctttatcatgcatattttttgtaattattttaatcaaagaacttcctacaataatgccatctgctcctgactttatcatccttcttgcatccttcgcggtgctgatcccaaagccgacagctaaacgttttctatatgaagtaacaatagtttttgatcgagatatagattcgaatgtgtatttttcaaatttatttctcgatcctgtgatcccaaaaacagataccatataaacaaaaccagtagatagtgatgctatcttctttaatctagggatgcttgtattaggagaagtaaggaaaactgttgcaagccctaatttgcttgtttctttcaaataatcatcagcttcctcaaaattcaaatctggtactatgaaaccatctaaattgctggctttagatcgaattaagaatttagacaacccattagaataaagtatatttgaatacgccatcaatagcagcggggtttctttgtgtcttttcttaattgattccaccaaattcaaacagtccataggtgtaatcctggaactaagggtcttcgtgaatgcatcctgaatcactggaccatcagccattggatcagaaaacgggactccaatttcaataatatcgactccagaaagtattagttgttcaattatttccctagaaagttccaatgtaggataaccaccaacaacatatccaatcaaagccttttcattcttgtggactaggttattaaaagttcgaataatattattgtccattttcaactactacccgagccttttgtttctttattcttttcaattcctccctacctttgatccagcaagatattctcttactatttgcaaatctttgtcacctctaccggacacggtaaccacaactgtatcatcctttttgaaatttctcgcgtttttcataatatacgcaatagcgtgtgacgattccaaagcaggaattattccctctagctttgacaatagaataaaagctttaactgcttctttatcggtaatgtgaaagtaatctgccctcttagtatctctcaaatttgcatgttcaggcccaattccaggataatcgagtcctgcagaaatactgtatgcctcacttatttgtccattttcatcctgtaaaaaataacttttcattccatggaatatacccatccttcccttagacagggtagcagcatggaaatcagtttgtattccctcccctccagcttctataccaatcagtataacttgtttgtgatcgataaatggataaaatgatccaatagcgttacttccacctccaacacacgctattatggcatcaggtaattttcccgctattttttgtaactggtcctttatttctttacctataacactttgaaaatcccttaccattatagggaatggatgaggtcccattacagaacctatcaaataatgcgtatcttgcacattagcaatccaatctctaagtgcttcatttatggcatcctttaatgtttttgaacctgaatttacagagtgcacttttgaatttagtaaattcatcctaaaaacattcagctgttgtctctctacatcttttgcacccatgtaaatttctgatttgagatcgaaaactgctgatgcaattgaagtagccactccgtgttgacctgccccagtttctgctatgattctcgtcttgcccatttttttggcgattaaagcttgtcctaaagtattgtttatcttatgagctccactatgaagcagatttctctctttaaataaattttaggaccgccaagatgtttggttaaattgctagcaaaataaagtggagttggcctgcctgcaaagtctttgagtaatccaaacaactcattttgaaaagacttgtccactttcaatctttggtaccatttatccaaatcttctaaagctggaattaatgtctctggaacatatcttcctccatacattccaaactttcctaaattactgttatttttcaaatatgtagaaatgaaaataggttattgctacataatactttatcgattcaaattagctctcgattaattcttttattttttggtctatttctttagaattttccattaaggttgtcccaattaaaaatgcgtcagctcccgcgttcttcaactttactatatcagatggatctttaataccactttctgaaatcacagtgttattgctcttggaattttcagacagaattcgaactgtattatctaaatctacttctaatgaatccaagtttcgattgttgataccaatcagaccaaaaagcttgtctgttttattgttaagcttgacagcttcattaaactctatttcatcatgagtttctacgatcacttctaatccgatcttcttcgcatattctgccaatgtctctaaacttccctcagacaaattgctatcaaagactgtttttattagcagtatgcaatcagctccggctttttttgctgccttaatttggatgtcgctaactacgatatctttcattagaatgggtacggtaacatgctttcttgttctaaatatgttatcaattgatccattaaataaatacggttgagcgagaatcgatatgccaatagctccggcattttccattgtcatagcaatttcctcaacattcttttctctatagtctactagcgttcccctcgttggagatgcatactttatctcagtgaggagtggattctgtttgcaacgtagaatgctgtttcgcatgcttataggtgtatggctgctataatctcggtctcctgtagtatcatacattccgttgtcaatggctttaaaggaattcctcacaagtgtatttagcatggatttcgtagtcggaaatctcagattatttgggatcatattgactgaataaattatagtgtcataaattaaactatacaatcgtctagttgtagaagttgatgtatctatctttgattttagtctctttttgatttttcattatacttataagaatatcaatacaggtattttcgctcatttcaccaaatgcaacctgggtggaaagactttttaaatcaaggtgactctcaataaaagcactcatacttgacaatatttcagatttttctatcattttttttagtcgcaaaaaatggtagtttacgtgaatttcgtttgcctcttcgtaatctactccatatatatctgaaatttttaagccaagatttttttccttctccttgattatatcttcatgcaaagcatctaaggcattctttcctttaaatggctccctactatcaataacatttttgttattatcattgccaaaataattgtcactattttcataagaattcattatgatatacttattatatgtagaataccataataaaacttttcattatagtaacatttccttagctcaaaataataataaacacttaattataattgattcaatcaacattttctataaagcaatcatgaccaattctccaaaatttatatttgtaactgggggagtaatgtctggcttagggaaaggaatcgtagcttcatctattgccaaattattacaactttgcgggttgaaagtaacatgcacaaaaatagatccttatttaaattatgatgcaggaacgatgaatcctctcactcacggagaggtattcgttaccgatgatggcggtgaatgtgacatggatataggaaactacgagcgatttctgaatatcagtctaagatccagccataatttgacagcgggacgagttttttcaaatgtgataggactagaaagagaagggaaatatctaggacaatgcgtacagataataccgcacataaccgatgaaataaaaaaacagttgagaaaaatatccttagaagaggatctggatattttggtagtggaatgcggtgggacggtaggagatattgaaagcttaccttttctggaagcattaagacagatggagttggaagatggatatacaaatactttctttgtgcacgttacgctggcacctgttctggatgctgtaggagagcaaaaaacaaaacccactcaacatagtgtccaggaattacggaggataggtattcaaccagacctattggcggtgagatgtaaaactccgttaacaaaagaaacaataagaaaaatttcattgtttgctagtattcccacagattgtgtaatgtctagtcatgatgcaacttcaatttattctatacctaaaatcttattagatcaggggattacagatgtaatttcaaagtgcttgaatttgaacctaactccaaaaattttaaaatggaataagattacaaactccttcctaaaattcgacggaagtgtgaaaataggaattattggaaaatacgtaaatctgaaagatagttacgtaagtgtatctcaggcgttactacatgcaggggccaaattcggtaaggaaattattatagactggatagattcagaaaaatttgaagtacccggacataacaagacgagtagaaagaataacccaaggatcttagaatgtttaagggaatatgatggtattttagttcccggagggtttggaggtagaggtagcgaaggcataataaattcatgtaattttgcacgtgtaaataatgttcctttcttagggatttgttttggattccaacttgcgatagttgagtttgcaaggaatgtttgcaagctaactggtgcaaattcaacagagatcaattctcaaaccaactatcccgtagtgctatatatgccagaacaaaaacaaattaaaacaatgggaggcactatgagattgggccttcatgatattcagattgagtctgattctattgcttcaaaaatatatcgtaaaaacattgtccaaaagcgtcataggcataggtatgaatttaatcaagaatatagagatctccttaaaaaaaacggtatgaaatttaccggctcctccgatgatggaaaaagaattgaaattctagaaatcccaagtcacaagttttacctgggcattcagtatcatggtgaatttcacagtcgcccaggattccccgaaccagcatttgaaaatttcatcaaggcaactcttgcaggaaaaaaaattaattaaaagacttggtaaaatcctattatatctttaattcataaattttttgtcttgcatctctaagtgagattttcttttttacatatccccggtttaacaggtgggatagtgataacctaatggttctttctggtaacatagtcttattaatcaagtccttttgagtcatagcgccttcatattctaatgttttaagaattaatttagcactcggtggcatgcgtaaaagatcctcagcatactttacttttttttctattattttggtggctgaataattgttattaagcgttaccaaccgcgcaggaaattcatgcttcctacactgcaatttatccgttattttgacacgagatgttccatctaatattacctcacaatggtgacttgatgttatatctactatttctataaaactttcatcagacacaataagcggacgtctagtattgtccaacgaattgactgaaactattacgactacgtgtgaattttgaagaacaataggaccaccagaggacatcgcgtacgcagtggagccaataggcgtagccataattacaccatcactattatcatgccaaatatctttattgtttatcctgagaaaatgttccatgagaatagcactcttatttgaaaaaattgcaacatcatttagaactggctctatttctttaccatctaccgttacagccagtctctcttcttctcttatttcatagttaccggactttaatgaatcttttattaaatctataccttttacatcaatctgggccagaaatccggtcgaatttgattcataaaggcccaaaacaggagccgactgcacagatgttttatgaaaataattaagaatacctcggtcgccgcccggtactaataccatgtcaacttctttgacagcttcttgatttgaactattcataattaatgtctgtatgtgtgattcttccagtgtttttaccacttggcttaatatcgttgaatctttaccggtaaatcctgacaaagcaattcgcattataatgaatctttgtttgattaaggtaatttaataaagtttgtttttatttctttttttgtaactaattaactaccttaaacttgatagtgttgtagaaataagatgcagatctctcgatattctttatactctgcggaaccttatgaattcctctcttttttgattctagagaagaaattacagatccagccccaaaacaaatagcccaaagtgggtctcgctcttttaaaaaagcacatgagaatccagttgctagaatatctccaagacctgtgtgatcaggactgtcgatctgattaaactttattgtataaacgatattcttatgcaaaaaaatgatgctattagtaccagtagatattacaaatttgagatcaaatttatctcgtaattttatcattccttcgactgaacgagtccccccggtaagagccgataattcttcctcgtcagcttttatggctgttacacctttgagatccagagcaatactttttctgtttaagattagtccttcattgtttttataacgaagaaatccttgcgggtcaatcattatgaagctgtccctgtaattatctagtactttacggagagtactttgagaaatttcttcgaatataggactaattaaaaccgcgtcgctatctacaaaatcattcaccttaatttcagaacatcttgatataaggaaaagctgccgacctccgttcctatttaggattagcctgaatttggtacttggactcgccatgtcaatttgattatcctttaaaaatatattggaatttctcaacatctctatttttccagacatatcgttcccaactctagttgcaacaaaagtgtcaaagttgaatgttttcgctagtaaagatccatagcaaacgggtcctcctagactttcggtcttttcaccttccagatctattatttcatctaaggctacatgagaagcaatacagattttcatgaaatttatctttcatttttccaaaattttaaagcaacataataaggttatcataagctttaaaggatagaaatagattcaaaaataatggatgcctaagaaaagaaccagtaggggaagaactaagggtggaaagggaagttcaggaaccgttcattgcagtcaatgtggcgcaatggtcccaagagataaagcaaaaaaaattacaggaagaatcacccttgtagagcctcaattagctaaagaactaaaatcacaaggtgcttatattgccccttcgactgatgtcaaattttattgtgtttcctgtgcagtacaccgaggaatagtaaaagtaagatcggaaaacgatagacgcaactcaggaaaattaggttaaataattttttaataggctgtcatgaatttcttagcagtttcatgaggtctatttacaattaggtaatcaatatttaccaaataactctaaatgatttttagtttaaaaaaaatttgtttttattgattattagtagttttagacgatgactttgtagtatcggtattgctactatcggtattactagtggagctagatgccgtatcggtattgctactatcggtattactagtggagctagatgccgcgttactctttgtaaatttcttatagatctcatcctcaccctcctgttcaaacacaatttgagcaacatttcttccagtttcatttggatcagttgaatctaaaaattgagctttagtttcaggttttgaggttgatggggcaggaggaggaggaggtagtgtcgtagatgtagatgttgatttggaagctccatcagtagttgtccatttcttactatctgtcttatcgagataatcattaacattttttgtgattcttgataatgaagttgatggctcattaagcctagaggtcatagtaccagctgatagctcgtaatcatgatttctactgcacatatctctgaatgtttgaattgagaacagaggggtaccgaactttgcggatacgactttcaatctctcaaggacggttatagcagataagattgaaattatccatagtgctacagaaatattatcttggaatggtataaatccaagaattacaattatgagtattctttcagctctctctgcaatgccttttccttttaggtcaacgcctaaaccttcaccacgagcccttgtataacttactagcattgaaagcgaaagagcaaccagaacgagtactgggtttgtgaaattgcctatgaggatacctacaaagacgacaatttctgacaccttatccaaaactgaatcaagatatccacccaacggtgaggttctctttgttacacgggcaaccgctccatctacgacatcgaagaagcctgccaaaatgaggaataaactacctaagaatgtagcagtataccagtccactcctatggcaggagagtgtaaagaaaacataatagctgatattatcgaaagacctaaacctatccatgtccagaagctcggtccaaagcctaaacttgcgaatcctctccctaccttttcaaataaaggatcaaatttctctcttaagttgttaagcacgtaataatttgacccgtgtcgtaatatataaccttttactattttctttttggtgttatagactacttatctaatttctactagtttcagaatttaaataatataatattatagagaaattaatttcgtgctaattgtatcttaattctttaataatttatgatttgactatgactatatttgtccaacgaaaataagttaaaaaatttatcatttacgtacaacaaagtagttattataggactaggccagcttggtcttccagttgcaaaatatgttaaagaacatggttttgatacctatggatacgatataaatcaaaaaaccatgcaatcagctgagaccaattatggaataaaacaagcaacaaactttggtgattttgacgtattaattatctgtgtatccacacatagaccagatgatatgtttacaccacaagtagatggtttgatgtccgttgttgaaaagatatctagagaagcaaagacaggtgcactaatatcagttgaaagtactataccaaaaggtacatcaaaaaaagtatttgaaaaagtagatcatagactacacgttgtacatgcaccacatagatggtatgcattagaagaagaaattcacggtgtaaatcaattacgtattgtaggaggtgtaagcaactgttgtctacaacatggtcttaacttttatgatggacgtgaggtaatcccacaacaaaaaaccgaatctaccaataccgaaacgcttggactaaaaagtctatcaattccaatgcatccagtatcatcagttgaagtagcagagctaaccaaaatagtagagaatgctcatagatatctccaaatagcatttgcagaagagctttacctttactgcaagtctaatagtatcagtttttcggaattacgtgaatcactcaatacaaaatggaatgtagaagtactagaaccaagagatgggataggtggtcactgtcttcccaaagatacaaagatgtttattaattcatctaatacaataaaaagcaagattttacaagcagccatggaaattgatgaagactatagagggtattttcagaatgttaagggatttaaaacatcccaagaagaaaaagactttgaaataataaaagctttaagatgaattaaccaatgtcgaatgatccaaaaagtaaaaatatactagtatttggtgcgcatccagatgatttggaaataggcatgggtggaactatagcaaagctgtctagacttggctatagggtgaaattagttattgcaacccttcctaattttactcagagtgataaaaaagatgaaaggagaatggaagcagttcgatcatcaaaggtaatgggatgtccagaacctgactttctagatcttcctccagcggagatgacccatagcaggaaattaataggagtaatggacaagtacatacttgattacaaacctgtagcagtctttactcaatggatcggggattcccatcaggatcatcaagccctcactaaatctgtaatttcaggtagcagggatactacagacttgtatatgtatgaaacaacgatcccaggagggattactgagcaagcattcagacctcagttattcatagatatgtccgactacatggagccaaaaaaagctgccctggaatgttttgaatcacaacaactaagatgcggtccgatttggatagatgcaatcatcggtagggctgcttttaggggatatcaactgaattgtaaatatgctgaagcttttgaagtaataaggatttcaaagtggtaatggtaatttttaagttttttcatttgttgtatttttcttagaagtagtctacaatagaagagtttaatgtcttgacagattttctttgcatcattaccctttcatattttttcatatcaacgtaagtttcgttccaatatctgaaacaagcaagtgatttatggtcctcaacttttacattctcgttaagtagaacgttcctgaccattatatcgggttcattcacgcctgcgactgttctcataggaccagatgccgaaaaccgaggatttatttctataattttgacttgattgtcatcaatatcgattcgagattgtatatttagaggaccaaatgtttttaattttctggctattttattgcaaatgcttgtaacctttggatatttgtctataaatgccttataggtctgaccgtgcttcaatattttcttgagagttattgttgacatgatgtgattcttgtccttagaaagagttaatcccgtggtatactcgtttccgtccccttgcagatacttttggatcattggtttccatcctatctgatttattgctttaatggcaaattctaattcatccatcgagttaactatttgaaatagctttgagccaaacccctctcgcggttttaccactagtgggaactcgtaatccttcaaaaaaccctcgatttcgtcgtacaaacaagttggaatgaaattcaaattatttttctgcaacaattcatttgtcttatatttgtctcgacacatctcaataatgtggggatggctggttatgacgactgcaccggtattatcctcaatgtagtctttattattacataatattggcaattctacatctgagcctatgaatagcgcttgaattctatttttattgcacaaatccacaactgactttaggtactcttttgctgtaggcttttgaagaatggagaatttgtgagccctgtataaaccggctgcctcatagctaatatcggttgccaaaattttgtactcatgacttttactcctggcatatttattatgatatttcaatgatttgataataccctgtgctactattccaccagctgatgtaaccacaacattaatgcttttcatggaactttattattgagtgatatttcactttagtagcactggttcagccaagtcgttactgttaactaatttattagaccatttttgctcaactcgctcgatcccaaaattaacggcataatcaattatacatgattttaatttcaatgcatttttagatttttgggtgtgctttattatatccttaattttcctttgctcttgtttatagtaaaataatttttctaataaactttctaattcgtctttatttttgtaaattctgtttctgcttaagattagtggttcaattattttccttaattcatcgttcttctggttgatttcaataaagaattcagagatgttagatatcccgttctcctctaaatattttgatgcttctctttgggcaaatcctgtataaagatcatttccagcccagaggaccatagtaggcaatcttatctctaactcatcgaatactctcttccctacaatggtatatcctatacttcccccagtgccagaaatgtagccagaaattgcaagttctcttgatagcaagagtaaaattgggattgctcgtggcgaaaccatattgagcatattctctggtattgatattttctcattattgcctattgataacgataaatttttcttgcatgaaatgcatttgcccatcaatactacttctccattagcatgcttgctaatcttagatgaggctttgctcccacaatcacagtgtaaccacaaaggtgaatgcttatttgggtttgcgctaactccagtaaatataccatgttctctaaaataactttctgatttttctaatgaatttaggtaaatttcattttcagataggaggtaattatatcccctctgaaacactttagataaatctgacaaatttacaaatagcgttctataattccaaatagtattggcgatctttgacatgatgactgcattgaattcggaataactatctgatattaaaaacgactcttcaattattttccagaagttttggaatcttgcatacagagccttaacttcagattttgacaaatcattattattttttatccaattatagatttgattttcccaataatttatcaaggagcgagtaggtggatctgttctactagagattttccacctcttagaatcattaattggatatcttatatcaagaataccggtagcatttttaatactaggtaattttgctacatgcatccatttgtcatccatgaaatcatggtcgactaccaaaaatagagggacaatattgtaatcttgtttattggagtgattagctaatgattctagtaaaactattttcttaaagacaccgctaaaagcaaataaattaggttgatgaattcctacgaaaatttttgatttttcatcagataaaaagtcaatctggttttttatcttttcatccaaggttcctgccttggtatgaaaatttgtaacggcctttttaagaagttcacgatttagattaacaaattcatctttcgttggtaaggggctattgtccaatttttcaattgcttcgtcgaactttgacggaatggattgtataaatttactaatttccgaatctgatgaattcagatacttggaaaatattgtactaaatttactgtcaccgtcaatagtggctaccgtattacttcccaaaccttttaaccattaatatctatttaagtttctttttaactatatctcattttcgttctataagatttatcaaatcttttattctattaaaattccctatatcattaatagagtgcgcatcgctaccaagatgaaattctacaccatattctttaaagattttaagaaaatctttgggtggacgtatatattttgaattaatctcaatttttttcttattggcaacaactaattcagctaaatttcttatttcatcgtcattgactttgaagccaatttctggagccagatgcccgatcacgtaaacgtagggattttcaattgcttttatcaaagcctcgtaccattgttctttgttgtattttgtatgaaaactagccacaatgaaatattgcccatttaagaattcagcggggcaatcgatatctccattcactagaatctttgcctcaaaccctttgagtatcttgattttagattgggagatgtggtggtttagttcatctatatatttttcagtccattcagaattttttcgtacgtgttcggtgatagctatcctttctaaacctaaatgttctgcttttgttatgatatttggtatggtcaaatcctttgaagaatgatcattatagttacaatgaatatgcaggtcttcttttaaatttaacatcataattttatcagaaaaagttatatgaatatgttttataatttttcttgattataacagttaaaaatatttatatctttaacaaaattaactttatttaaaaacggatgccgattgcgtagaaaaatatccacagttttgattccgggtgcctctgcaccagctggaataaatacaataaaatcattgagattatcagattttagtggtaaaatattatcgacggattctaacagtttatcggcagggttctatttatctgactattacgaggtgataccagaagccgaagcagatgattacttggaggtattgcttaacattattgacaaatataatattgaggttttaatgccttcatcaggttatgatatatttccgtttagtgaatttaaatctaaattaaaaaagcatggagtgtttccggttgtaagcgacaggaaaatcttagaaatttgcagagataaattaagcacttttaatcacttaaacaaattttttagacttccacagaccacattaaatcccgatgaaatagatacttatccagtaattgcaaagccccgttatggaaaaggcagcagggatgtggtcaagatacatgacgagcaagaaaagaaattcattagctcaagatatctcaacatgatttatcaagaatttttgcctggggatgaatatactattgatgtgttaagtgatctggaagctaatcctataatatctgtaccacgtgtgagattacaaactaaaagtggtatttctactaaaggtaaagttgttcttgataacgaattaattgaagaatcaatgaaaatagtgaaaaaacttaaaataattggaccctcgtgcgttcaaatgaaaaaggacaaatttgaccgtttccagttggtggaaataaaccctcgactcggcggaggtactatttttaccacactggccggcgctaacttccctaaaatggtgctggatctagtggaaggaaagaaaatagatccaccaaagatatctgaaataacggtcctaagatactttgaagaaattgtattagatgagcgtaataaaattaattacattggaaaagaccttttaaccagtaatgcatgtcatatctgattttgtttaaaggatctgttgaatctttgagcgtgtcgactgggatatgttgatctatagccgccaacaggttacagggccacaagtctgtcaaatgcatgagaataacaaaaaaggctattatcatagccaaagcgacaaaaattacgtcgacgtttttaaattcaaatcgtgatttcaaatagatccctttattaaatatttttaaatcttttcagcctgcaagcattatctccaaccggttttctttatagtaattgcagcatatatcagtagccatgtgtagacgtaggtcgacaaaagtgtaaagaacggtctataaagccaatttttatcaccagggtttcttagcctaaaatcaacggcataaatcattccagtaaacagtactcctgcaaaccatacaatgggagtcgtgtaatcacccataagaggcataaagataaccgtagaggctactatgtatggtctgataaatttcattgcggtttgcaaataatataatagtgcaacatacattggccttttccaaaaaatgcccccagcagcaaacaaacttctgataaaacttttcctccatcttacctgttgttttattaaagagacaagcgtaggtggaactccaatatttactctaatattttgagaatacaaaaccttccagtaaccattgacatcttgcttagatttacctgcgttattctggttctcaaacatattttcggtcgacgacctcttggccatgccatccacgttgagaattggaactgaagagtattgttggttagttgatatgttagatatttttggagggcgtgtcgacagaacatgagccgtcattctcctgtcagtagcaaacttgaattccatcccaagaaatctatctcgtgcccattgagggataaattcttggatggcagctcttttatagaaactgagcgaccctgcacaacagcttacagatgaaaaaacactttcggctcctttttgcgctctacaagcgccgtctgcgtaaacatcctgtaatttctcaagaaagtgatcccagaatcctcctgcatgtctatttttaactcttccatgtcctgtgagggctcccacttggttatctgagtggaaaatttgcacagccttttcagtcgcatcgatggccatatcacaatcgctatccataaaagcgtatatttctcctcgggctatcttgctagcagcttcaatcgctttcttctttcctacactttctttcaaatgtactattctaaggttaactgatttgtttttgtcttttatgccgtctagaatctcaccagtcttatccgtactgccatcatcaactacaattatttcctttttttgatatgtctggtctatacaggactgtacgcatgtactaatttcagcttcctcgttttttacagggatgactattgataccaagggcttttcgttttcaggaatttttttatcgaaatactttagataggggtctctatatctgaaataagaaataaataaaatattaaataatacaaatgaggttaaaatactatagattcctactcccatgtctattacgtaaatggtcaaaagaatctttgtacacaaaattgctagtacggctgataagagtaatgccctaacaaaccatcttttgttatccaattcttttgtttttgtgaatttaggtaaattactcaaagccaaacatgaatcaactcgtcgataaattaattgaaataaagctgtttattacttttttcttattagcttcctagggttagttatataagattcttatagtagaaagagagaaattaaaaaaacgtattaaaaaattttttcaaaagcagactataatctctaattccatctcaatctttcattttctctatcctcctttgatgattttttccaatccttgtaatgatttctacataaataaacacgcttttttgaattatcgaaatctaaatcttgtgacatttttgcctttgccaaactcattgatctatctgcagactcttcgcaacttgaaacactacaagtaattcccttctctacttttcccattagaaagcaaaaaccatgataatataataaagttaatggaacctggataacattctataatgtgaaatattgtgcctctgggttatgcacaacaattgcagcggtagagaactccggatcaatctgaccactttcagtaagattcatcccactaatcgatgggttcaacaatttccataccaggaaatgctgggttatatctggacagctcggataaccccagctgtatctcaatcctccctccattaggctaagttcctgcttgattttgtagtttatccaatctgctagagcttctgttgtttcaactgccaacccgtgcaaataatatgcatcggtgtataggccttgtttgttccattcctctattatctgggcaaccttatttcccattgttactgcttgaaatgcaactacatcatcagcatctgagtcaaagtaatctgcaagacacaagtgcaaagaattactagatcgtggaaactcaaatatgacttccgaatcatttttgttttcatcttgatattttactaaaagactgttatttccaatcttcctacatcggaagtaagaataaactgcgttaggatcaaataatttctcctttacaacttttaatttccattctttaaggagttcttcaaactcttctttcaattctgtagctttctttcccctcaatccccaggataagacaaaaagcgatttcttattcaagtattgccagatttcatcgagtaagagatctgtgttccccaagcgggtaacaagattaaaattaggtgcaacaggcttttcctttactggtttcacactgcttacaatatcgcctagattttgcaaattggttgtttcattatattttctctccttccaacttgtcaagttttgtaaccactttttcatgtattcttctttattttctgtcatcaaattgttcatcacttttagcccatcaaaggcagttttgcagtagaatattccagctttgtaaatattgccgtctccctttgctattctattgatataatcactatttattgcagcacctccgcatagaaccggaatatcgatcttattttctctcagaaattctgagaaaagctgcatttgttttgaagtagaaaccaataacgcagataatcccacagcatctgcatttacttctttgattttgttaactatgctaggaattggaacttgttttcctaaatcaaatacttcatagccattattgaccaaaattgtctttaccaaattctttcctatatcatgcacatctccgtagacggtgcataagacgattttacctttgctaatcccctcttgttttatcaagtatctttccagctctaaaactgcagccttcatacattcggctgactttagtacaaatggtaagatcaattcgcctgctccaaatttatctccaacttccttcatcgcaggtaggagcacttcatttagtgtttctacagcgccatcatgcaatttttctttatcaccatttagtgtttttcgctttataccattttctaatattttttcagaaatgctaaaggcatctttggatggaattctttccgatatggccaaaaccacatcattttcaatcccatcctttagcctattgacgattctaaaataacattttttaccagaatcccaacttgcatccatttccatcaaattgttctgtttttgaataccagaagttcccgttcccgttcctttgacaccatcattggaactaaaataagatatcaattcagacaatgcgttactattagtgttaaaaatgaggtcttcgcatattcctttttcctttgaattaatttgcggataaggtataatgtcttttggattaattataacagtatccaggccacttttgattgcatgaaataagaaaacggagtttaagtatttcctagccagtggtgacaatccgaagctaacattacttaatcctagagtggttaaagactttgggtatttttcttttactaacttgattccctctaaggtatgagaggcagaagcaacatattcatcctcacctgttgctagtgtaaaggttaatacatcaaaaattaattgccagggcttcaaaccaaatccaattgctttgtcatataaaatgcctgcaacttccaatttttctttgccagtctttgccatcccattcgggcctatacacatagatattgcaggcgccccgtactttttcattagtggagtaatatcactgaatctacttccatcgccttcaagattaatggagttgattatggggactccaggaatctgcttgagagctgtagcaataaccttcgagtccgttgaatcgattactaaaggagcctctatttctaaactaagtctcttgacaattttttgcatgaaatcttgttcatctgaacgttctgttgttgcaacacatatgtccagacaatgtgcgccatcctctacttgatatctggctaactctattaacccatcaaaatcattctctaataccattttcttggcttttcttgaaccttgggaattcaatcgctctccaatgatcaacggacgcggattctgatgtagctctagggatgttaaagctgaagatacttttggattttcattgtaaatttttttcatctcaaaaacacctctgtatcattatatgttagatgtccgttcctctgccaagagacttatcgtggatagattcttttcttgagtcgagcatggagcgtaagtgctttacatgatctggagatgtaccgcaacatcctccaataatttttagcctttcatatttattcacgaattcagaaagttttaaagtgatttcattcggggtcattaaatatttagctaaaccgttttcattgattggcattccagcattgggcataactaagatgggtaactcattttgttcacataaccaatgtacactaggcgtcatttcaattggaccagtcgaacaattcaacccaaatacatctatgtctagattacttaaggttgtataggccgattggacattagttcctaaaagcatttttccatattggtctagggtagcattagtaattattggtaaagatttttctaacttgttcagtgcacggaagcagctctctacagccagtttcatttctaggacatcctgacctgtttcaattaggagggcatcacaacctccgattatcagtccctgagcctgaacaaaaaaagcttcttctatttctcccaatgatatgttacctagatcaggatcgtttgaacttggtaaatatcctgatggacccatcgaaccaattatgtacacttctcgacctaattctctggctgactcttttacaagttttacggcttgaacattaaaatcaatggttttattaccttgtccatactcgtctaatttgagcttattgctaccaaatgtattagtttcaatacaatcactgcctgctttgatgtagttcttatggatagtctttatccattcgggacgggtaaaattcaagctgtcgttaaatccctccttgttattaagataatcgttctctatgggttcgtatttttgaatttcggtacccatggcaccatcaaaaagcagaactttactatctaggtcattaagaaaaccattcaatattattattatttatgtaaacgtctcttttgtttataatcctttcacatagacacaaagcaattaaaaagagatttatagaaaattactatttagaatactgggttcatagttcagcatggatagaatgactgcctgcggagcagctggtcgagggttcaaatccctctggacccgatctaattctatagagacacgactccgcaccagcccatcaactttttttaattggcttcaggtcaataataaatggaaaaaatatgatttgctgcagtagattgcaaaattatagactttttctagtttaaaagatcgagttaatctaaatgcattttgtttaatcggtctcttaattctctcagtaatgtcttatccaggaccatttcttgaacattgatcaactttctatcctttttgacctttgtacctattagatattgttctttgtacttgtctgtcctatgaattctgtataagtcattaataaacaactcttcaggatatgaatctagattatcttctgctaccaccatctaattaaacaccaaatacaattcttaacccgtagttaatatgcttagaccgtcgtttatagtctatatcactgattttgaaaatgacaagatatcggtcattatctttcaaaacagttaatatctgccttttcaatatcggttaaacttgacatctcattagtgtgcgagtttgtccattcaattaccgatgctcgtttgacatgttatatggccagcgagagacaccgaactaaatttagtgtctttaccttacctccagttgttcataggtctcattctcgtcagacctagacaaattcagggtagacaatataaaattgtaatatcttcagctaaccttgccaattccataatcttttctatattaattattacaaaaattacagtcaggtatctataaacttgttctgaccttctgccagtggatattcaaatttattcaaactggctttcctatgaataaataatatgcgaattctctaacctaaaaataggagtcaattaatgagtattagaaaacatattctattttagagattgtgagagataaataatcagtttttcataaaaggtttaagtatactatttctgtctatatcctagatgacttcaggtaaatatttcaataaaggtgttaaggcattagatgaaccaaatgtaggttatgtagtcagagaaacaccagataagataatagtatttggggaaaaaaatgaaagatatgatattcctataaaggaaattcaacaagtaggcgccaatgtattaattggattaaatacagcagaccttcgtaaatatgctgtgcgacgagacgctccacttccagcaggcagggaagatccgtggggagaagcagacagggtggttgatctagcatcttatgaaggtaaatatcctaatactctcttcaacaaaggggtcagagcgaagaatgaagatcatgttggtcatgtaatgaaggaaactaatgataaaatagtgattttcggacagaataataaaagattcgatgtttccaaatctgagatttaccaggtcggtatgaatgtaatattaaaaatcgattttcctgaaatattcaattatgaggtaccaaaggaagcaccgttaccaacaggcgacccaattgaaacagttgaagcagatgcattccccgacgaatatcatggtcctaaataataaaccaaattagccttttttgccaattcttttattttttttttatactagtccatattctttctatttgggacaataaatttagaatttgatattcctgaggagattctacactttaatcacatgagattaccgaataaatctaaaaaagtctaactaatatagcattattaaataaatgcactattttgaaagaaaacagaaattcccttaaatgataaaatcaagttacaatgtacaaatattattaggaaataatccgaaatataggatataaaatacgaccaggtggtatgtattggcaaatttgaatgtcagaatttttggctatattttgctatatttagtagcagagttctgttggattgtgctctataacatgcaagtcgagaaaaaggtgggatgtacatacgaaaaagcacacttgaatatgaataaatctaggcacaaaataatgataatactatatgattaaggataaagtcatactaatcacaggtgcaagcagtggaatcggttattcaactgccttaactttgtctagagcaggagctgctattgtcgcaggagcgcggaggcttgacagattggaaagcttgaagaaagcagttgaagaacaaaacggcaagattttaataaacagattagatgtaacgaataaagaaggttgtacccaatttactaattcagctattaatgaatatggaaggattgacgttctcatcaacaatgcaggactgatgccattgagttttgtaaagaatctcaaaatagacgaatgggatagaatggttgatgtaaatattaaaggcgtgttatatagcacagcatccgtcattccgcatatgctagcaaataagtctggtcatatagtaaatgtatcctcgatagcaggcaggatagtttttccagctggtagtgtttactgtgcaacaaagcatgcagttaccgcctttagtgaaggattgcgacaggaattaggccaacgttcgaacattcgtgtaacttgtatagagcccggcgtagttgatacggaacttaacaataccattactgatagttctctacaagggtttatagaaaccgttaagaaaatgcagccgttgcaagctcaagatattgctaatgctattctatatgcaatagactcaccaaatcatgtgaatgtaaatgaaattatgataagaccagtacaacaagaaaggtaacgaatgcattctaggctagctctgaactaaatttattaaagtaagaatattcattatggattattactttttctacttagttgaagtaaatttaacgcttatctttgttatatctcttaattttcatcaaatctactcaagtaatctttctggattgtatatacctaagggttaacataatttgataaaccccaccacctaagcaagataagatggaaactgtacaaagtatatcatgtttgtccttgacctttttgtttgctttgttaatattctttggtcttcaagaaggtatatcattagggcagatagaaccaacgtggattaattataccttctcggatgataatgcaatttctttcagttatccatcaatttggacatttattaatgatacaagcaagcataacgatgttattgttactttggtgcctccaaataactttgacttgtttgcagaaaagatgatattcggaatggaaaggttacgaccaaacacgtctcttcatgactactccaataatgcaatcaaaattctgtctatgactatggataattttcaactgctcgattcaaattcatttgttgtttcaggtaccgaatgggaaagaatattgtttacccatgaatcagataaaagagtaattaaagttttgcagttttggtccatcaaagatgattatgtttatattgtttcatttggcaccacgtcaaatagttatctcagttaccttccaacagttgataaaataatttcaagtattaagattattacaaaaaatacaacagataatattgtcaatggtaccgtcaatggtactatttttcagtctccagaagggtttgttttagaatatccgagcagctggaagcaagtatcgggacaaaaccgagtatcttttatatcaaatcaagatgatcctcaagatcgatatttggaaagagttgatatatatcattaccggaacgatgacaattatctgtctgataacataatggtcgaaaacagttccttaaactttgatttaatcagtgaaattaactacttggcaaataatttaaagaatcttgatttgatttcgctgaataatattaatttctctaatgttttgaatggaaaagagctgatatacacttttgattcaaatttgggccctaccaaatcgaaagaagtaatggtaaaaagcaaaactcatttgtttgtaatcatatttacagctcaaaaagatgaattcgataaattctctcccaatattaacaaaatattacatggcttccgactaaacccttctaatgtgtctgagtaggtggatttttgagaattgtagtacatttatatatttaccttgggaagggaattcgaataagatggatagtacgggatgcaaagatgaacgaaaatatcatatgtagaaaaactcaggatgacttgataaaaaaacttgacaaccctcccttattttcaattattattccaacttttaatgaatctcaaaatgtagtaaaattagtaaattccattaatgaatgcgtcaaagaccaaggctgttatgagatagtagtaattgatgataattctcctgattgcacaattgatagaattatggaagcttttgatgaaaaaaaagggttctatttatataaaatacgagatacggtgggaattcaatctcataagcattatttgatatatccacgtaaggaggagagcttttttataaaaattgtaaagagaaaagagcgttcgggtttgatatcagctatttatgaaggatttaagtcatcagttagtgactacctcatagtaatggatgctgacttctctcacactccttcacatattaatagtttgatgagggagataaggacttcaaactgtgatttagtaattgcctcacgatacttgaaaggaggcaggatagtgggatggacttcgaagcgaattttttatagtaagtttgccaccaacttatcaaaactcttatttagattatccgatgtgtccgatccattgtcaggattttttgtaatcaaaagacaggtcgttaggaaaatggagtttaacacttctggtttcaaaattcttctagagatattggtcaagtcaagatcattaaagattaaggagatcccttatacttttactgatagaacaaatggttcaagtaagcttaattcaaaagtcactattgatttttttaagagcttgtatattttacataaacatcattgaaaatgaggaatttgctaaaatgattgttgtgcgtactaggcaggtgaaattttaataccaaagtattctaaaatcttgtcctttttacccagtgcaactgaaattttgtttgcagtaggtcttgaaggtctcctcagaggggttactcacgaatgtacctatcccgaaaaagctttgtacataccaaaaataattcaaccaactctagattttgatcaaatggatagttcccagatagacaataaggtaaggcagatgtcaagcaaaaatcagcctttatttaaaattgatgtggacaaaataatggaaataaaacctgacttgattattagtcagaatctatgttcagtatgtgctccctttgataaagaaatacaagctacttttaacatattaggatataaaccacataatttagtattgaatccaacgaatctcttggaaatatttgaaagtatactgttagtcggtaaagtattggatagagcagataaagctttaaacattattaatagtcttaaagaaagaatcaacacaataaaatcgattatcgtagaacctggtaaccaacatcttgttgataatcagcctaagataatgtgcttggattggttagatccattttatcttgctggacattggataccggatatgctgaacatatttggcgccaagagtttaaatggacaaagtggtttagattcacgcccaataaattcgcggaaaatttcagaattagatcccgacaagatggtgttaatgccatgtggatttgatactctcaggtcacataaagaatgtgaacagattaaggattcctactggctctctttaagagcaaataagaaaaaggaaatatatattgtaaatgccaatgcctattttagtaaaccaagtcctagagttgtgaccggcgtcgaaatattaggcaagattatttatcctgaggcgtttgagaatataaaagttccaaataatagtctggttagaatctgattaattactgtcttttaggaataagccaagagatagcatatatctaatttaccaaataacagatacacccgttcctcctagtgatatcagagagttttgcaggatacgagcggaccgtattatctttgttttcataaatcgaggagatagggaaaaacactttggagttcggatcttctaaatcgtcgttatacccatacatcaagtttgatatttcaacttcatacctgattggataaggatgatatgaaatcctgttccaccattcaagccccgtgaaactttgatgaaactgaaaagtaaacaagcccctatctacgttaagaaaaaatttttcgtcttcatttaaattgatatcttttaaatagaattccaacgttgaatctttatcgacgaaatttatttgtctatgatatgaatgtcctatttgtggtaagactttcttaaatcgatactggttatgacctttgaaaattgcctcaaaatagttctggttatcgaattggcatatcaggtttaattctactgcaacatgctgagtattgaatatttctaataaatatagcatccaagacttgtctgggatgctattacctttgtctctaattattcgtagattatctgtgataattctaaattttgacacatatttcctgtagtcattatgaggagtatcaatacatccataccaatagtgcatattgacttacagtagattcaatatttattcttgagtacttttattaacatgacttaattttaatagactataaaaaattaatgaaaaatcagaactgaatcaacctgtttaaaagcaataaaataaaaaaaatacgaattcacaagttcctaaatgcatcgggaagatatttaaatagtctattttataataagtaatgtcaaaatctcaaccatggttttcaaagcctgttactattatgatcctactatgagaatacaaagattgcataaacatatgccataatcctgaaatctgtagagtaaaataaaatataggatggccacgacttaattacatggttgacgaaaacatggaactagatcaagttgcaactaagaaaaagatttctcagcctcctttaaatttactttttaatccctctttgatagaacgaaatgatgtctggaagattgatatcgtaagactcttagaaaccctactatccactttaactaaatcttcatataaagacttgcgcgtatgcggtgtggcaatcttaacctcgactttgatacatagactcaaagtggaatcgatatttcgattagaaaaaattgctagtaaagatcaacaaggtatatctgaacgggacaaggcattcagtgaaaaagtgcccatcccacagatttctaatattacattgccttttagaaaagaactatcatacccggtctcattagaggatcttatttctattttggaaacaatgataaccgatcttactaatcctgttgtaaaacgaactagcctgaatttggagccagtcgaagttatagactttcagcattatctaatcaaatttgagaaagtaattgaagatttcgaaaataggctaatgacaaaactacaaaataaaagcgaattggactttaatgaaatgatggttgggttagatagaattgaaatagcaagatacttcattgctatgctctatcttagtatgaaagataaaataaacatcataacaggatttacagacttgaattcggggatagaatatttagattcttcatcaccgccttttgaggcaattgagaccacaaagaatgttacagattggatcaaaatcaccctcaaaaataccttgcaggaataattaaatgactaaattacctactgacgaaatcattgcgcgcattgaggcatcgctttactctgccgggcgtcctcttacaatagatgagatactaaaggcatcagggacggactctagagagagagtaaagagactattaaatgaacttataaacaaaactaaagtcgcatttaaagcgttagagatagctaaacttgaggacggtacatatgtatttcaattgaagtccagttatgcaccaatcataaagaagttttctcacaagcctcaaatttctaattctgtaatgaagacgctatcatatgtagcatatgaacagcccgttactagcaagagattagttgaaattaggggctcaaaagtttataatcacctaaaggaactacaggatttggaatttattagtcacaataattcaggaagagtcaaggtatacaatactacatcgaaattcaagaactattttggaataagcgatatagcgatgcttaaaaaaagtttgctgctcaatcctggagaatttgcaaagaaaaacacttaattatagtttcgctaaatttgaactgtgcgtaagtctagcgaaaatttgggaggcaggaaattaacaggtggaaggatatttcctagtcgaattagaaggaaatatgaaatagatagatacccaaatgaaccaattgtaggcgaaactaagaatgttattcgaagggttcgtggaaataatgttaaagtagctttcaagtttgccgaattcgcaaatgtaaatgataaggataccaagaaaacaaccaaggtcaagataattagggtcacaaagaatcctgccaataaagattatgagagaagaggcgtagttaccaaaggctcaattttagagactgaattaggtctggcgaaggttatctcgagaccggggcaggatggtattgttaatgcagttatcattaaacaataaatcaagtaatttgtttttaataaaaaaagaataggaatttataaaatataatttcaatatccttattggtaaggataggtattacggtttttccaggcagtaattgtgatcgtgatgttcatcatatattaaacaatgttctccatatagatgccagatacatctggtatgaatcatcttttgataattttgattgtataataatacctggcggatttacctacggagataggttaagagcaggtgcaatagcagcacatagcacaatcatgaataaaataaaggagttggcagacgataatgttccgatattgggaatatgtaatggctttcagatactagttgaatctggcctactaccgggcgcactgattgtcaacgagtcattaagttttatttgtaaatggatcaatgtcgtggttactaatactgatactccgtttacaaatctgtttgataaggatcaaaagatttctatacctattgcgcatggggaaggaagatatataatagacagtaaatcttatcgcaatatcaaaaacaataaccaagtcaccttagagtattggaaaagcaatcccaatggatctttaaacagcattgccgctgtctgtaacccaagaagaaatgttatgggcatgatgcctcatcctgaaaggggtagcgacaaagatctgatccctttaggttttaatcagagttcaatattgatatttaagtctatgattaactattttaaataaaacctaggaattagaaatgaatattctcaacatagatgaatatagttatttgaagaagaaattacaaagggagccaaatgagttggagcagtttattattagtgctgaatggtctgaacattgctcttataaatcatctaaaaaacttctcagattattaccaatgaaagggaatcacatattggtgggtccagggtatgatgctggaataatcaatgtgggcaatggttatgtggttactattcacatagagagtcataatcacccatcggccgttgaaccctatgggggtgctgcgactggagtaggaggagtactcagggacatattgtcaatgggctcgcgtcctattgcattgtttaacgctttaaggttcggtcaggtcgacaagaattctaaatttggatcgaagaatcgatggttgctcaagaacgtagttagagggattgcagattatggtaattgtatcggtgtcccgacagttggtggagaggttgaattcgacaaatcatttgataattattgtctggtagatgtagcttcaatcgggtacgcaaaacttgatgatctcgttatgaataccgcaaaaaaaggagattccctgattctaggtggtaatgccactggtgtggatggtattcacggtgcttcatttgcttcaaaaaaccttgatgaagaaaatcgttccgcagtacaaattccggatccatttttggaaaaaatgctcatggaggcaactttggaggccatagaaaaagattgcattaaaaccatgaaggaccttggaggaggaggtttatcatgttgcctctctgaaacagcagacagtttgaaaaaaggatttcttgttgatttgtccacgattccgttaaagcagacaaacatgactgatgcccagatcatgatatcggaatctcaagagcgcatgctgtatatagtcgacgagaaaaagaaagttgaattctttaaaatttttgataaatacaatgtaaattattctgtaataggtcatgttacagatgatctaaatctttcagttgttagagaaggtaacatattggctcgtatgcctgccgaactagttgcccatgcgccattattaaataggaaatctagtcgaccatcttatctagaggcgatagaaaaatcgttccgagaaccggaacctcaagcgaacatcaaaaaaatggtttttaaaatgttgactaatccttccatatgtagtcgaaaatggatctatgaacggttcgaccacgaagtaggagttagaacggtatcaaaaccaggagcatctgatagttcagttatcaaattagacgaagataaatttctgagttttaaattagacggtaactctaaacattgttacttagacccgtacgagggaatcatcgggtgtttggccgaatcacttagaaacctcacatgcgtgggtgctagtcctcttggaatagtagatcacttacagtttggcaacccagaaaatgaagaaattttttggacattctcagagacgatcagaggtattatagaatactgtaaattcatggatatacccgtggtaggaggtaaagtaagtttgtataatgaaaccgccgctggtcccataaaaccctctccagtgatagggctgctcgggataattgattccaaaaataaaataaaatatccaaaatatatcccaaacgaatcaatctttattgttggtacaacaaaaaatgaaatgggcggatcagaatactttgagtattgcttgaatgtttttggtggaaaagtgccccgtgtccatttggaggagcaaagaagtatagtagaaacaattaggaatttgattgacgatgacctaatcacgggagtgcatgattgttctaaaggtggaattatcgttacactgttagaaatggctatccatagcaaaattgggtttagaatttccgttgacaaaatacctaatgagtgctctaggctagattatttacttttctcagaatctcatagtcgatttattttttcaactcaacatgattcaaaggtcgttaaatacttaaaaaaaagggccattccttatgcgagaatcggatgcagttcatatggtgaaacttgtataattgatcgagaaggaaaaacaattttcaaaagttcactagatactatttctcgaagttatgataagtctctctcgaatctgtttgcaaaatctaattgacattctttttagtctagcgaatcaaatgaagatttgaaggtatcttaatcattgtaaatattaaatagaaagattaacgcagatatatcttctaatggttcacgaaaattgtggtgtagttggcattttttcattagggggcgaaaatatagtaccttatttgatagattgtcttcgagcactgcagcatagagggcaagaatcatgggggatagctgtaccaaagaaattgccttttaaaaaaaccggattggtttctggatctgcaaatgaatttgataaattaattacaaagttttcttctaatatagggattggacatgtcagatattctacctttggatccagctctctcgagaatgcacagccattgaaggttaaagatttatgtatagctcataatgggaccatttcaaatgcagaacagctctctagcatggttggtggctgtacttttacaccgcaaagtatgaccgacactctcgttgcggctcaaagactagtaagtatactaagaaacaagaacgatatgaaggccgcgatggagatactcaaaaatgagatggtaggatcttattgctttacatttgtcacagattcaaatacgatttatgccgcaagagatcctaaaggctttagacctcttgtgttgggattacataaggatactaatacctatattatagcatcagaatcttgcgctttgtcaactgttggagcaatcctattgagagatattgaaccaggtgaactgataagaatagacaaaaatggtctcacatcccaaagattttccgaatctgtaaatcatgcgcattgtgcatttgaatttacatattttgctcatccaagttccattatggaagggataaatatttatcttgcaaggaaaaagatcggtgaatatttagcacttaaatttccctttaaagaagctgatgtggtaatcccagtacctgattcgtccaggcctgcagctctcggatatgcgttaaaacttgggttgccttttgaagaaggtttgttaaaagacaggtatagcaaaaaaggctcaatgagaagctttattgagcctctggtaaaggacagaaaggaaatcaaccaaaatattctgccaattaaagaaatgatagaaaatagacacgttataattgtagatgatagtatagtaagaggtaccagttccaaagcaataattgagtcagtaaaacaagcaggggctaaaaggatatccatggtagttacttacccaccgataagttatccatgttatgccggaattgattttccatctcaggaagaactgatcgcctttcaagttgccaagaatgaagtggattcgaaggcaattggtaacaaagtcgctagaattataggtgccgacgaagtttgttataacgataacataaatcttgcaaaaggaatcggtctgcaaatgaatgaattatgtttttcctgttcatcaggtgattatactccacttggaataaaacctgattttagttcaagatatcagactaatgacaaaatattagtaggttaaaatttaaatcccctcattttaatatagttatattgagtttagaagagcttcgcgaaaaggcattttttcaaaattcaatcgatatatggataatgttgtgtgaggaaaagaactgggattattcggacataaaaaattacctaaagtttatagattatctattttcaaatgggataaaaatacagcgctttcccctttgtattaaagagtcggggggaatgttcgaaagaggaaaagataagacgagttttttagacaggctatctaaggtgcaatctgacaatgcatctgcattcacaattaagctgacacaatcagcaatagctacgatgaggggatttactttataatcttcccaaggttagattttagtggtccaaaatgtagatttttggatcctccatgaatagtaatcctttataatcctaccatcggtagtgctaatctgattctcatcaacctgtttacgattcatccacacacactgattattaccatttttcaaagctctccgtggataatttaaaatgatacaaacaaaaacagtttcgataatatgtgttccagttaagctatcgatattcgaatagatgcctaaaatgtcaatgggttcaacatgtagttctgtttgccgtaaaatagatctccgtaatgtttcttcagctaattctccgtacctaattaagtcgccaggaagacatattatgtcccttttcaccgaatctggggttctaaggagaagaatttcattttgactattactacatatagccctgaccctattaagaggttgtatatggcggtctttatttttcattgggagaattattcggaaaggcagaactagttatatactcataaggcaaaattcgctttgagttctttttttgtgattttgtctacccataggaattttctctgaagcgtacttgtatacattttgttccaatctaaatcaacaatattcatccaggaacgaaatactcgtgggtcgatataatttcgtaaagaagtgcccaaattatactccgtggtttctttctgtaactttacttggaattccaatttttgaactctttcatgcaggcgtattctttgtttttcagttttccaatccttggaccttaattgtgcctttaaattattaataagctctatttttttgttcatagaatcctcatatctttcaattgctttaatactagcgggatttttagggtctattcccttcttatgattacacgttattgcagcttgcaaatttgcatacctggcaacataaagcttttcaaattctgaagattcctgactaactttgatcggaggatttcttagcgatttcttcactatatttgtggcaatataagttctaaaaacttttgcggtaagcccaggtacattttttgaatcaatatttctcaaaaatgtatttactctcattgaatttatgttatcaaaaataggatctgtttcctttttgttttttgtaaagagattcaggttgttaaataagagtagcttatcatcggaatcaatcaagatagatttttgccatggcacactatcctttccaagaaaattaaattctaatactctattcttcttatcgatctctttgaattttaagtgttcctttctaagtgtagttgcacccaccgtatccgcttcatccggatctttttcatcaccgactctcatggccattttgaatatgaggtaacatacggtagaaactttccgctgagcaagatcccttgatgtcatcttattcacgatctccctctcaattttgtcaatatatttttcaaggtttttggctttatcatatttggccttatcatagttctggcggattaaagatgaatcgtgtaaccaaacatattttctttttccggtcagtgtctcaatccaggatgctagccaagtagagctatgatcgtgaattattttttgccatgggccctcagggacagccgcctcttcaccaagatttagtataacctcttcgggtttgacacgaggcttccatctacctcttagtggatgttgtcccctgcccataaacaacccgggcggttcaactaaccaatttgctacatccacttccacgtcatccactattgctttgccaaaatagtttttcaatttttccttctcattttttctctctaatgtaatcttttttctttgttctcttgataaatttctccatgcgatggtgtctctttccttagccgccttttctttatcaacatatatgaaaaaatcactcatatctaattgattaatttcgttaagactgttttgcatatctctaggtaacaatcttttaaaatctgtcaaaaaattcttttggaaaacaggatcttgtacataatgagtatccttcttctttgcccaggcatagatcaactcttcttgatccttatctagcgtgtaagtttgttcatctattttaaagggcaaattcttgactacgtattctggaggaaagcagactccattgtgatgaagtgtaatccatttttgggtgccattatttccacggttttgatcatatctatcatcagaagcaatcgaaatggaagacaatttatataaaactattttgatttagaatataaaactattctcttagaaaacctgtcctttcgatataccagaaggtaagattttctttttgaatacttttttgttctagatttatcaggatgaagactgtatgatatgttttaaccaaacaattctgaattggcttatttcaatgctaataacatttaaaattttgtaagtattccagatttattcctgtaactgtccccgaactcagtaagtttttgaatctgtttcaggttgaaaatcgttccatcaacgcaaaccaacttatcatttatacaacagctcgaacaaatcccaattccacatttcatgtatctctctatgctagcctccatatgcacactactttcggttgcaagatcgtatacttttttcatcatcatctcaggtccacaagtgtatattatgtcaatatcattatgactcggcagatagtctctcaaaatatcagtgggatatccctttgtaccaagagaaccgtcttcagtagcaataaataagtcaattttactttttttagcccattcagatattattttagtaaaaaatagttcagatttagtcctggcacctatgatgaatgtaaatttagaatcatattccttgatgcaggatagtagccttacaagagggacaagtccagtaccaccgcctaaaataataatattcttataggatctatttagtgaaaaagagtttcctaaaggcccacgaattcctagtttgtctcctttttctttgtcaaacaaggaggtggaagcatagccattctttcttatggtaatcgcagcgtggcctttcttgccactaatcattacgctcaagggaatttcttctttcctaggaatccaaaccattaaaaattgtccaggccttgataaactgctaagagagtctttaaagataaaggtcttgactgtagaagtttcgatgattgcatcttcgatttcaactattctcatcaagtttttatctatgggcaactccaataatctccctaatatcgttgatattttgtccttctaagaaggcgtacaaatccttaacaatgttgcggactgagtagatgcctttcaaacctatcacactgcctatctgtattgccgatgctccagccatcatatattctaaaacatccgagtatgtcattatccctccgcaacctatgataggaatttttaaattcttgcttaattcaaaaacacatctgatcccaataggcctaatggcacttccagataggccgccgatcttattttctaaaactggacaatgagtttcaatgtcaatcttcattgctcttagcgtattaatagcagtaattccgtctgctcccgctctttcggctgttttagcaatttcgaccatgtcagatttgcctaatcctactttgacgaagagtggctttgtagtatccttcttaattgacctaataatgtcatggactaggttaggatcatcaccgatttccatacccattttttccacatgaggacaagataaattcagctcaaaacccaaaattttaacgttcttaaactttctgacaatagcagagaattcactcttatcagagccaactaaacttacaagtagcggtccattattcttcgaaatttccgttgagaaccactctgctcctggatttgccagcccgacggcgtttatatagctcatattttctacactaactatagttggattcctgtaaccttcacgaggattcaggctaatcgatttacttactatagcccctgctccaattttatacaacctatcaaatatgctttgggatagtcccaaaataccggaggctacgatcactggattttttaaatttaaacctgcggtggtaataggtatattataatccaattcgttgtaaaaaaacttgttttacatttgttaaaagtttatcggaagccccatatggtgaattaacagagcactatattcaaaaaaagatgtaactttatcaacctaatttattgcatttcattaactaatcatgcaaggaatccatagatatatcgtagaatgcgaatttgttctcaacttattctgaatatgcagattaccccctacaactggtctgatgcctgtagttagactttttttattcaatcaaatttactgactccagggagaatagtattattttatcaattctctaattgaaattatttttatctgtagatttcatattaggtcatttattaggtgttgaaaagaggatgatcgggatgcaaatttaggatgtcatttgactttactagccatacagtcgaaaaataaacttatacctacaaacctacgacccatcaactgctaaaaactcggtgaagccgattcgaattcccagacgatagactctagaaaatggcaagaactccagtcttaatcaaggcgatggatcgttcttctagtggtcaccgcaagtcctacacatctatgagtatagatgggccatcttaacctgctttggatgcgagattaatgttagtttagaatatattgcacgtatattttatttgatttgcttataaatatcagagctgggcttgccggggtagctcagcctggtcagagcgttcgactcataatcgaaaggtcgcgggctcaaatcccgcctccggcacttttttttgctttaattcattaatcctgcaatatttattaaacaccatacaatatttttcaaaaatgcagtactttagcaatatttaaattaaccatagccggaataccacttgatttgcaaaaatcaaaaaaacctaggaagaatttgcgaaatagactaatactgtctctagtttataggcgataaatatcacccttttattattaatctatttgatttttttgccaagattcaaaaactttgtcctattataatatgccaccaaactatcaaaacttcttgctggttaagcgttggttgaagccttcccattcaataggacgcttactatcttcccacagttcgtagttaatgactttttctaactcaagtctacttaaccaattttgtgattgcaaatcaggcagggcctcaaatttatttacatagcctagacacaaataagcaacgggtttaatggtggaagggatcttgagaattcttcttaaggctttattatcgacaatacttacccagcctactcctatattttcggcacgtgcagcaagccacaaattttggatggcgcagcaaacactatagattccagcctctttcatggtcattctcccaattacaaaaggcccgaatcgtttgcgatcatatgtaacgcatatgtttagattggattctaatattccctctaattttagacttagatatttctttttcttttcgctgtctttttcaagcaattcaattgattttaatctctctttagagaatgactctttgatatttagcctactggctttgtctcttatcaaaataaaattccatggctgtgaatatcctacagatggtgcatgatgggcagctgttaaaatccgcaacaatactttattacttattttcttactcgtaaaatttcgccttacgtccctacgagaatgaatgattttataaaagatctctttttcagtttcattaaaatgccccattctattatctgtcaattatctattaactgaaattaccataattcaatatagatttatacttttactaaaatagtaatttagaatattattaatactttttatcgattcttctatcacagtagatcaataacaatttagtcaccctggaattcttgatttcagatctgccaggaaggcaaataacctagtctaacttctaagtggatattttgattatttactgtagagctttggcgacaattcttaaatccattctcgtttcataattctgtttcatagcgttacctatctgctgtctattaggtatcattatagcatagtatcgagggccatacgtagaagaatggataatacttgagataaattatacatagcaaactatataatcagacttggtttcataaatgagtagcttgtctgatggtatttttgtgactggaactgatactgggattggaaaaacattaataacagcttctttggcatggaaattctctaagagtattagaaaaatttgtgtaatgaagccatttgcaacaggagtttcagtgtattctaacgactataattcagaagatttagcaatcctggttggggccattaaattaaaagaaaaacaggtgaatttgaacccatatttttactctttaccttgttcaccatatatggctagcagtttgctcaacttaaaaccaccatcgttagaatttgcgattaagaaattcaaatttttgcagaaaaaatatgactacataatagtcgagggaataggcggaataatggtaccaataaaccgtaaacacacgttactggattttataaagttaactaaacttggagttatcatcttagcaactccgaaattaggcacattcaatcacacgttgcttagtgtaaaaatttgtcaaacaagtggtattcctataaaaggaatagtagtaaataatatgcccaatcctgcaagccaaattgaggcagaaattccgaattttcttaaaaagtttacaaagttacctatactaggtataatcccgaccatccataacctcaaatttaatacttccacattttctaaaattgccaatctaattgacattaatccttctagctaacttagctcttaggtatattctttggtgacagggtaatatgcaagatattatagaatttatgaattaatttgccaaatgctagtttgtattataacaaaaatagttacccagtaaacggtgaaaagtctttatcctgtctcacgcataagtactgaaccattgctggaaattcaatcgtttatatctaaaaaagagttttagattagttatatcttacccagtttcttaacatacaacttgtacgcttctaagtatgactttttatccccaatatccataaaactcccattttccactataaatgattttactttccttttagatcttattgattctctcactgcttcgtccattccaaaggagatggagtctggaattaagtctaaaaactgcggctcaaaaacatagcatcctatatttatcagtccagaaatttctggtttttccttccactcagaaacaagcattttttctttatcactgtgctcaataaatccatatttgagattggttttgtaacttgaaagggccatagaaatgaaggctttatcttcgaaatgattttcaatcatccgatctaatgggaattcatagactgaatctccgtatagacaaacaaaaggctcttttagatacttggcggcagtctttaattgtcccgctgtagccaacggtctatctgaccgagaatattttatatctatgccaaatcgagtaccgtcttcaaaatagtcttctattgatctgtgtagataactcacacaaataattatctcatttatttttttagattttacgagccattcaacaagatattcgagcaggggcttattgcccaaaggcaacattggttttggtataaagaatgtatagggttgcagtcttgttcctagaccaccagctaatattacggctttcacaaaaaataagaataatcaatcattatttaaaatattagttatcaacatattcccgcagaatgatttttactttttgtaaaacatccctagggttatatccaaacacaataaccatgggctcctttcctaaatcgccatcgtgataaactatctccacattatgtccatgtcgaaaagcttcgctgaccccccattttatcgatgctccttccaatttcttaacctgccctggttctttagtcctaaagtatctggagcatttaaagttcttctcacagattttaatgatattttgattgttgcgaatattgatagcagatctaaacaaccaattgaatttgtttgccgctaaaagagcgtttgatacatgaaccgaagctccgaattggattagatttggagtcctgatgttaatccctatactagttactctacccagtactcctgcaatgtcatttaaatcctgcggtttttctattgaatatacaaagtttgttttagtctcgggtataagctgaaaaaaattgtccatgttttccaaaatcgttacacaatcttgtaactctcttaacaccttgaacttttcagaattcttatacatttgatataacggattagataccagtaccccgccaccaatttttatcgaattctttaaagcctcatgtacgtacgaattggctagctggaatgattcaccgatatcgtatccttgggctagaaacgaggcgatggccgcagaaaagttacatccagtaccatgggtttcaccgattttcaaccgctcatgtacaatttgatgcggtttcatgcacttttccttaaataacaagtctaccaccttttcgtcctttctcccgtggtgaccccccttaataatgatatttgaagctcctaacttgaatatctctgatgctgctttaatcatattatgcttgtttgttatgttaatctttgagacaagttcagcttctttgagattgggagtaattacataggccaaagggataatctcttttctaaatagttcatacgaatcatcgtctagtaatttaataccggtgccagaatatagtacgggatcaacaacgatgggagtcttatagttttttaaaacaagcttgacaatatttattatcgatttgctgtaaagaacgccgatttttatgacatgtggtttgatatcttccaaagtagtaactaattgattcttaaaaaattttgatggaaccaccagaatatcagaaatagtatcggtactctgagcagttaatgtagttattaccgtagtgccgtaaacacctaaagccgagaatgtctttaagtctgcctgtatcccggcgccagccgatgaatcacttcctgcaatcgtcattacctttttcaatcgcttattacccctctattgaattggttcaagttataaattagtgtctcttctctgccctgaaagtatttcacagatttagggcgaatgtaagaaaggctaaaatgcagatttcatctgatgatgtctcattccatattgtgataatattatctagggataaaatataacaaatcgtgggaacatgtaaattcaatctacatccactttctgaataaattgcttctaatattaactgaatcgaatatggtacccatattctaataaaaagcaagcaatcgatcataactgttaaatatgcatttcatgtcaatttttctgattattattgagtaagcctatggaccttggtagcttgaaggttggttcttatattattattgacggagaaccatgtagaattgtttcttatgatcatagtaagccaggtaaacatggttccgctaaagctcgagtcgcagcaatgggtgttttcgacggctcaaggcatagtctagtttctccagtttcggcgaacgttgaagttccgcttatagataagaggagcggacaaatcatttcaatcgctggccaagtattgcaaattatggatcttgaaacatttgaggtctttgaaacatcagctgttgaagatgaaattagagataaaatcaaccaggggggcgaagttgagtattggaaggtactggaaaggataaaaattgtgcgagtaaaagggtaaaataaaaactctagatcggaaccatgggacctcttttttccctcccataatatgaataaaggatatagttagaatatctatatcgttagacaggtccgaattagattgtttaattaatgtagaaaaacctgaattcgaagcctgtacttggctagaccaccatcattcaacgattcttctggctctactaatgcgaaaaaccttcaaaaagtttgttatgatgcatttaaataataataatgttcacattacttaattggaacagcaatcaaaaataaagtttgatcttcatttacccctaatattaattcatacaccgtacggtttaaaattctttgataaagtttcacaaactaaagctgcaagattttatgcaaaattcaatacttatttaatgccacttatcactatcatggctttattcctaattataggctcagtggctgccttattttctagtgaaactataagagagggtgctcgtggagtaggtccccaagccaatttgttgatcccagggctcaatccttatttgccaatatgggaaggttggattgctttagtagttactatcatagttcatgaagccggccatggagtaattgctagggtatacggtgttaaggttgaatcaaccggactagtattgtttttaggaattccgattggggcttttgttaatattgaaagagacgaacttaataggatttcaactaaacagaaaagttctatcctaactgcagggccaatgacaaatatagttttagcggctatttctttgttcgttatactcttaataacttccacattggtcataacaaagccgattgatccagcatcgttcggggtggtagtaactaatgttaatcaaggttcacttgcagaatcaattggattggataaagggactataatacaacaaattcagaacaaccagattcgaaatccaacggaacttaatgaaaatttaaacgcgaatttggggaaaataattacgatcggaataacagatgagaatggtcagaaatcaattaagcaggcaacactaccaccgcaaagagagcctggtaagggaattttaggggtgtcaatcactccagtagcagacccaaaagaggtattggacaggtacaactctatgatttttacatctccgttagctttactcgctccaccaacatttgtacaaggaatggtcccttattctgattttatggccgacaaatatacatcgccgttatttggttcatattacacgataccagcaagtctgtttttctggctctggttcataaatttcaatgtagctatttttaacgctttaccaattggcccgctagacggaggccagttatacaactcattgatagataagaaaactcagaacaaaaagggaatcatcagacatgcttcaaaaatactgacatacggaatggtaataattgttgtcctctcaattgcactaccatacctattgaaataaatggataccatggtttgattaactgacgatgctaatgccaaatggaggctgataaacacttcaagtattgtcgggtcaagctaattcggccggataagttctaattttattgaagtaataatttggtttttcccttcataaatattacatagagttaaacaaacatctataatacaatgcaaaaaaataggatcattgaaaacttcccttttaaattttaaatttttttactgtataaaccatatcgaaaaaaagtatcccttgtatttagaaagttatataatcgatcctctggatcagaatgagtgcattgaaggttttttaaattgtcctgaatgtaaaaagaaatttcccataatagacggcattgtaatagtaattaacgatattgcgaagtatgtctcaaaacgaatgtcaatattcggtaaatggttttcagattgtagaagtgaagagatgaagacttttttgaaaaacttatcgttggatttggagaagaatcatccaaaagaggaccgatatgaggacgatggtctatattttcaaagttacaaatggcttcacaatgaaaattttgaaagtgataaatttctgcaccttatgagatggaaaataaaaccatctgacgtatataggaaagtgacatcaaatattcctttcaatcctgagggtatagcattagatctgggatgcgcgttaggtttatctacagttgagttagcaaaaaaattttcatttgtttttggggtagattcctcattttcctttattcgagaggccaagaaaaagataaaggaactggaggtaacaaatatggaattcatagtatctgacatcttggatttaccttttagaaaccaaacttatgatctgatatttggattgaatattgtcgagttcttaccagttgatgatcttttgtccacgatacataatctactaaagccgcactccctgtttattacaactactccatacgattacaatcgagaaatagtttataatagaaatatgaatgatcagatactccgttcaacaatggagaaaaaaggttttgaagttactcttaggacaaaaaaagaggcatttatcccttggatcttaaaagttaatgagcgaacatacttgttctacttcctcgacttaattgaagcaaaaaaaatatcaaaacacaagtattaaacttatgtgacattcttccgtactacttgaccaatagtatttccacagtaaaaaattatgaaccttcttccaaaatctaattatatcaatttactaaagagatagcggatataatgaaagtactatttatgcagtcctcttcaaagtcttattcatttttagattacaacgagagcgaggtcgatagttctataccctcaaactgttctttatatctttttggaagggctctaatcacaaggaacatagaattaattaattcgttgtataatttagagactgtattaattccaagaaaacttaatttcatttcaagcatcataaaatcgacaacagatataccagtagaggaaattaatgaaaatacttaccacaaattagtaaaaagtgaattaaaggcctctaaattcgacgttaatgagaaaaaccatagtgaatcctccagcagtcatattcaacaaaatacactagttacaaacaagaatttgttgttcctcccttgtaatactgtaataggaaaaaggtcgactagaaaaagtattgaatattacaaatttcagtatccatgggaatttttagatattatacaggaactccttaagggtgaggtaacatattcaattatttccaatagggcaacaattgcaaaaactgcaattattgaaggtccttgtattattgaagacaatgttgtaatagatgatttcgcaaaaattaaaggtccatcttatataggtaatggtagctttattggcatgggttcgttagtccgcaacagtatgctggattataacacaagcattggttttaactgcgaaataggaaagacatatttcgcaggaaatgctaagatttcccaccataacgtgattttggacagtataataggaaagaacgtttggtttggtgggtactctgggactgcaaatgttttattgactagaaagaatgtgcaatacaggattgataatgaactaatcgatacaggaaggaaccattttggcacagtcgtttccaataacagttctattggcgcttcagttataatcctgcctggtcgtaagattcccccagattcaattatcccggcaggcacaattttttcaaaatagttgaatttattagattagctaaaatatatttattcatgcagatgtcttgtttgttacctctttaaacgactcaaaagccattacttcgtctttaagagattccgataagaagttagttgaaatttcattaagagattcgttacctgtcagtaaatattccctaaagacctgatagcttttgatctcattgtaaaatgagttgaccagactcttcttggcagactcaaaggaatcgggagcttgtgtttgattgaatttattcatctgtgtagtaaagtttactaagtagttgtttgtcaattcagccatcgtttcatttgatatctctcccaattgccagaggccgatttcgtcttgataagctctggtgagattcgctgaatcctgtgtgaggctagcaaaatagttagcgtactcttcctgcgacgtttgtactgagcccacattcacaaagaataacaaaataatagctactgatgataatgaaaacaaaatcatggtctttaatttattggatttgttcatgtaatcaaatgaaattacttagataaaaattctcgcctatctttttgttaatcttgactatgttaataagaaattaatgttttaggctgacctatgtttagactctagttgatctcctcttccacaatgtaaatcctttatgatcaatcaaatcgatattaaatctagtaaaaagttccaatcttattttgtccgaatctaaatagtttttctcagagcgtaataagtttcttttgtatatttgatcatctatctctttgatctcctctggagatacctggtcgattctcaacccagttacgaatataaatttttttaacataccaaaggttttgtttaggaatctaatatctaccggattatctacggcaaaaaaattatttagccttgagacaaattttagaaatacagtcatggcatttgcaaaatttaaatcattaccgagatattcttcaaataaacttagatatttagttaactcatctagcagtggttgttgaactgaattacaggtctcataaataaaagaatttctggttcgaaattcaagttcgcaatatgcattagaaatctgatcccaccggcttttcatttcattaattatgtcctgggtgtaatccaacggtttagtataatgagaggaaatgcaaaataatctaattacattcggccccacttcttttaatagttctgagatcttgactgtatttccaatagattttgacattttttcagaattgattgttaccatccccacatgcatccataatttcgagaactgggtttcaaataatccttctgattgtgcaatttcattttcgtggtgtggaaaaataagatcttggccccctccgtgtatatcgatattaaccccgagatactttgaagccataactgaacactcaatatgccaacccggtctcccttttccccatggagtatcccacgttggttttgaagagctgaatttccacaaagcaaaatctcgtggatcatctttcgatttatcgacctcaatcctcgcaccagaaaatatcgattctttgtcctttttagataacttgccatacccgttgtaagatttaactttaaagtaaattccatttaatcccacataagctttatttttttcaattaatttactaatgaagtcaacgatatctggaatatgctccgttaccttagggtacgatgtggcctttatgacgtttaatgcttcaaaatccctaaagtagctatcggtatatgcctgagagatttgttctggactagtgtgttcactgctagcctttgctattatcttatcatctatgtccgtaaaattctgtatgaataccacttttgcattttgtacctctaggaaccgtcttagtacatcgaaaactattatagttcttgcatgcccaatgtgacaatcatcatatacggtaacaccacataagtaaatttttattacatcatcggatatattaatttcttctaacttgtttgttaatgtattgcttaatttcatttctagaggaatattagcgtaaagactatacgtctagatagatttcattttttctaatctcaacagggaaagtggttaattttataccttccatataatccaataattcgcctgttctaatgttgtaatgccaaaagtgcagtgggcattcgacgatttctccgttaatcttgcccggtgccaaagacccatcttgatgtctacaaagtgcctcgatagcatagtatttgttttttgataaaaatagagcgatcctttgtccattaatgctaagttctttaccactgccttctcgaatgtcgtctttactggctactttaatccatgtcatctgacaataggtaatgcattgtcaaaaattataaatgtttttttactaattgattcatatacagttaaattaaattcaagaattaggggtatacaagttaggcataaatgaacaatctgtccgaaaacaacaaccatgactcaattagagcttattcagattctggaaatccgaattccaaatcagatgacatccatgatattcttaaggaaaatgaaaaatataaaagccctaggattgatataggaaaaagccttatagttacttcggccttaccttatgcgaatggtcctattcacttgggacatattgcatcaacttatctgccagccgatatttttaccaggtttgtcagatcaaccggtagcaaaatttatcatatttgtgctacagacgattatggaacacctatactgataaaagcagagaaggagggaaagacacctgcagagtatgtcagagagtggaacgagagagacaaaaaagattttgaatccatgtgcattaattttgattacttttctaaaactagttctcctcaaaatataaagtttgtacaggatgtatttatgaacctgtctaaaaacaatcacctcaaagaagagactgtggttcagtttttttgttcatttgataacaaataccttccagatagatacgtaataggtagatgcccattttgtaactcagaaggtcagtattccgacctttgtgaatcatgcggaagagtgcctgaacaaatattggatcccaaatgcgccctttgcggaagaccccctataaggaaggaaagtctccattatttttttaaactatctgatttcgaggaatctctaaaaatatggctctccaataataggactttacaagaggatgtagtaaaatatgttttaaactggataactgcaggattgcaggattgggatataacaagggatttaacttggggcgtacccataccaaaaattcagggatttcaaaattatgaaaacaaagtattttacgggtggtttgacaatcacctttgctatatttcaacgtttaatacctttgcagagaccgttcttaagaaagagggtaaaaaactttggaataattctgaaatcattcattttatagggaaagatataatctatcatcattacttgtttctgcctgctatcaggcttggaattaaaagtgaatacaaattgcctgatagaatagtgacaagaggtcatctgctatttcaaaatagaaagttatcaaagagtaaaaattggtcgataactttaggaggatttacaaagtcgtttgacccagattatcttaggttctatttttctacaattatcccttattcacaatctgacattaattttgattgggatagtttttatgaaaaaattaataatcagcttatttcaaacataggaaactttatcaaccgcacactatcctttaccaagaaacaatttaatggaaaggtaccggtaaggacttctttggatgaactagataaagaagctttagtaaagatagcacaaatcgcttacgctgtaggagagttaatttatggaaacgaattagataaggctatgaagatgattctacagtttagctcattttttaaccaatacttccagtctaaagaaccttggaagtcacgtcaagatgcaaataataccatttggatatctactaatgcagtaagatcaattgccataatgttgtttccattcatcccatcatccgctcaaaaaatctggaaacagttagcaattcctgaagatttagaagttcaagactggtattcagcgtctgaattaagaattcctcaagatcataacatcggcgaccacattattccaatttttaaaaggattgaaagagctgaaattgaagatcaaaaggccgaatttttggataccaaataaaaaaaataaaacctgagctaaaaattatattctttgtttccttgattaagatgactacgaacatggctgcggcaatgataggacgatttcaaccattccatttaggacatttgaatctagtccgccaagttttggctgaaaatgatggaataattattcttataggaagttcgcaaaccaattacaccctaaagaacccttttacagctggagaaagaatttggatgattagagataccctcatagaatcaaaaattgacatgtcaaaagtattcttggttaatgctactgacgatgaaaacaatgcgaaatggtttagcaatattatatcattaagtcctccatttaaggtcctttatactggaaacaattttatcagaaccctacttaaaaaagaacccgtaataatcagaaagccaaaattatttaaagaaactctattaaaaggatcaataatacggaaattgattcttgaggataacgctaaatggcaagaattggtttctgaatcagtaagaaacatctttagtgaaattcatgcagtagagcgcattaggaatatctaccaaacttggatggattctcctttttccgaacccaaaaattaagaagagagaattatcactatgttgtatctattccaatttactatttctaaatcgtaataaaaacacatcacgaatatgattcactgtgtaaatttctccctaactagtatatttatctgaaaagatttaagataaatcgatacttctaaatgaaagataagcacgttagcaaatgacaattttttttttgctgttatgttttcgaaatgaaaaaaaatctaatccttagaattaataaggtgacatggataaaagatgttcttgaagtaaaatttttgaaatattctcgctttctactccattgtgtataaaatcgaatttgacgttagttctctgatcctgtaagttagggtcagaatttttccttctttgatcatgtatcagaaaattgtccaagcgaatacaataaatcaatagatttctcaggacttctcaaaaatacattttttttgctcttgaacactattctagtctgcctttaagggtaatccccatcaaattattcttgtaatctttggagcagtgtttgattaaaagagtagttggaagaatcaacacggttttagcatgacaagattgaaccaattattcttatcagagaaaaccttctcaagcgaaaacccagatctaatcgccaattcttggattttttctttactatatttgtatgagctttcggtgtggatagtttcgccatgagatatcttaaatattttactagatcccgatactctaaattcttgatccgatttcgatttcaaatgcatctcgattctatcttttttcttgttaaagaaggcataatgtatatacccgccgagatcaaagttacaacctagctccctattcattcgggttagcaaattcaaattaaattgcgcagtaaatcctgctttatcgttataagcaggttcaataataaattcatcctttatcatatcaaaaccaactaagagaaagtccttatcattcatattgattcgaaccgcttttaaaaagtctcttgcctcatcaacttcaaaatttcctatactagaaccaaagaaaactatcagtctagaaaaagaatcaaatttaaaattattttcaaataagatattattacaatctttgataccatttatataatcgttggggatcccttttacccgtatattgtgattctttgtttccaaatcatttactacagaatccaaaaaattgaatgaaatatcaattggaaagtaatataatttgtcttgtttttttaatattgaatcaaatagatgtttggtcttctttgaactaccacttcccatctctattaaaatgatctcttttgatatatgttgcaaaatagaggtggaatattcttctagtatactattttcagttctagttggataatattcaggctgaaccgttatttgttcaaacaggtaagaacctttactatcgtataaatacttagaaggtattgatttttgaatgggattagatagtcctcttaagatatcggttctaaattcttcgttgttattatcaaaatgcaaattttaatttatttttagaagtaagatataaatatttttgttatcattgtctatgagatacgtaattatagaattgggtatacgcttccaaccatatccaggttaacttttcttgaccttaaacctaaagctattcaatttgatcagttcattatatgaaccaaatattttaggattgattttgtctagggaattttctgactcgatttccttattggttttgaaatctttaataatctcatattttgacgttctctgtgcgggtatcttacctgccgatttgatgatcttacgcatatctacaggtcttataaattgtccataccgtgaccctgccgatgttgatatactttcgttaattaagcagccacccaggtcattggctcctacactaagcaatatttgtgataattttgggccttctttgacccatgaaacctgaaggttattaatataattattgaaaaaaattcgtgaaatcgcatgtattttcaaaatttctaaaccatcagcgccggcccttaaatctttgactaaatgatggttagacattggagcgtcgtagtgtacataacttaagggaacaaattcggtgaatttaccggtttgtttttggatatctcttattatctctaaatgagtaacgatatcgttattactttcaatatgtccatacattatcgtggaagtcgttggaatgtcaagcttatgagccgtagaaattatgtcaacccactgttctatgttgattcgaccaggagaaatcttgtttcgtacttcttttacaagaatctcagcggaggtgccaggtaagcttcccagtccagcctcctttagcatctttaaataatcatgaactttagtgttagacaatgtggatccatacaaaatttcctctggggagaaggcatgaatatgaatctcaggtaattccttctttatcgctttgcatatgttgatataaaaaaatccatccattttaggtggcagtcctgcctgaatacatatttcagtcgctccaagctgccatgcttctttagctctccttactatctcttcgattggtaaaagatagccctcttcgactctaaaatctctactgaatgcacaaaaaccacattgctttatacagacatttgtaaagttaatatttctgtttatgacataagtcacaatttcaccatttgcgcgccttcttaactcatcagcaactataattaccagcgacaaacttgatccagtagtctcaaaaagctttaaagtatcggccgatgagatttctttcccatctaaagccctgccaaggattgcagaaatttcgggatcgatattcctaaaaatctcctcaatgttcatttttaacaaactcctctctgaccaagccgtatttatctctcaacggttctatatagtctttaagggatttatgcacgaatttctttgataaggccggatcaattatatattttggatataccggcaatcgtgccctcaaagcaaaccccttatctctagttaccttactaactttatcaatcgtcggccagggtgactctggattaacatgatctggtgtaatcggcgagatgccaccccaatcattaattcccgaatccaggtaatttgaaaatatctcagggcttagattcggtgggacctgaagactaatatcttttaatattattcgagctgccgtaatacatcttaaaaagtaagagtatgaaggagattttgcgaattccatcactgtccctttttttggtaaaaaattttgtataattacctcttgaatgtgaccaaattgcttattaatgttgtttattagtaacaacgaatctactatttcatcaaaggtttcatctatgccaattaacagtcctgtagtaattggaaaattgagctcccccgctgaaattagggattttattctaaccttgggatttttgcttggagctttttcatgagccttccccttatcaaccaacctttcactcgagctctccagcatcatacccaaacttacatttgtagattgtaacatggacatttccttctttgtcaggcttccagcattagtgtgaggtaacatgcctgtctgtgaaagtattttgtcactcaaatctgctaataactcggttagattccgatgtccaagtagcctaagccacagttttgcctctttatatttgacttctggcctctcaccggtcacaatcaatgcttccgtacatctcgctttcgctccgagtttagcaattgttattgcttgagacggactaagcattacagcttggctatttgtgggttcttttttgtaagtacaatacgagcatgaatctttgcacaaattaattaaattgataaaaacctttctagagtaggtgacaaacttgctacctgtcctattacggagaaacgaggccaaaaggctcaaatccttgatctcggcagtactcaacagacccttgagttcttgagtgtcaatcatttttttttcgattatcttgtaaatgatttcgttggaatagaatttttttggtaaatattgataattttggattccatttaaagccatttatttttaatgaattacataatgaatctatacattaaagccttactatgattaagttcaagatgatatttctaccaaatagtagtctacagcgtccataataatgtaacaataatataaaatattttaagctcgggatatatattattatagaatatgaccacttcattgataaaggagactctagagaaggaaaattcaaaagacctgtctcaaaagagaatcaggattttggttacaaaattgggtttagatggtcacgataggggcgctttggtgatttgtagagccctccgtgattccggaatggaggtaatctattctggattattctgtacacctgaacaagttgtaaaaactgcaattgaagaggatgtagacgtaattgcaatgagtctcctcaacggggctcacctaacactatttcccaaagtgtcgcggctgctaagagaacaaaatatagatgacattttattagtaggcggaggagttatacccgaatcagacaagcgcgaactggaaaaagcaggcattacagggaattttggaccaggaacttcccttgatcaaattattggacatattaaaaaaaatgtaaaaagggattgaatctttagtaggactgtttatgggtttcgatttttactctatcttatcttgcggccacatcattctccttaaatccttgcctactctttcaatttcatggttctctagctcacttatcatcccactaaaggtcgattttttatcctttttgtagttgttaacccattcttttgcaaactgtccggattggatctcttctaaaacgtctttcattttggcttttgagtctccgtcaatgacacgtttacctcttgtaagtccgccgtatctcgccgtttcacttactctattgtacatgccggtaattccatacttttgaattaaatctacaattaatttcaattcgtgcaagcattcgaaataagctatttctgggtgataacctgcttctactagtgtttcaaatgacttgagaatcatctggtgtactccaccacataaatcaacttgctccccaaaccaatccgtttccacctcttctttaaatgtggtttctaaaacgcccggctttgtgctcccaatagatttagctaatgccaatgttttttcccaagctttttttgtataatcttgatgcacagcaacaagtgagggtgtcccaaatccatctaaatacaattcgcgtactctttgacccggtccttttggtgcaatcattatgacgtcaatattcttagggggatcaatccacttccaatgtattgcagctccatgtgaaaaactaattgtcttgttttctgtcaaatacggaaatatttggcttttaaaagtcgactcttgctccatatcaggaattaatatatgaataatatcagactctttaactgcatcactaacgctttttactttgtggttgtcagcttgcgcttttgtccatgtattcccgtttggtcgcaaaccaacacaaatatccaaacctgaatctttcatattagaagcctgtgcagcgccttgaataccataaccaatgactgctatctttagattttttaatggatccaaagagacttcattgtcaagccatctccttattgtcatgaattgaaatgaaaatgaaacatatatgttcttattgatctagatttatcaataaataatttaattatttaagaacctgtaaagcaaatcgtaagaataatcaatatcgatttgattcttgatatttctttttgtatcaataacaagattctttaagtatttttcgtctttttgttctactttttttgatactctgttgtaaatcttaccgtacttttttattatttcagttgccttgtcgcttccgagaaatagagtcaagaaaagtggtgggtcgtccgttaatatactctcactcagtaacgattgaatcttatatgaactaccagataactgttttaatagttttaataaatccttttcctttttcagtattttgttagttgatatttcaattaaaagtttagagaaaacaagattaatgaagtaaattagactaataagaatagcaatgagagtgtcgtgcttctctggtgtatcaactaagaatctttttaattttggaaatagtctagccaagatccttgattcaggactgataccagataaactaagtggcacatgcattattatgttctctgaggaactaacttgagcccctggaccaaacatgggatggatgcaaagaaatttcaaataattgtatttctgtgaaatatttgacatgtacttatgaataggattttttacagaagaaatttcaattgtagttgttcctggttctaatgactttgtatgtctatcaaggatcttgcgagtttccttaatcggagtacataaaatgactatctttgaatctttaataaatctagtgatacttttggaagtataaacattttcagtttctgatatatcaaagtattctatcctattaatatcaactaaaaagatcttttctattttgatggttttttttcttagatatagatctttagattgctctttgcgcaaattaataaaatagtcaaaaaaccatcttcccattcttccggccgctccaacaattaaaatgtttgacatattgttatttcagttaaaggcgaatattattgcagacatagtcatagttagagtttattaaccaagtcatgaataatttccaaaccttcgatcattttattttcctccaaacaggtagataacctgacgtaattagaataatttgatccgaatccactgcctggtgctactgctactccatgatttaataataattctactagtttcaagtcagataaatccaactcatccttaatccttgcaaaaacatacatccctccttcaggataggtaaattcgaatggtaattttttcaaatgtttacatagcaaatctaaccgattcttcattaccttgttgttttttttaggattagaattcagcgctagcaatgcgcaaaattgcattggttctgcaactgaagttaaagctaatgcctgtattctgataagtttgttgattaattggctatccctagaatatacaaagccgaccctaaatccagtcattgcaaatgtttttgagaacgaaccgaccagtattgatttgtcatagtcaaaatttataatgctgcggaacggttcgtaggcgtaattagaatagacttcatcgctgagtagataaatttcttttttgcgagccatatcgattatattgtcataggtttttttactcaggatttttcctgttggattgtttggataattcagacaaattatttttgtattaatattaatttgattttctatttcagaaatatcaggctcccaattctgttccaatttagtctttactatcctattttttgcacctagataatttgcacaatcatggcaagccggccaagccggttcaactgtaattatttcatcaccaggtcttaaaagtgcagaaaatgcgcaaaatatcccaaacctacctccaggagtaacaattatcttttcaggacttattggttcaaaaatatcaaaaccgttgttagctgaaaaattggaaatatgatttgacagacctgtccgcaaatctttaataccggcagtctgagtataatgaaacttgtgattttcataaatcttggttaattcattcttgacttctattggaggtagaaaatcaggttctcctacttccatgtgtattattttgtatccttgtaactctagattttttgctgcattaaagacatcaagatgcgatttaatttgaaatttggcaaactcattttgatccctcggatgagcgggctgagactgatggccctgagaaatggtaataggagtaaccttttcttgtccaacttttatcttatttttttccaaattctggattctgactgattcgttgattaacatgttaacaatcctgcctgaaaattctgggtctaaatctaaatattttgagttgctacacaaataactctttatgtccaattccaccttatcatcaataatgtcaagattcaaatgggtctttatcgttccgatttttcttgcaatctccatcctttgattgacaagctccataatctggttcgtaatttttttcatgtcttttctcaggatattaacttcttctatggacattttcgaatctctaatgtactactcttggtatcaaattagatttagagcaacaatctaataaaacgatggcagcgatgctatctactacaggaggggctctgggaactacacatggatcatgtctacctgttacaatcaattgagattcagtcatatccttcaaatttacagtcttctggggtcgtgaaatagaagcagcgggtttgaatgcaaccctaaatactataggcattccatcagtgatcccacccaatattcccccagatttgtttgtattcgtaataatgttaccagtggatttatcaatcacaaatgagtcattattttcagaacccttcgtggtggaacctctaaatcccgatccaaattcaagaccttttactgcaggaatactaaaaataccttttgatatctccgattctatcgattcaaaaatcggctctcctaatcctaccggtgcgcctcgtattatgcattcgattatacctcctaatgaatcaccatcttttcgagcagatattatcaaatctttcattctctccgctgtttcctgattagggcaacgtacatcatttaaatatctgtttccagaaagtgtgtcaaaaggtatgtcagctaattccacacttatatcgccaattgattttgtgtaacttattatatcaatatttaaaatattctttaatattttcaaggctattgcaccacccatcactatagtagctgttaatctgcctgaaaaacgtccgcttcccctatagtcattaaaaccaccatatttcagataagcagtataatccgcgtggcctggcctaggttttgacatgaattcatcatatgaacgcgaatcagaatctttgttccaaataatcatacaaatcggagcaccagtcgtgaatccattgaagacacctgaaagaatttcgactgtatccgtttcttttctttgagtggttatgattgattgtcccggcttccttaaatcaagtagtggctgaacatctgcctccgatagctgtagtcctgctggacagccatctataatagctcctatgcatttgccatgactttcaccaaaacttgacacagtaaagtgattcccaagtgtatttgaaggcatgaataaattttaagttgtaattctaatatattattatttttaatatttttcctgcatataattaatctatttttattgcttacaaagccatactcgataacttcaagtgaacaaaaactctatttgagctccaattcctttcaactcatttatgaaatttggaaaagatacatcaactgaatccgcactgtcaataatagtgttttctgtagataagcctgctatagtaaaagccatgaaaagtctgtgatcgtcaaaagaattgattacagcactttttaatttctctggtggaagcacagtgattgaatcattgtcttcttttacctgagctccaaattttgtcagttgagatgaaatgttagagaccctgtcagtttctttatatcttgcatgcgacaccccagtaattgttgtcttattcttggcctttagtgacaagattgctactaccggaagtaaatcaggggtgccaaccaagttaaaattcccaccaacaagtttcgttgatccatctattttagctactcccttatttttgtcgatctcgattctgcctcccatttgttggataatattgattatctccatatctccctgtggcattgtaaaatccaaattctttatcgacaacacaccttctgacattatagcagcggatattagcaatgctgcagttgaaaaatcccccggtactcgtatggtttggggtttgtagtcgttatcgactggtaggcggtattcctctgagattgtttcatctagtttggaatttctcgatacctttgtgccatctgcccaatgactagagaatagttcgtttggcaaattttccactttaacaccaaatttttttatcataaatattgttgaatctatatatggtttggaaacttggttgcctaaaacttgaattgtaattggccttttagaatagattccagaaagaaggattgacgatataaattggctagaaatgtctcctctaatctgcgtagttcctccttgaatacctccacccttcacaacaagcgggggaaagtagttgttgttggttgaaaaacaattaactcccagctgatttaacgattttataagatcacccatgggtctttttcgaaggcttttatcgcctgttaaaatactatagccgtcatttaccaaagaacacattgatgtagccattctaatggtagtgcctgaattgtcagcagacagcacatcttcaggtgtcttaaaacctcttcttcctccattactttccactataatattctctgcttccaccagattatcgcctccacgttttggctcgctaaaagtatttgttgagtaattcattggtccatagctattaggctccaaacgataatcagactttttattcaagggatttacgcttacccctagcatttgaacacattctatcgatgcaagggtgtctctagaaaagagtacgttctctatatgggatttacctaaagcaaggcttgatatcattatagctcggtgactataacttttgcttggaggacaaacaacctcgccgcatagttgggattttttcacttttatatccacgcaaatgacctgttatattattcacagaaaattaatatcaatattgctattgttagtagtcaagcccctaagatcctgctggtaataggaatttattaaaactttgaccatatcaaataacacaccaggttggatttctccacatctcctgaaaataaaaaatgatggtcaatcttgcctatccttgaactacgctataacaccacatcatatggataagatattgaaatggatatccttacaacatttattaagaccatccatcttttcattatacttatctctaatctcgatttaaatacgatatcaaatggtaaaagttcagatctaggatctgatattcaaacttaattattcaactatcgctttggtattattagcttttgctaggattattttaccatcaaattttttcattgaatttacaaaattttcaacattgtccttatacagtatcgcagcaatagctggcccatttcctgaatggctaatacctaagcaatggttttcgagggcactaatcatgggtgcgtaattattgtaaagtacagagtttattaggacaccgtttagattcattgctttccaataatccccttttagggctaacctgaaggcatgattaaacaagtctttatgaattcttagcttgggaacctcacctctagcaacacctgcaggcaggtaaattacaacagcaagatcgttatttacagtgtctctctttattattttcttatagtgattatcagtcaatattactcctccatagtagcatgcacaagcatcatcaaatgcccctgtcatgctcacctttgcccatagagatgaattaactgcggtatttagtacgtccctgtcatagatctgatcactcaataatttgtaacatgcaagagatatggcatttgataccgcactagagctttttaagccccagccggcaggtatttcagaaaccaggttgatagatatgaaatgattttttaaaacgctcgctggtagtatgcttttaactatcttatttaccaacttatcatttacaaaatttctggatattccataatggcctggttcaagggatatttttaccttgactttttgcgaaataccaaaagtacaacccttgccagttgcaatggcatttacgatagatacagcaccaaacatagtaacagaggcagaagaatttttcatcctacttgggttcaccaaatataccaagtatagcctttttcataatatcctttggtgcttccaatcctgtccatatttcaaatgatttaaagccttgatttagtaacatctcgtatccaaaaatgacctttgcattggccctttttgcacactctaatagattagtcataaccggtctgtaaataatgtcaaaaactattgattcattgtgtattgattcagagcttacaaggcttttttcgttttttagacctactgaggtagtattaataatcaatttacattgtgatgagattcgagataatttttcctgatcagaataatccatggcaatacaatttaatcccatagcttttcccaattcaatgactttagacagtttatgctgatccctattgacgacaaatactgattttatactcttttttctcgataagcctactaaagcggctctacttgaaccgcctgccccaagaattaaaatttccaaaccttcaaaatctgataatctttcttcaatgggagccattaccccattaatatctgtattatggcccacaagagtgccgttttcattcttaactgtattgaccgccccggccaatgaagcctcatcacttaatttgtccagatattttgagatttctaccttgtgcggaatagtgacattgaaccctgccactttaatatcacgtagtgattctactgattctttcaattcgtctaactttactttaaacgcaatgtatgaataatttaaattcaaatacttaaaagcagcattatgcattaaaggggacaatgaatgttccaccggatctcctatgatacaaaatgtttttgaagaagtatctacggcggctacttgttcattagatgtatccacactatgactactcatgactatccagaatagtttttaaagcatatttattctaaagtgcttaatcaaaagaatcgtgattctgtcattattttacaggtcaggacctgacgaattttttctcaagtcgatttctggcaatctatcttatccagtagttttccaatttaatttgttttaccaacttttcaaagctaaatcagcatcgatcatcaatatcttattagatatcataagcagatactgcgtattataaatattgtaggagagtctagtattattcagcaatcctattttaattttgtacctaacaggaagtgatttttataaacgatagcattcttcttgtcgaatatctcaataaagcaattctataataagtatcattctattaaacttctctaatatacttgactcttgttttctccacagaagtttgtcaaggtaattctcagagtaatgaaaccagtaagcataactaaattaaattcgggaatgttaattgtagtggtgatgacgataagttagaatttagtgaaatagcaaatagcatatggtcaaaaaatttccaatccgttgttttgtatgtcaaaccaatttacttttaaacaactcataaattgacttcatttggtctatcgacaattgacctggtgctagaggtgccccaaccgacgcataagtaaatggggcgtcacctatcaccgtgcacaataccctacttaatacacccatttcacccattgcgaaagcaaccaagttaatgtgactatcgattgtttggtatatccctaaaattttgattgaatcgtcgatagccgtagcagtagtggctatttttatatatgagctgtaaactcgcatttttttcacctgctctataagctcgtcaaatttaggagtatgtgaaaaattatgccaacttatcaaaattggtgtgttttcattttcaaccaaatccgcgataaagtcgttattataaatcaatttgtattcgatatctacaaagagtggttttctctgcataaatttagttattatttcagctctttttttaggatcatttgaaaattgaccgccttcattctcgggcctgatagtataaatacatttgtccttatatctggataatatatccagataacgatctagattttcaaaactattaagataatcaaatcgacactcaatgatatctactcctttagttagcgcttcatctatcttatttactgttagcagcaaatcttcattactatgaacatcatttgtaacgggtatcgatgcacatagttttctacttgaagacaagattagataaataaagaactaaaacgatatttttatgtctttctgcctaattagataccatatggatttattgaacatctatcttgttgcttgctcttaattttattattgctatcccaatcacatataaaagcaacattggaattgaaataaaccacattgttattccactgccatcgggggttattatagcaccgaaaatgattattatcaacaccgcatacttaaaattctttatccaaaattggatgttgacaagaccactagctgaaagaatagccataacaagcggtaattgaaatgaaatcccaaatgctatgaaaaactgtaaaacaaaattaatgaaatctgagatgtttaggaatgtaaggacaccaatagattgcccatattgatacaagaaggatagggtgatgggaatagctaaataaaaggagaaaaccatcccgcatatgaaaagacctgtagtgggaagtaggaatataagaaatgcctttttcctgcttgtgaaagacatggcagggctaatgaagccaaaaacttctctgacaaccaatgggattgaacaagaaattgaaattagaatcgcaacgtaaatttgcgcataaagagattgtcctggtgctgtttgaatcaactcgacacccggtgggatcaggcttttgcttaagaacaatgtcgcctggctagcaatgttattatagactgtcggcatgaaaaaatagaaagaatagttattgacagtaaccaagtgaataccaaaaacagtacaaaagatcattatcgctatggtaatgacgattaccctcaaaaaccgattccgtaattcctttacatgatcaatgaatagcatatcaccaggtgccatttaccttagactctagtaccaaaaaaaggaaaaaaaatataaactatgcttaatctgagattggttgaaaatgcatagtttactaaagggtttaggacttaattataccacatgagaagctattttcttccagttggctataagggcttcaggtctaatatgtaagtcctcatttacgatccttttttttgccaggtcaacatattcctgctttacgtctattcctagaaaatgtctattaagattgtaagccactttggtagtttggccacttccattgaatggatcgaggataatatctcctttataggagtaaattttaagcagacgatagggtatttcctcgggaaaaggacatggatgttcgatatatccgggtggtacgggtgctatatgccatacagaatttgctatctctttggtccattcctcatgtgtagccggtaggatttctcttctttggttcctgccactcttcacatcaccctttcttaatactaaaatgaattcatgcatgatatttgcccgatagtatttaggatatgggtttatgacaaaagaaccatacctattagttccaccagttaccttgtgccagattatttcctcatggagattccagtttccaccgggtgccactaatctggacaataacaaatggggcaacgggattaaggtcccatttacaacctcattggctatgactatacagcaatagccaccttctttggttacacgatatacttgatcattaaagatagtaaccatattttccaaatattcgtctaaactaatcttttggattcctctataatactgcgtattttttttagaggcatgtaaatcatagtctattgcattaccataagggggggaagtcacagtcaattggatactcccagagggaacattttttaataccttttcacagtttcctagcataattttatcgtataaagattcggacctgattaacacaaattcaggttttgaataaggtccataatcacattactctaaaaatttatactgattgataaaaagatttaacaaaaatttcagaactaatttgtcatttctccaaaatgtattcatttgaaacctccataccaaaatgtctgcctattaacggaatggaataaaccaatattttatcaccaggttttgcatgggtaaccggcaaaatttgactcttctcattcaaaaatctgatggtttcagcattctgaactataatagttcccatttcgtcatcattaactgcagctctaaatagtcgtaacggtctagattctatcttagctctcccaacgccgaccattcttgcctctcccttagtgttcactattaatacttggctaccagattcaagctcagacaaatacttggtggttccatctggagttatagtgtagcaatgtactgcgcccgcattgactctaaaaggtcgaggtgatgtaaatgatgatcctatcgattcattgtgaatcaagaataaaaaattcgatttgtttccaaccagcattccttccccctcagaaagcatagatacagtgtctatgcaaactctttctcccattcctatatccaggatctcttttatttctgcaatttttatttgaaaagatgaattactaattatatttctcgccctaattatttcgtcttcactatttgtcgacatcggtactccgtctacccccaattctaatacagtaaacagagtttcaacttcctctattgattttgcgacagcaaagatctcggttccggtattttgaagggaagctataatgttttcaagaggtattatcctccaatcatccaaatctataatcacgaatgacagatgaaatacatctattaatcgctttatttcatcaatatcttggttgctggtaacctttctgaaaactcctattttagttcctgtaggaggatgttttacactgagtttctcgagttgttgcttggattcagcaattatataatccgcgtccatggaattgaaaatagatttaattttagttgaattttcggccagaccatcaatatcctctgaaggatcgatataaatcaaatctattttgtcttttgttttgctaatgaggctattaaattcatcaagttcacttttaccagctaaagcagggatacttgataggtctgaattagaataaaataacggctttagtattattttcttggcttttttcttatccttactttcttctgtcttttgaggatttgattctaccatagtgcttgttctctattataatagcatgcagggcttttattatttcatttggattattatgttgaaaaatatttctaccaaaagttaccccgattgcccctgctctcatagcttcttgacacatttgcaatatttccatatcggtattagattttgggccacctgcaattacaataggcacaggacaagattttacgacttctctaaatgtatccacatctcccgtataaacagtcttcactatatctgctcctgcctcagcacctatacgagcagtatgggctacgatggcagggtcgtgtgggtttgaaatattgtcaccacgagggtacatcatcgcaattaatggcacgttccactcattgcattcatcagcaacttgaccaatcttgtacaacatgtttggctcttctttggagcctatattaatatgcaaagaaacagcatcggcccccagttttattgcttctttcaccgagcccatcaagaccttgttgtttggatctgggccaagggatgtagcagcggacatgtgagcaatcaaacctatggaagggggtgcagggagagattttatgatccccttatttagtaggaaacaagtcaaacccgaatcttgtgtttggcttatcaattctgtgatattctgaatccctcttaatggaccactgcttattccgtggtcaagcgggatacacaacatttttcccttcttcaatatacgattgagtcgtatttctttcccaaggaccatagtacaagaaaaattgtaaacctatttaaaagtgatatggttaattatctagaaattagtcttatttattaataatttcattttgaaatcttacaaataggtggaaatgctagtttatgctgattgtgtgctattctccgttgaaccttttgaatggcctctaaagggatctctggcaattctttaatgataaccttttcgttgtcatgacttacattagcatctgcttcgaagtattgcagaattctatccaattgtacgaatggcaaacccagctcgtcctcggtgaattggtccgcccataatcttgcactacttttcttttctgtaacggttttagggatatcaagatactttgctaatccaaacaattgggtcttgtacaagtcaccgagaggaagcaaatctgcagccccatctccgaattttgtaaaataaccaagcattagttcggtcttatttgacgatcccaataccagctttcccatctggcctgaataataatataaaatacacattctgattctagcaaccaggtttccagacaacagtacattattatcgtctttgattatttctaagaaactatcctttggtttattgatagatattttttcataatctatttttaagtttgaacatattgtgagagcatcttcgatatcatctgagggggttacagattcgtcgggtaatatcaatccctttacatttgctgatccaattgctcttgttgccaaatatgccagcacggtggaatctatacctccagagattcccaggatgactcctcttgattttctagcttcagtttctttttttatgaaatccatgattacctggctaactaattcaaagttcattgaatttgaagtcttattagaaatatcatattaattttgttatattattagcatcggctttattctagattaagagatcactaaaaaagagagctaactgtgaataaatagaattattttaatatgctgaatcaataatagaattaaagtcattggatacacgcaacataggattaagaaatatcgaggtagcggacactaagatatgctcaattgatggtgaaaatgggaaattaatttatagagggtacgatatacttgacttggctaatcattccacttatgaagaaacagcgtttctcttgctgtttggagatttacctataaaagaggagcttgaggaatttaactcaaagttaaatgaatcacggggaatcccggattcagttaccaagaatatgaaaaataaacctatttcagcacatccaatggatgttttacagtcttccatattagacttggccgattacgaccgcaatagactagatgaggggaaaaacgccaatattgagagggctatttcattaattgcaaagattcctactattgttgcagcatgggataggattaggaacaaacaagatgtagtaaaacctcttgacgataactcccatgcacataattttctgtatatgctaaggggagaacacccaaaccacgagatttctaaaatattcgatataagtctaatattacacgctgagcatagttttaatgcttcaacctttgctgctcgggagattgcatcaacacgtgcaagtatatatgcaagcatagggggtgcggtgggagccttatccggggaactccatggtggtgctaatatacaagttatgaaaatgctgcttgaaattcatgatgtaaataatgttgaaaaatgggtcaaagaaagattagcaaaaggtgctcgagtgatggggatggggcacgcggtttatagaacaactgatccaagatcagaagtcctcgcaactctttctagagcaatttctaaagaaaaggatacaaaatggtttgatattaccgaaaaaattgaacaagtcacaaaaaaagtcatgtatcagacaaagaaaatgttgatttatcctaacgttgatttgtatagtgcctcattatactatagcctaggaattccaatcgatctaaatacacccatatttgctatatctagaatagctggatggaatgctcatattattgaagagaaatttgctgaggccgccccgaagccagcactttatagaccaaaggcagtatatgtaggtagatactgcggcccgatgggatgtgaatatgttagtctcataaacagaaaaactcagaatgctccagtataagtagagatatttaatcagattagaaagtatcggcctcttaaatttataaggaccgtcaaatttccttaattcattcgttgaagtcgtcgtcaagcaagaaccatgtcaaatatagtgatgttgggatagacgtagataagataaggtcgattcaaaactcaattggtaaaattatactgcctactcgctttttaccaaaaaaaggtaaagtagtttctggatttggtcattatgccggactaatagaatttgaaaaaaaaataatgacattgcacaccgatggtgttggatcaaagattttggtagctcaagccatgaacaagtacaatactattggtatcgattgtatcgccatgaacgttaatgacactgtttgcttaggagctactcctgtagcatacttatcttacatagccttagaaaaaagtaatgacagtttactaaaggagattaccaaaggtctagtgaagggagctagtatgtcaaacgtagcgatagttggcggagaaaccgctattcttcctgatattataactggacaaaaggaaggtcataattttgaccttgcgggaatgattctagggattttagaaaataagaagaaaatgatacttgggaacaaaattagacagggggatataataataggcataaagagttctggaattcattcaaatggactaactcttgcaagagaagttttgctaaaaaagcacgatactaacgataaaaccgaatttatcaataagtcagtaggagctgaactattaacacctacctctatttattcaaatgttattctgaaattagttgaaaaatttgcatcaaggatacacgggcttgcacatattactggaggtgcatttacaaaactaaaaagactaaatgaaactgttgattacattttggataatatgccctctattaatggcatatttagacaaatcatgacagatggaaatatttcagaaaaagaaatgtataggacttttaacatgggagtaggcttttgtataatagcagccagggaatctgcagacgaaattattgaaaccataaagcacgagaaaatggaatgcaaaattgttggtaaagttcgaggtaacggaacaggaaattcatttattaaatcatcagataataatggaatcaaaaaatttcaaatttagataccaaatcgagtatactattttcttagcatggtcatatttgtaagaaaagatggtcttgacatacaccactacattgaatagtatattgtgaattattatatatataataattgatatagattctttgctctatggattttgttattaagagacttgatagaaataaattattttttgagggcgtaaagcacgtattacatcagttggtaataaaaagaatgaaatttacttgtaattttaatatgtttcactttatatttatctgagatttgtccatgtttctagctgttgatgttgatttcataacttatccactttgacgaccacccgctctttgttgattgcttgcaagatagacagtaatttttcaaaaaagtagtaagagatatttagaagaaataatagatagattttcagagaggacattaacaggattgtatgccaatgcatctcgattcaatgctaaaaatgatagccgatatcagcagatatgcaaggaaatagctaatgatatcttatctagaaatgaaggtagggatttgatgaagattagtgagataaataaactaataaaatcaaaatcttctcaatacaagttacccagtatccctaaatattctgaaataaaccgatttattccaatatctagtcaatataaaagaattttaaggaaaaagcctgtgaaaactcagtcaggaattgctgttattacagttatgcctatgccttatgattgtcctcatgggaaatgtatttactgcccgggcggaaaggagtatgatactccacttagctatattgggactgagccctctaccaaattcgctcaaagagtgaaatatgattcttatgaacaggttcgtcacaagataatgcgtttgatggaagggggtcatgaagttagtaaagctgaattagttatagttggtggtacgtttcctttttatcctcaagattatcaaatttattttattaaaagatgttatgacgctctaaattcgattaaattcgaagatacttcagtccaatcagcttttaaatattctaataaccaagacgaaatcacaaagcttcctacaagcaattttgaagtccagagaaaatataagatcaattctcttttactatcacttagtaaatcaaaggtccaaaatgaatcggcttttgtaagatgtgttggtctcactatagagacaaaacctgactattgcaaaatggagcatatcaatttaatgctggaactaggaacaacaagaattgaggtgggagtgcaaacactagatgataccgttcttaaaatggttaatcgcggtcataccattcaagatgtctatagagctttttatgaggctcgcaattgcggttataagattggggcccatatgatgcccggattaccaggttcttcttatgatcaagatttgaataattcaaagaaattgtttgacgacgagaggttaaaacccgatatgttaaaaatctatcccacccttgtggtacgaaatactggactatataagctatataatgaagaaaaatacaagagttattctacaaatgaattggtaaaactattagtagaaattaagaaaaacatccccccatgggtaagaatcatgaggatacagagagagatagaagctcctgatattatatcaggtcctaaaatgggaaatattagacaactagtattagatgaattaaaaagacaaggaataaagtgtaaatgtatccgttgcagggagattggactttatgaagataaggtagaattttcaaaggacgatgttttgttgtttagaacagagtataatgcatctagaggtaaagaaattttcttatcttttgaattaaaagataggatgctcctgttaggctttttgaggctgcgaatcatgtccgatccactaagagaagaactacaacaacaacaacaacaacaacaacaacaagttaggcctgactctaaggcaggattccgtaacaacgaagcgtctggttatttagttaaaccctatagttctgctattgtgcgagagctgcatgtttacggttctgttgtaaaggtaggcgaacaacagcacaaaatgaaacaaaatttttaccctacatctacattcgacgatacgccatttaaaaatgcaaagagcatctatgaaaataatcaaagcagaagtgatcatactacttcaacaactaatactattattgatgatcataatggacattcgattcttaatgataatcaagtcaaatatcaacataagggcctaggtcgaagtttgcttgccgaagccgaaagaatctgcaaagaagagtatggtttgagaaaaatatcagtgattagtgcagtagggactcgagattattataggaaatttggatatactaataatggtccgtatgttacaaaattattatagagcatatatgagtagtgctgctgaagaaaatataattggcaaaggtacctggattgataaaattgcttttactgtagtcgaacgagaaaaaaaactcggtaggtcaacaacaaatattaaagtcgaaagtggattaggggcatctggaattcctcatattggaagcatgggagacgctgtgagggcatatggaatttccttagcattacagaatctaggttactcatcagaactgatagccttttcagatgactatgacggattaaggaaggtaccggctgggctacctaaatggctggaaaatcatatatgtaaaccagtatctgctatacccgatccatttggtgattgtcatgaatcatatggtcaacacatgagtagtttactattagaaggtttagattccgcaggaataaagtacacatttaaaagtgggaccgaaacatacaagagtgggatactaacagagcccactcataccattctttcaaatagtaaattaattggtgacaagatttcggaatctacaggtcagcaaaaatatctcaaatttcttccttactttcccatttgtgagaattgtaatagactctatgtggctaacacgattgattatttagaaaatgagagggtagtgacttattcatgtaccggtaacacgattggaaaaaaattgattcaagggtgcgggcacacaggtcaagtcaagatatctagcggaactggaaaattagcctggaaggttgaatttgccgcacgttggcaagcctttgatattaagtttgaagccttcggcaaggacatcatggactcggtaaaaataaatgattgggtttctgaagaaatattgaaattcaatcatcccttacatgcaaagtatgaaatgtttttagataagggcggtaagaaaataagcaaatctgctggaaatgttttaactccacaaatgtggctaaaatacggatcacctaaatcactactactattactatataaaagaatttcaggaactagacatgtaggtattgatgatatacctgcgcttatggatgagtacgatttatttgaagatattttctttgcaaaaataaaagagccaaatgatagtaaacggttgaaaatgaacggggtctatgaatatatcaataaccttcatccaccagctgatgattccgattctgtgcacataccatataggatcctgattcaacaggcaaatttatttaaaaaccaaattgaggaatccaatctactcgtaaatactatttttgataggctaaagaaatatcagctcgtaaaagaagaagacatcaataaaaaggatctaactgataggataactcttgctatgaactgggtaagagatttcaacagcttatcagcagaagctgaaggcgaaggccagagcgtagagaatgatactcaaagaggaaatgaaaaagttggaatgaacagtgctcagcaagaagtaatattcaaaatagtgaaggatttgacaaatttggcagcaagcaataataacaagaccaaagacacgatagtccaaaatgacgacgatttggcccaagatgtacaaactataattttcaataatgctaaaagcagtaatctccagcctaaagagatattcaggttattatataagattctaataaacgcagaaaaaggtccaaggcttgggaactatattgtagaccttggcatagaaaatgtagtaaaagcaatagagaaaagaacttgctctggacgttagaaaacaattaaccatcaatcaaaattcaatatgaacgataggaagaagaagaggaataatcatgtcaactatttcatcaattaaatttcttagggatatcctttatgagtatcaaaattttatcatagtgattggattaattatctcattttctggtggcagttgggatataacatttcatattttgagccagccagaaagttttttctcatatccacataccctagtatatacgggaattttaatagtaatcagtattttttttattaattttagaataaatattttaaataaaaatccaactagaaaagataattgcgttattctattaggtgctggtttaatccttgcggcaggtccgtttgatttctcatggcatctcaaatttggcctggatggtcttcttagtccacctcacattacgttgttgactggatggttgatagtaggattgggtaacctaagaataacaaacaagttaattgatttaaccatagggagggagagagcaaaaagaggtaaatcagtggggattatagagcccacctatcatcatcgtcgcggcgcgggcaacgctagaaacgattatgagaaacttgatattatggcaaatcaggcaaccaacttgggtaacaaaggattaacccttattagatttcagctttttcttaatctctcttttattctgatgattttatctggatttatatattttttttcgctaccattttcagaaacccaatattacaactacaacccagatccattaattgctttttttgtctatagtcttggtttcccaattttgctttcttgcttttttataagagttctaaaaaattatcgaggatttgaagaaatggtccttttagtaggaagtttctatatagtaatcatgcttttgacccagatcctttcaaatccatttctggtttattattcttggtattatatactaaatataataccatttgcagtaatttatctaattaataaaatgcaaataaaaaataaaagatttaccaaaaggaatgctctaattgagtcacatagttcaggagcagaagcagcggcagcaggagcaggaggaggagatgtaaaagaacataccaataaaaaattgtatattttctatgctttaattcttagcatttcatctgttacgatttgcttcccactcaatacctatatacttaatgaacaactttatggttatttagtttaccagaacttggtattcaaagtgtttgttcaaatatttgtcgactactttatgataataatactactatccgttattggtggacttttaggactttggctagagtgggttatatcttcaatgtataaaggtgcttattatcgttttcatcagtattttacaaatcataaatgacaggacgacggctactgacacacagcattcctgtttaacactgctggatgaaaagatcaattgaagtttttttgagtttttgagatatataataaaataataaaataatatattttatgcggtttttaacttctatcatgagagatatcaaactaccgtctatttctgatatcgcattagaatcaaaggaagaaaggattattcattatagaaaattttttgctgaattgagactaaacaggctctactttcaactatctattttaaattatttctcaaatcttgataggcccgataatagcaaatcgtttaccgaccagctagataactacatttctttttttaaaaaaatggatgattggcttgaaagtttgaaacttgaggggctatactccgaatttcgagaacagtgcttagatgaaaagaaggctattgacttaattatccagagttatgaaggtaaaatgaatacctagaggctggatttattgtttaatgcactaaggtagataagaatggcattggctattttttcatgatctgcttctttctcaagggagagtctaacaatatgtcctcctgtgattggaaaagatagcattttaattttttttcttactgtaagagaataaactacttctcctaatgtagagtcaaaatcagtatgtaattttgaaattaaagcaaactccataaaaattttaatagattctgtttcagattccaatgatatttttccgggtctcattccaccatatactagcctacccatatcatctataactcctatgaatcggatattttggtctagccctataatataatcataaatggctttatagtttaatttagcatccttgatcaatatattcaccgactaaattgcaatgccataccagcatatttacctttgcaaatattgctaaaagctgactcttttagcaagcagagacattatttctttcaacctatagacgtgctacgaagaaattttatctctccctatagtaaaaacctgacgcactgtttgaaggagaaaaagcaaaagtgaggccggctgactatggaattaccttgaccccacttttactgatgcgtgtgccgacttttaaaatcagttcgtataatagattatcattaaagtataaatagaatgatctttttaactgctgctgccgttttttaagatctatcgacgggatagtggctcttttcacttaacggcctctacttcctgttctgatgcctaataatagttgtagccaatttcttacaggccttagtttacaattcttcaacatgcaaggaaaataatcgtcgaaaatttcagtgttgttcttgatatactgcattgtcatttctttcgataaggctgttctctaaagagaaatgtgcgtgatgatctagtttcagaaatctacaaacttgtgaataaagttccaccatccgctgatacaggatgtttcccatggatctgactaaatcgcaatgaatccttctgctattaacatgtctctttttttgggtatgttggtgcgagaatttgcagattttctggctctattactatccctagcaagataaattcagaactaactttgattagtgtctcatcaacaacatactctgtgatatcttccttctacgacttgacggcttagttggatggtattttgaatcaagttccattttttagctaataaaacatggtatcgtttgatatagaaaacaagtccttcggaggtttgacttaaggataagcctaaaaaatacaaatatagacgaaagcatacatactatgatgatgttctgtttctgttaatcatttagaagatagagaatattcaagctataggcttatcgttaagtgaacagggcccactcgtattgtggaaagaataaaatcggcagtgttttggactcatggttcgattatagagtcattactggtaatttcggtggctgcataagactaccatcgcttagattaagcgaagagcaatcaccccttctctaacatttatggtgtcttaaagagttgccgctcgctcaagtcgattcgatatatgagataactcatgtggaggaaaatgacaatagtatcagaagatgtaacaagatgcgagcagtatatctggattcgatccccaatgctttagatttgagtgcaatattaaagaaaaagggttactttggagagacattcatgttgtcgtattttacatacgcatcctccgaatacattgctattgcgcccgaggccaactttggagacatggttgtatcaatataatctatcaccaagtttccattccagtacaccttgatgttattgccaatcatatcgatcttgacgttgttccaagtatttatcttcaacgttggagaggactttgttactaggaatttttgaccatccacaggatttgtgcaggtgtcacaatctttctttccaagctcaattccgtttggttttactaatagccagtaatagtgaaatgtatctgagtacctaaagaataaccaacccacttcccatgtattagcgggggagttttgtcgcaattgttttgcagtatttatatcggtttgcattgaaaaattgcaaaatatatcgttagacattaccaatgcagcatgtgtttcagatgcgctagtagaagcttgtggattcaaccaaaaattgaccctctgtgaggcttcatgtactcctgttgacccataaccggagtaaacattcttccactctccgtttggtgatgtatgaccttcgcgcaacaagtattgggggtaatgaaatttatcaatcaaactcgctgtgcaagaggtatcagcggtggcagccatctgagcggattgagaatcagttttctcttctttatctagttgaggcacttcaaatggaaagtcttcatctagtggaggtaattcaagtggtattttctcacctagtggagatattttaaatggcaatagattatcaaattttttctcagtagattggtcttcagtatcatcattactttgagaatcagttttctcttctttatctagttgaggtactttaaatggcaatagattatcaaattttttctgaatattgtcatacatagaagatgatgtactagagtaggtggtattgtctgtaggtattcctaaaattggaaccaacattaaaatcgctgccaagattccgaccatttgaattattttgaaatgcttataattccgttttttttgattgaacaattgtaatagcaatgaaattgatcgaatttagaggaaacccatctattcacaataatatgaatatgtacccagatttcgtaatcttgttcactagatcagtaaaatatattatttctatgggttgtagtttaactttaaggtcatcgtttcctatttggcatttcgttttaataatccatattgatttgaatcattaaattcctgtttgattattcgaaataaattatttaagagtttctcacgtttatttgggagaaacgatcatgttattgtatgacacataggcatcctccgagtacattgctatcgagtcagaagccaactttggagtcatccctttattaacagaatcaattacaacgttgttattgacgtataccttgatatgattgtcagtcataagtacatttattttatcccaagtgttcagcttcaacgttggggtagacttttttactaggaatttttgaccatccacaggatctgtgcaggtgtcacaatctttctttccaagctcaagtctgtttggcttaaacaatagggaataatggtgaaatctgtccacatatctaaactctagccagcctacttcccatacatcgggttgatagttttgtcgcaattgttttaaagtatttatatcaaactccatttcaaaatcacaaaatttgtctgtagactttacttctttatgtgttaatattatatacattttatgaatttttacaatctgacaagggcgcctttttttggaacttttttatggatttactaaggaattaaagattccttgttctctaccatatataacatatctggatttttgagatcagactccgatttgatatgcacaagattgaacttaactttaattgggtgctcacaacaagattatattaaaggatccttcaatgaaatacaattcaaatgcaaagaggatttaaagctttaattgtatctggcgcgctatttctttcctcaataatagtattctttgtatggggaatgtcatttagcagtatgttcattcagaataaccaaagtctctctactaatcaaattacccttaatcctttaacgtcctttaattctagtatttttattaattctaccgataagctccttacaattacgattgattctttagacaatgatgagatagtacttaatgaaatggtaactgatcctgatggagaaatagtatctaattcttcattccaaaaaacctatttttctactatagatccgaattccactggaaggtatgaattctcggtgtcaaatatggatcaaaatgataaagccacagtttatctattctttggcaacttgccattcttaaaggaaaatggtgagctagactttactagtttcggaggtctggttttaggagtaatattatttattgcaggattagtgagttttattattggtataattctgtatcttaaagacagaaacaaagaaaggtatcgtggtttcataccacggtaggatcattaaattccaaataattttaacctcttaaactatgtctatagtagctcaataaaaaacatgtaaggtaaatattgagcacatttagtatttagttcagaactaagctgaaggaatttggatccccgcttatgtcaataaaaatagatatgtgtgttatgaagggatggtaagaataaaaaaatacaagaaacccaaccgaacatttttcccaaatacggaacgactctgctgttattataacagcaaaagaatcactttatttaatcaattcagcatgaattttaaaagcaaattcttttgctcaatctagaatcttttttaataacttaatgttttagttgaatattggaagacaatagaattttggaaagtatgtttccatctgatatactcccaaaagtttatccaaaggaaccaagtccacaagaaaattcagcagtcgatgatgttttaagtagtaatatttttaatgttatgctaaatcgtcgatcacaaaggaaatttgaagaaaaggaaatagaaagctggaaaatagatataatatttgcggcagctgatacagctcccaatgcaggtggatttcagggttttgagatatatcatattaaaaatcctcaagtaaaacaaaatctagtcaaagcggctaacaaccagccttacgtcaatgctccattagtgttggtattttgttctaatccgtctagaattaaattaaacttccatcctgagatattgcataaattttcaatccaagacgccgcgcttgctgctggttatgcccaattagctgcacatgctttaggactaagctccgtttggataggcatgttcaatgaacatatgttaagagaagtaatcggtactgaatttgagcccacttcagtcttatgtatgggttatccaaagaaaatgttaatacccaaaccaaagagaaatcttacagatctaatacataccgtctaaatttatccttctcaaaaccacctccactagttgagattaggagcagaaggaggaaagagtgacggtctggtattatgcaaatgattgtccaagtcgtggtaggttggccggtcagtctgtcagtcggtggtcaattcggtgtttttagtaattggacagaaatattttaatttcattggataagtgaaaaactgttcagaggataaacaagttatattttggattagtatacatgatataaataaaaaaatttcaagaaaaaaaaaaatttagacgagagaggtgggtgagttattagttcagtggttctttatagattgctgtataaggtaagtcgaatgattcgtataattcggaaacttcagtatcagtattcttgtttaattgatcgctcaaatccatttcatcttcaaatacttgttttgatacagagtcggctgattgtttgttattaacaccattaacctcaagaggctcgtctgattctccgcccttattcaagttgattggttttatgatgttatcatccggtgatgccactgcaggacctgttgttagtaccccgtcagtcttagtttcggcaccattaatttcattatcttcttcatcatcgtttgaagatacagcgacgttatcattagaattagattccgaattacttgattcttcgttgtcatcatcattgcatgacgctgcatccttcatgtcaaaatcactagactcattagcaacctctgtgtcacaattgaataattcatttagggccatggcagaagacacttgactgagtccaagtgacgctactatagaaaatactgctactactagaacacctgcgttttttgtagaaaaacttttagtactggtcatagacatttagaatttaatttttataattaatataaaatttgaagaatgtagcagtaaaaaattgctaagtgaatttattgattaattcttcttatggaatcaaccattcggtccttgtgagtcagaatatccggtcgtttctgataacgatttttctttcttctgaggataggggtcctccatttatttttattaagtgtctttttgttattattgcgggatttagataggtcagttgtggtgcgtgtgatctctagaatgaatttatcctcgaaacatcttaaattcaaagttgtattttggtattgattgctcatgcaaaaagaaaagaacgcttccttgtggatcagagttgacaaacgtgcctgcaatgcactctgataaaattcaaccttgtactttttgttttgcaacaaattcaccgagattaggataaatatctaaacaagtacataacctaaatgacagaatctacaagcattagaattaacttagaggaagaaaagataactagattgaaaaccataattgaagaattgtttaattcaaatgcaataagttcagacgatgttgaggagtttattaaatttacattatttatcgtttttgatgaatacaaaagggatgctgattcactaaagaaattttattctatgaatctgactaattatctggagaacaaagatcgtttttaattcgatttgaagccaagtctacatagtattaagatatgaaaattttattttgaagaataactcagggatgtatctagatatttgaggttattccaaagaagaggaaggaaagaaaaaaggaaagaagaaagtaagagagaacattacacctccttaataatggaacacggtgtctccgatagttttcttccaatcagaacgaatgcctggcttcccttttaatttttcaatatagttaaatgcagaaatgcctgcagctgcgccatccccacacgcagccacgatctgcttatagggaatgtttgttgcatctccagatgcaaaaatggcggggtgggtggtcttacctccatcagtaacctctatctcccctttcgtgttaagtttgataagatgttttacaaaatctaggtttatctttgaccccatttcgacaaataaaccatcaacatctatcattttctctgctccgctattgtctttgatttggatttgctgcaaagagttgtttcctgaaactagggtaacagaactattggggaccagttccacattgcttttccttttaatagattcaatcatatctttgtcacctcccagctgaccaccacgataaattagatatacttttgaagccattctagacaacaatattcctgattctaaaagatagcctccgacaccaacagttgctgttgtcctaccctggtaaaatggtgcatcacactttgtgcagtagtgaacacctttattttgatactggatttcatttggtacacctaaattgtttggaactttacctggagcaagaatcagtgcctttgtaagatattctgaacgtccagtttttatcttcaggctggtagtttcttcgacttgatcaaccttttctacagtatcaaaagtcatttcaccattaaatgttaagtattgattttccaaggttttagcaagaagcgggccactagacattatagttccaggataattttcaagtttaggaatcaggttcatctgtcctcctaaatcctttgaaattaaaagacatttggttctctgtcttgcaacaaatatgcctgcggaaagtccagatggacctgcacctacgatgataacctcatattcttcaattgtcaatcttgctcatttctccattactctattatttataacaaagaactctcaatttctttcaagacacagatatcaaagcggtcatgttctctactccgtcgataagaggtaacctctcgtctatttcacttttgacttgctgcaaattatctgactcaaaaataacaactaaatcataaattccatatacagactttaccgctttaacagttgataattcttttaatttatctattacattggattgtttcttgtaattaacattcaataacacataggcttcactcaaaataatctgtaattatggtattgcctttactaataaagattgatgcgatgtaatatgtattctgaatagatggttatcattttcagaatttttatatatttaatatttcaaatcaagtttttttacatgatccattccagatttcacagaagaaaaataatttctatctgaaattataggctcgaaactaattttgcctttgtatgaaatattttttaatgctttaactattgtatcaaaatcaatgtgaccaaatccaggcatctttcggttgttatcagcaaagtgcatatgagaaagagtaggttgagaatttaaaatcgtctgctcaaatgaatcttcttcaatattcatgtgaaaagtatctaacatgagttctagataatcacatctttcaatcaaaggtattacatctgaataagtacaacagtaaggtgtagaataacgattgaggggttcaaccatcaaggaaacattttcatcttttgcattttttaagagacggttcagcaaaggcgcacaacctctcaaagccttgatcttattatctttggtaacgtttctatgagttacgtcaaaagaattaataggatcagaaaacaagcaaatattgattcgttctcctccaaagtagttacataatctaatacaatttgatacatagtcttctgcatattttaccattgagttatcattacttaataatcgccttttccatccatttggactagacttaccccacatgcctgtgatgcctactacctttgcgtcaaatgaatttagaatatccttgaaatttttccagtcaatattatcgggttctccatatagttcgaactcagtcaagcctaactgcgttaggttctccaatgtttctgtatcgtttttttgtatatttaaaaaagaagataaggtgatagaataggagaatgtcaattcttttacctagatttttatactcgattatatactgttgatgtccaaaataattttcctaccttattattcaaaattctttctcacgacatcaaaaatatctaggcaatttattactgaatgcccattaaaactatcctttttaacatttctaatttttttgctagatacataggccgataatccttcgcccgattcaatattatgtggtcgtccatgagatccattgattaaccgtgtgtctgtagatatgcattttttttgcggatctataaagagatcgaggggatcatatccgggttttctgtgaatatccactgttttagtaaagctaggtgctttgctattctcatcaaatctacctatatctgagtttgagatttttttgttgttgtcttggtgttcatatcctccttccgactccgaccaccaccagtagtaactaaaccatttatctttttctgcaatggcgatgagatcgccacttctttggtgatcaatgtaaagttttttcttttcttctacatcgcagactttatcaattccagaaacatcttcaagcgcactcttaatttttgctttgtttatactgttactactattatttagataaatatgtgctatttggtgatctaccatcgcaaaggcatcgctaaactcataatcaatgtattcttttccttttatcgttcttacttgaagtaatcccttttctcttaaaatcctattaattggtattgcatcaacgacatcgttgaatccatattcagacagcaaaagaaaatgaatatcatcaaataacccggcttgcttaacagtctctatgatattgccaacacaggtatctatttgctttaaatcctcagtcacctgagggctagatttaccgaatttttgtgcgctataatctagttggggaaaatatgcatgtatcaaatttggataatgatttgctatagtatactgtactgattttgttatccattcagatgactttatagatgcaaatgggccccaataattcattaaattgaactcgcctgcctctttgataatcgactcatagtagtttacgggttttgaataacaccacatatccatctgaccgttttctaaatgaatgggacgaggggtaataacataatcattgtttgaatacatcgaattttgccagaataacatggctgttttaagcatgctgtttttgttttttatagtatcccagatttttttagactgaaccaaattagtagattgttcccagaataatgtttgcatgttttctctatcaaaaaatccatttgaaataataccatgctcatttggatattttcctgtcaaaatacttgcttgcactgtacatgttactgatggaaatacgggcttcatatacccatattcaccattattttgaaacaaacttgagatattaggatatttttgagagaaagaatctagatgagaaacatctaatcctacaatatctaggataataaaatattttgaactattattattattgttgtttgtcaagcaacataatctgttagcaataggatttatgaatcaatagaaaattgcgttttaacaattttgactgcgttctttgtattcttagctaatgatatccaataatgtacagattactttgcttagattattcaaagtaataactaactactggagtttatctaattgattattattcgccgctctgaaaaaaacaataatgactgattaggtagaaaattaaatacagatgccttaatgacggattcgaaactggtttgtaacagattatacgcgcgtgcgcgttttagtcaatcttttgtattttcaatagagtctcacacttgggacaactcaaacctaagaacttgaacaacaagtccccatcctcaaactcttccgttatcaattcacttaaattaattaattccttgcaagatggacattttgccatatatatgagataatgccatttcttatttataattagtgaatgatttgattttcatcggcatcgacattccctgtgccatttaaaagtaatagaagccatagtcagcacatacctgaaaagaaggacggattattattattcttgataatcaacaaattatttatattatagttaggttaacctaatattgcatctaataaagcattgttgtcaagcaaaaacaaaatccaaatcccttgcttgattcactaatgtcttaccttcaaaccaatacaggtctggaaactctggaagttgttgaaaggatggcgggcatcacattatacctcgattggcatagcgatggaaaaaagggtggcatcttaaatgccgcccaactttcaactttcaactttcaacaggatacgctctgttatataatacattcaatttagtaaaatggcttagttggaatagtaattattcaagtaagaagaaaaaaagagaataggatcataccttaattacctttccgtatataccaaaatatgaaaggctatcaaaaactaaccatcattactgctattttgggacttataattccatttataggactctttttgtattttctgataaatagctttatcggtataccaatactggcactttttgttggttgggcattactaattgcgatagctataatagcaataaacataggtgctattgttgcagcctttaaggttaaaaataccaaaattgttggaggcattttaatagcctgcggtgtaatcctttttgcgctcattcaatggtttgcaataccagctctggtattatttgtaatagcaggaataatggcctttagacaaaaaaacacactcagcaatcttaaaagtgacaatttaagtacgtaggaagatgttttattatccaatattgttgttgtcacgatgaaataagattcttccagatttataacaacttcaacatcataatccgctatatcatcagaactatgtcatatttttgttagaacatcttttacatcactatagatagttaaacaagtaaccattttgaaattatttatactttccaattcgataaaaaaagcatattttttttagtcttcactcatttccttctcggcatcttcacattctgacatatttccgatacctgatgaccccttcttttcactgcaattattgatattataataatgtacgccgttatcatctaccaagtattttcctctttgctgaggatcagatatggtattattgttaggaacaagattgctaacattattattttgagtttcattaattgtatcattattactttgtatcgcaaagacagtatcattattattgttactactactagatacttgagttacagttgaaccccctgttgggattataattgtagtagctggagtatcattagaatcagtttccgatgaatttgaaaatgttgaatttttttcagggataacaggagaagcatgactgtctaaatcatttaaagatgcatttataataaaaacaagagttacaaagcagcagcataaggtcactattaatttcaaagaaatggatccattcattgctatatacccttcgtaaatacctatttaaaagaatttgtaaatcaagttattggcagtttctcttattatcttgccgaatcgcattattcacatctcctaccttttgtatatccgaaattaataaattctttattctttacctcgtatctaggtcatgctaatttttttgctcaatactaaacagggaagcgtaagcattgttacaatggatccgctaagtatgccggctactcccgcgatgaatgcagaatcaagtactattagtaaaatcaacatgttttttaccacaaattgtatgactgctgggtcctgaccctgatcgtttgctttctttaaggccctattgaataacagattaatcaaaaataaatacaacaagataaagagtaaaaaatccagcttatacggggtaaatatgatagcgatcgaaacagagattatcaataagatgagataaataattttgatattttgaatatcttgtttgattttattttttgaaaattcctgagctgtctcgcttttactaatagacgtcaaaataaatatgtgaaaataaacagtggaagctaccactacgagcaacacccaaggattataatccgaagttggtgtcactacctgctcgccgctaactgcacttgtgatcggaatatcaaaaataaaactggctccatagataacgtttaatgcacgtattgcagccattaaatacggtctaaaatatccattctttattttatagttgtatgtaacaatccctgcaatcaataacatcgaaattccaagagccgtcgtattgacaattgatgcaagcgccagtgcgacactaaagagtagaacagtaatttgaattgcttttcctttttttattcttcctgaaggtaaaggtctatttggacgctcgagtctgtcaacttttatatcaaataaatcatttaaaacaagtccaccaatatataaaaaaacagatgaaaaaatcaaggtaacgagatcagaaacactatagcctatggatggaccaaagtaaatcgatactgccaaaaaacctatgataatgtctggagggactgtaaaaatattggaaatcctaaagagctgaaaatatggactttgaaacatctttattcaatgattattaacaatattttaaatctctcatgaattggaaatcgaattaagaaagttcatagatgctgatgcggccccgattggattattcttgtacggataaagttcaactgtgacatatccattgtaatttatcttctcaatagattcgaaaacatttttaaaatcaatcgatcctagtccaggtattaaatggtaatgtttcctgtcttttatatctgccatgtgaaaatgttcgatgtattctgcgagcctgctaatcaaagtactagggtcttcattaacacagtaaaaatgtccaatatcaaaatttaatttcaaataatcagaatcaaaatccttcataaaatccaaaaattcaactgaagtttcaagtaacagttcgggttcaggctctactaatatttttattttctttttttctgcttgaggcaaaatctctcttattcctgctgcaaaaagttccaaatacttttctctgttgttagggatatcaacgggcccgcctggttcaatcgagatattttttgcaccaagtttttctgcgaggttaatgcaatcaatggtatgtttgattcttaggtttctgtctattttgctattttctatccaagaaggatgatatgtatcccctaggccaaaaagagtaaaagcatttagattggaaatttgcattttattggaaattagagatttatttaattcatttattttggctgcatccatatttgggggatatgcatgaggcacatcacacattatctcgactccatcataacctatatttgctatttctttgattgattgcgttaaagaatagttggtaaaggcgttagtgctgaatgcaaatttcataaaaaaaattatttttgtagagttaaatagttatgtagtaattatggtagagcttcgtctcttcatatttagacccataaacactctcttatccaaaaaaaagacttgtaagagaaacatgagttgatcaaaaattaaagcagaaaatatatcgaaataaaatcatgatagttgaaatcataatgaatattttttgcagtttgtacatagttctgcaatccctcaaaagcaactaaatgaccagacatatttccgcttcccccacctgcaatgatatctaggataaatagtagaagtataaatccagctacgacagaagcaagaattattattttatatttcatagatgcaagtgttactttacctttctgaactggcgtggaggatgaggatgatgcagaaactggggcattaccagttccgttaattgcaggcgtagattcttttaattcttcttggagagcgcgcattctttctgcatgctttgatgtattaaggaccgggacttttttgactatcgatccatcatttaatgacttgtggatctcataaagtattagatttttaccctcttttgacttttgattaaataattctaaggcttcttcataatttgaaagctctattgtagaagtagttttaaactttccaactatttctattaagaatttttttgttatccgtgcatcatctttagggtctaaatcagatccatcattatcattatctttgatcgaatccatttttcaatttcctaccttgtccaatataaaactaaatatctctagtatttacactcattggattgaaaaaactgataaatatattctcataacaaatgcaaaagcaatggataggatatatagatgaaatgttaattaatggttttaggactaaacaaaggctcgtattaaaaaagcttgccgaatgcagttgcagatgcaaaatgctatagctgttaaagatttgaatgaatgaataattacttaaagaaaagcgaatattctttcttagcataggatttggaattaaacacacaattctaaattgtaagataagtaactactttcgatttgcaggaagaaatttttcttaaaaaggttaaaatttagaaaataaaaaaaatctattttagtataacatattacatgattggaagctctcgagggaggtacctcaccttttgcgggttaattaatgcttatatctataactattgtatatgattgatatggggacagctgctgaaccatctagtaatacatcttctgataagacatgccacctttgcggaattacatttgccaataacgatgaaaaagaagaacatatgaagcttgagcattcggaacacaaacaacctagtggagtatcttaaacttcttttttatattttgatttttcaaatgaattttgtggattaattaatgctttatcaatctaaaattatccaaatacaacatcaataaacgaagagattttgttcctaagaagctgatgaatttaatcatttaatgctctagctaatcatatggagtaatctccattagcagtgatctcctttttcctaacaagaatgtaagccgttttatagacaatcatatgacaacccacatgaaaaagtctagagagaaaataagtaatgatacagaatgtagaaaagaaaagttatcaaaagaagaaatgaccagaatgatgagataacgttaaaatattatttaaagcagaaaacacgatctccaaacggttcgtaaaatattatagcatctatacaaggagaggaaaaattctaacaagaacattgcatgtttttttctctggctatttttccaatttattatctttttcaagctatgccttaaagtcaagagatcaaatattgaatatcaaatataatgcgatcatcatcacaaatgtcatagataagctagaagaccatatcaatagaaaattgtggttgaggcaattgcttttatggatatatgctatcttagaattaattatagtaagattatttcagaattgaattaaacaattcacttatagaatattgaagttaacttatcaatgaataaaaaaatttccttgtcagttttgtcaatatttattgctgcagccttaattggttcagtagtaacctacggagataacatggcatatgcaggcggaaaaaataagaaatcaaatgagtcagtacagcttctagaacaatcttcagttacaggacaagattcaagttgtttttccgaactaggtaaaacaatagcttcatgtaacaacttagcctttacagctaacttaaacgacggtaacaacgctgctggtcaacaatagatatcatttattttaaaaatggtattgccactttttattttttgtacgtcctagtattctaataatctaatagtctctgtctgtgtaaaattctaaaattcaaatactttcgctagattatatctatatagatagaatccgagtcaagtagtttacgatgtttctttcacttgaacttatttaacacaatctccattccttttataagaaaagcttgataggaagaactttataatataacaagggcaagacagttgtctactacagttaggcatacgttttaaccaatggcatttatatcttgatcattacattcattccttttataagtaaagcattttccagagagcaatgcggaccgagtaggatagaaccaagtgttgtcaattactttcagtgtgaataagatgctgcgagtcaaagcatatagagaatcagttaccattctttgataccttgtatgacaaggagaaaaatccagctaaatagacaggtctcagaaatctcaggcatccttttcaaggaaaaatattatttggtattttaatcatgtcgaaaaggttgtacttttactaaatgtgaaaaagtaaattatttttaatgcatattttatctaccagagccaccgtctccaccgtctccaccgtctccaccgtctccaccgtctccaccgtctccaccgtctccaccgtctccaccgtctccaccagagccaccatttgcatccacaccactgccgacagaacctccttctaaggctattttattatcctcattatcacctgttatattttcagcttttatccaacacgtagactcgctatcaccgccatcaccgccatcaccgccatcaccgccatcaccgccagcacgtcctattgcttcctctccaggttcaccttcctctccaagttgaccggaggtaccgtcagttgtacaatatataacatagctatccttggtaactgcactagtgttttcggccaagtctacagtgtcagaactatttgcggtagaataactactttgattaccggagattacaaacagaaacaaaattgcaagaaaattacagattatcaatttattcatatttaattattaatacacaatagaatattaattttatgaatacgaatatagcttagtcaaatccatttttgttgccttagaataaagactagttcatcagaaaagaagaaccacaaagttttatcaatatctttttaaaataactagtagtagaagtaatttctgtctccatccagcaaaaacatatgtcgattatataaagctacaattgcagttcgctacttagagaatcgtgtaactataatcaagctgcaggtggatgctgcttgactttaaaggcttattaaccaggcttttgcccccattgtgctcagcaaaataagtcacaataattctatattattcaataaaacaaaaaagcgtaaagagaaattaaaaaattataacaaagttatacaatactaaaattacattaatctatcaatatagagataagaatctcgtttcacaaatgtgaatctatgaattactgttatagctattttgctaatcacaaattatctgacaacttttcgaccatctatttaatgtatgttgtctacaatagattctattgtataggataaatctagtgtctaataatatacaagcgaagcgttgcgaatttgcatctgcctgtaagtattaccaaaaagacagtcatacctgcaataactatgacgaggctaacggttattgcggttttaatcgtatatttaggtccgagcatctggtctagactaccataatcctatcgtggttttttatagaaataataattgttgcttgtgataaattagaatgagaaaataactagaactaaaaacttgtgtgccacatcctatttagaattgaagaatttgtccaatgaggtcaattttaaagaattgataccataattggggccatcataaacataaaccttgaattaggatgctacattatgaataatttattgatatttgtactcaaggcattgcaacaatagatacttcctattgctagcgtgataatccagttgaagtttatcttttttttcatttctatgcattttttcataattctaccaaatgcatacaaattcgatcctgtaattatccttcttaaaacttgttgataatggactttaatcctcgaaatgattcagaattctttatcgcatcctcaagtttctgcagctcaaaagtatcggtaatcaaatctttgacgcttatttctcccgagtctaccaatttcattgcctccttgagattctctggagtagatgaaaaactacccatgactgcaatttggttatagtgtataaaattcgcatcaatcgtgggactttgagcaagattgcgcgatttagatttaggatttttcaatcctgaaaaaatcattatcttaccattcttattggcgagcctacatgcggacgttagtgaagtaggattattatttgaaataaaaataagattgggagattgtctacaattaagttccatagaaagctttgagatgggttcgaaagtgctatcattgttgacgtcatagactctatctgcacccatttgtcgtgccatctcaagtcggtgatttatttttccaactactattacttgggtgttgggaaatttcctttttaataacattaattgcattaatccaattggtccatctccgataataactatagaatcaaagtcaggtgatttgatttgatttataccgttgatacaacatgcgagtggttcaattagggaagcttcttcattagttacattatccaaaactgggacaatacctccaatttcaaataccgttcttgggatcaagatgtattcagcaaagccgccatttacagtagatcctaattcctttagattagaacaaagattatattttttttccttacagtaataacaatgaaggcatggtattacaggataaatggataccctttcttgattcttgactttgtaattttttcctctgatctcatccgtggtttcagcacatatttcatgcccaagaactattggtggcttgactttaaaacttccatttctataggttcttacatcatagctacaaacagaacatgataataccttgagaataagattatcatttgaagggctctccatatctatattttcaatcttaattctgtttggtccataaaaaaatgccgctttcattgctttgtaaatattttctttctaacaaagttataattgttatatatatatggatttgatacattacggtcagtatgacacgatactttgatccccatattcacatgtattctcgaacgactgatgattatgagaaaatgtctgtagcaggaatagaagtgatagttcaaccttcattttggttgggttcaccaaggactagcgtggggacattcgttgattattgggaacatatgattacttttgaatcaaaaagagcaaaagaatttgggattaatcattatgtttgcatctcagtaaatccaaaagaatcagtagaaaggccacttgcattagacgctttggatgtgatgatggataagcagtttttaaaacgcgaaggggtagtcgcgctgggtgaaattggatttaacttaattaacgatttggaagaagagttatttgtaaagcaattagatatttgtaaaaaggaaaatcttttagctatgatacacttgcctcataataacaagcttgaaggaatgaggaggatgcaaaaaatctttgaaactggtaaatatgattttaacaagattctaatagatcataataccgaggaaaccatcaaaatgacattagatcttggtgcatgggcaggactgtctgtttacccaattactaaattatctcccgaccgcgtgatcaaaattgtcaataaatatggaagccataaaattatggtaaatagtgccgcagactgggggatctccgatcccttaagtgtaccgttaactgcaagggaaatgagaaaaaattcatgtaagggttcagatattgaaagagttacctttcttaatgctttcgaattctatcggcagtcagataactttacgtggcagccataatcctattcataatttctatattaatttaaatatacatttcattaggtggtagaaaacctattaaactaaaaacaaatctattagtgtgtgatttgctgatcattttttttaaacaattgctgtgtaatattcactcttaaagcgtagttcatactggttatgtcctatagtattgtgctaatactgaggaattattattaacccttctttggttaaggttttatcaactattaatttctacgtctttctactttttggagctttcttgggttatctactttaaaatcctttcagtttcacataattagaaacattaagtggtttgacaaaaaaatatgtttctttaaatctgaataaaaagcaattatgaaaactatgcaacgcatggtgaagacgtggtgaagatgctcttgtattattatgaataagaaatgatagaggatttcaagatataagatttcattatgagaacagaatcctttagtgtaaagaaattcataaatatataatttaaaacaaaaaatttgtagattgtatgaaatctactttgtgtgggtatgattgcttgttttgtagtgtttttacttattgatgtctgttatatgcagcctaatgtgttgcatattgcaattgcactgccgccgtcgccaccgctacctgcgtcgccaccatcagcatcaccagtctctatttctgcttcaccgccgtctccgccgtttccaccatcgccaccatcagcatctccgccgtcagctgataactcacctgataaactaattcctgtagtttctgccaatagtgcatcgaatggttcaacaaattcaaagcccgtattgttgcttccaccatcgccaccagtaccaccgttaccaccagtaccaccagtaccaccgtttccaccatcagcgtcatttagtcctgtgagtccgccatccccaccgtctccaccgttaccaccactgcctgcattttgttcgaatgcgtttgcaatagtgtaagaaggaatcatagttgccaagagagcaaatgctaatgccccaaatatggcaaagctctttacagatatttttttgtctttgttaatgtttttttcactgattaattgattcatatcgtaaggtttagtgtattattattatattacaatttggagtgttattttcattataattttctagtattatatttgatagaagttattaacgctcgatactctttaatactaagagaaagactatttttctaaaaaattttactataaattttattgtatttaactaatattagaaattccaagtaaccgaatttaatgtgggtactcagatcatgtattttttatctcttggtttgtccaatatcaacttaagaattaaatcttttaatatcaattcgtttgaaatattattctaatatatgtatatatagacagcatagtgtgttatttccataactatcttctttgcatattacagaaaaggttcaaacaggtttttataggtacacaatgagtttatatccttttgttgttactttcatcgagcgtttttgttatagaatatttttcaacaagaaaaatgacctagtggtcaatgatagaagagttctttctaacgtttattataatgttcatgcagaattatattcaatcgaccaactcaatcaaaaaattgtcttgagaattatcaacgcctctggatgcctaaaagttttagattctttgatcataagtaacagcgctaatgaattcctttttccatttctatgattatcattttctttagataaattgcaagagactactctctatgttattatgtctactcttacatatatctacattaatagtattttttctcaatgtccttattttctaacagtcgtatatcatccatcccttgatctttcctatattgacttcatgccagaataagtgtaattcgacagctatgacgcgctggaggtgctttgtttcttttactcccaaatacagagatgaaatacaagtaagctaaaaaattttttgactgaatagagaattaacttgtaccgagaaaactgccgtccttgattgtttgtacgctttggttatttactttttgtatctgctttgtcttacgactattactatagtcctctcgagtaaagatggaagcaagtacgccattacatatttattttaatataataatgtggcagagttttgatatggaccgctgaaatattatgtatgttatttctttcttgataatcatgaatattagtagcaaactggtgataacggcattactgagtttttccttaatggtgggactattttcttcacagggttaccaaagcttatctgctcaaccaacagacctgtatctggactttcctgagctcttagatagcaaccaaactgcagtcgctgatcctaatgtttccaacctagacggtcaagacggtcaagacggtcaagacggtcaagacggtcaagacggtcaagacggtcagactttgatatcaccctaagaaaaaatcaataaatgattagatcaataaaaaatcttttttttattgtgattactttatatacataacaaattaacttttcacaagtacttttcccttatccttatctttttaattagttagatacttgaaacatactttatgaaggcctaaacgagcaaatgatgtagtagctaattaaattagcataagaaattgttattaatcacttgtatattctctctggaaagtaggatatctatagattatgtatttttgatgaaaaacgatatcataagaaaagatactataaaaatttcaaattagttgaaataccttaacagaaagaaatctatttgaatataatacatattttaaaaactatttaaaaataaaaaaaaatcttaaagtcaataaccaaacggttattgactttttatttcatttgactttgttgtcttatggttatggagctactatgctgtagtcgtcaaagtcgataccagtgttaccggatccaccagcaccacctgtaccaccattgccgcctgcgccaccggctgcaccgtcgccaccaaaggcaaagttgaatccactattgccgccgtcgccaccgttgccaccattgccgcctgtagtgtcgtcattatcttcactacttccaaagaagtcaaagatactgccgaagccaccttcatagctttctgcgtctccgccgtctccgccgttgccgccgtctgcactaccagtctctatttctgcttctccgccgtctccgccagagccgccatcgccgccatcagcatcgccaccgtcagcatcaacactaccctctacttcagcatcttcgccaagggatgcaatttcgtctgcacctaagccagaaatgcctgtattgtcattgccaccgtctccgcctgtgccgccgtctccgccgtctccgccttcgccgccgtcgccacctactgctaggttaacgccagtgttgccgccgtctccgccgtctccgccgtcgccgccttcagtgtcatcattatcttcgtcattgctaaagaatgaaaatgcactaccatcactgtctttactttctgcgtctccgccgtctccgccgttgccgccatcagcatcaccagtctctatttctgcgtctccgccgtctccgcctgagccgccatcgccgccatcagcatcgccaccgtcagcatcgacactaccttcgattgaaacggttgcagctgtggattggaacccaatgctggctagtgagccagtgattgtcagcattaaaacactgaacaatgttgcaaatgttatttgatttttgtatttgttaaagtttatcattgtgggtatttcaccaactattagattgttaacaatatataaaaagttatctgaaattgaactattgcttttatatagtagaagaacacttgtggttgttctgtaacaatattagcctttttggatactatcaccatttttctgatgctttttccaatttccactatcggtagaaaactaattctataataattctacgaaatagactctattatttgtagtcatttagctatatgatgttttcagatttaatcgagtaaaagatcaaaagttagagaactaataacataaaattaggtagaattctaatgatggcccactgattattccatcctaaggcaattcagaggccaatacgtaatacgtaaaattcttggaataaatcttactacaaatatgtatcaaaaattcggataacccagaaatccatatccaaactagcttcttggggtcacacattacaaggaatctcaaaagtcaaaatccatcagcaccaagacaaataaagctatatgattttagagaaagatctataaagtaagccggacaggtctaactcaaaaatctatcaggcactacaagtacaaaattttccgccatatataacgacatgacagttaaccagagacaaatagcaaaggttaggtaactacctgctctttgtttcagaactgttaaagcgatggcagctggaatctgaaacggtatctcataaaaaaatcgtgcttggattgttgcatcagcaaataataaaggaagtgtaaataatgaaaagaaaataattagaaaaatggcataatttacctttattttggtggtatacagccaatagataacaagcagtagaattataggattcgcaatctgaccagccaaataaaggtgagctgtatcaattaggttattccaaattacatataccccatgtatcccaacctctctttccaatgcgaaactaagttcttgctttacacctgaagaatttaagaacaacattcttgctaggtcaatcagtaaagatggtaaaatagaaaacactgtcgatagaactatttttttattttctctcttatttttaaaaatgagtatagcaataaataatccaattgtatacatgaaaatagtccaggtctgagcatgagaaaataacaatattattagcaaaatagaaaaaataagtaagttgatttttcttggttcatccagtaatttaaataaaaagagaattgccatgtacccccaaataagtgcaaaccaattggcatagagtccagcatatatgccaattaatatatgagatggaatggtaattagagaagcaaaaagtgaggtaaaatgatttctagttatacttaacgtaagaaagtaaatgctcattacgagtaacgggcctaatagaattggtaggtcttctaacaaaaaataaaagttgccttgataaaatatattagacaaccaatagaaaaagagtaaagaaaggggcctatctccagttacaacaatgacaaaagctttgtagagtacctcgccatatccagatgagtctgccatagtttccaggaatctaatgtaatactttgtatcactaccgattactatattgtcctcattaactgtacttaaatgaggtatcatagatacagcaatagacagaaatattattactaataaatggaaaattctagtccttcgtttcacgtatttttccttgctagtaacattttcctttcttttggtagagcttttcttccattttttttttaatattcgaaaagttagaacaagtggataattaaatgagataaggacaaggtatagcggagaaaaaatggaaagtattataaaaaaataatacagataattcaatgagggcaatggcaattcagggaataatatatgacttattattacaaatgcactaacaatagcaattgagatgccaaaaacagaaatgtagtttacactaagcgtcaaattaaaggagatggcctgtttgtttaaaattttattcataatgatgaatagcaaaacggtaggaaaagagattgatgcaagtatttttgttgcaaactctgtgttaaaataaagagacagcaaaaaagagatgccaaatgctgccattataaaatactttttgttattcgcaatactaaattgaaaccataggatggtgcataaaattatgattaaagaatcaaaaagaccgtttataaaatatttatctacaaaattggtaggataagtaatgcgatctataaatagatatacagttggttgaaataaggaaactaaacttaataaataaaagaataagttaatggacaataaagccgaacttgcaattagcttgcgcgattcacccattcccaaatccttttgaatcgagtataacctttttggcattcttaaatcctaattagttgcttattcatatatattctcatatgaaccctgctacataagctgactgttctctttctatattacgatgattctaaaataggactggcgatctccatcaaaaaatcattggtaatttattagacgaatgcatgtcgcttttaccctgaagtactgggtatcttggattcctatttgttcgtttgcagtaaaatatacagaaaatatcatattgagataaatctatatgaaaatcttttgatatcatagatcaacatatcctatttcttactacctctggaatatctatcgatcgtcagtcttattccctcataaatgtcaatagtgggtttccacttgaattgtttcattactttatctatgtttgataccatctctactatatcgtttggcctgagagaataatcgtattctacggcgatcttcttattaagaatacattctatgactgtcaaaacctcctctaaactatagcttttcccatagcctacattatacacattatagcctcctggaaaattgggtaaaatcttttgaataagatcaacaaaatcatccacaaaaagaaaatctctatacgtattttttttgcttagtattaccttttcattgttcataacttttctgatggcagtcgaaataaaagaagaattatgagaaggaccataaataagaaagggtcttaatgttactatatttagtttataatcttcagagtaatactcacttaatttttctgaaattaatttacttttattataaggcgaatgtggactaagcgggtggttttcatcgataggcaagtatttagggttaccataaagataggtgctgatataaataatatttttgatttgtctatttacagcataatctaaaatattgagagtaccgaccatattcgtataataagtgtcataaggatttgaaatggagtctacgatagaagtcttagacgctaagtgaatcactacgtctacgtcgttaatatctaagagttgatttttttctagaatattaattcgctgtccactatttttgttagttggaaggactgtataattaccttgtaattttttaactaagttagtccctataaaccctttatgaccagttactaatatgttcaatctgttctcaatctatcctctcttattcgtatccttaatatagccataactcagatttgaaattcctataccaatccatcagtaacgatataccttcctcaaactcaatactaggagcaaaatccaatgatttcctagctttggttatatcagcaaataatctttgaacttcagtaggacgagcgtcgacatgaatagtacttagatttttttcattgccagaatatttcaatatcaattttgcaatatcgttaacggatttttcagttccggtgccaaagttaattccatatttacctggattattgtttgatttcaatattttatcataggcattaaccgcatcgtcaacatacatataatctcttgtttgattaccatcaccgtaaatgataggtggtttattctgtaacactctgtttataaaaatggcaataacccctccataccctgaatccttttgtcgtggcccaaagaaattaaaacatctaattatatcgattcctaaatcataagtttcattatatgtgtaacataatctgtccgctgcgatcttactgaccccataaggatgttgagcggctaatggatggtcctcattcataggaacgtactttgctgatccgtaaacctcgcttgtagaagcaaaaaggattttactaatatcattcatgcgcgcgaattctaaaattttcattgtcccagatacgtttatatcaaaggtttcttcaggatttacaattgatcgatcaacatgaatttgagcagccaaatgaattactgcatctagatcagtaggaattttaccgtatagttctttgtttcgaatatcgtcgtgaataaacttaaagttttttctatgtaataaggttctaacattgttgaggttcccatttaatagattgtctattccgtaaacaatgtgaccttcatttacatatttttcggatagatggctacctaaaaatccggcagctccggttatcaaaatcttcataatccatgttaccaagaggtgctctatgaaggtttttatttcaaggataaataattcaatctttattggtaaaattaaaaagtcctaaaagacaattattcatttcgatatataaaaataataaagatataaaaataaaagattgagatttttttacgacaaaacttaatttaaaaaatttcattcaaatttttatgttggtctattaatatcaaatatgtattgttaattagatgtatgttttaaccaataaacatgtttcaaatatttgacattgtatctgtaatttgaaagcttaattaggctatacgagaattacgtgaatcttaaaaagtggtcggctattaaaaaaattttccgatgtacaaatccttattaatcttttgacagattacagatctctaattttacctttaaagagggctattatagtgtaaacgatcgccgaagtagctaataagatgattcccaataatgcaaaacctatcgaaataattatcatatttgtagatacgtatctagttgatgaaaacaaatccaaagcattatacataaaaaaggatgaaaacacaagaagtattacgcccgggagcccataaaataataaaggatgtttaaaagataaaaactgaattatatgacttataacactccatccgagtctgagtggattatgtgcggattcatcctttatatcgtatctttttgtagttattggaacttctactattcttaaattacaatcatccgctttaagcaatatttccgtagatatggccattccatcttctaccaaacgcagtcgggttaatgcatttatagaataagctctaaagccactagttgcatcagtaatccggtcaaaacaaccaacttgagcgaatcttgttatggtcttaataccaatgcttctgtatttagggacattcactttgtcctcctttgtgagaaatcgagaacctattacgatatctgctttgccttccagtatcggttgcaaaagctgaggaatataactaggatcatgttgtccatctgaatctatggttattacgatatcagctttcattgtaattgcatattgaaatagagtatttaatgctctaccgtatcccttatttcggacattccttataacggctgcaccatttttttcagcaatctcggcagttttatctcgtgaaccgtcatcataaacaatcacttcagaggaaaatgcttttgactttataataacttctgcaatgctttcttcctcattatatgcgggaatacaaattaaaatccgtttagattcattaatttcaaaatagttgttaatggtcatattattcatctctctaaataataatgtaggtttactaatagataaattgctagatatttcacataattataaataccgtctaaatataaaaagatatctgttcaagtatcatactggaaaattaaattaaactttatgatcaaattaatatcaatcccggtactaggattgaacaatgggcaatttgatcaaaataatataaaatttaacaatatgactgcaaaaacatatttagtgcaattcaaatccttattaataagtatactctttgtcgtctaactcaatcgatttagcgggaattagatcatttattattcttgattgattggacttcctataatcgaaagcttgtaaaacacgtttaaaggaatatagaatatcaagcatggatttgatcaatgattaagagattaggatacaaagcaataacaatatattttaataaacgaaccaaaatcaactaatgatgacgagtcaacctcatatttgtattattacttcaagtgatatatccaaaagtggaattggtggagatggaaggtattctattttattatatagttggttaaagagcagaaatattaatagtactttattaggtagctattcgattaagataaaaaatttttctcctttcaacaataaaaaatcaatttcaaaaaaaaatatatcaagaagaaaaacatcttttgcgccatatcccctttttatggctaagagattacttatttcagtcattttatctgtaaaaattttgcaggtacacttttctttacctatttcacttattcatgcacaggatactgggtatacaggattagcagcaataatagtcggaagaatcctaaaggtccctgttatagtctcttcacatggtataaggcataaaactatacatcacggattaaaaagtaaaataaagggaattatttacaaaatcgaacgaaatttagatttatttacaataaagagtgcggatgaggtgattgtagacaatgatgctataaaaaattattttgagcagattgttaaaaaaaggatcaaaaccattccgatacctatccagctagacaaatttgaatattctttatcagataggatagcaataagaaccgagctaggatttgataaaagtacaagtgttattggattcataggaaggcttgcccctgaaaagaatctcattaatttactaacggcattttcaaatgtattacatagttcttatcaagcaaagttagtactcgtaggtaccggtcccctggaatctaagatgaaaaatctcgtgagtaagatgaatatgaaagataatgttatcttttgtggtgttagagttgatatcaacaagatcctttcaagccttgatatattcatcctgccttcatttgtagaaggtacgtctgtagcattattagaagctatggcaacggggactccaataatatgtagtaaaatccctacaaatgcagaaatcatttctgaccggaaagaaggcattttaattgatcctcataatccacgtgaaattgaaaaagtaattattgaattgcttgagaattctatgttaaggtcagaattgagctataatgcaaaaaagaaagtacttaaatttgatgtcaacatagtattccctaaactcattcaatcttatgataatcaaataggaggaactttattttgaaataaattagttcggttattttgaactttattgacaaatggtttgttatgggtaaaaataccatataaatatcaagaggatttcaaccatataatcatacatactatttgcataaatattgcttttctgcacttttacattggatgaattgttaaacctgtacttccccgcacgatccattactcattcacacttttggatagaattaactacgtattatttgaaactgcagtagagattacttgacatatgtcaatttactaagctctggtaaatattaaagatactgggaaatatgtatttccaatctaaactttcagcatatttacttgactcaatattgcttgcagtgtaagttgagtttgtaattatagagtttaatccattataaatatggtctacgcttgattcatctatctgtgtcttattagaatatggatctaaaatttcaacaacacctcctacaggcgtatagactatatgaagacctgcattcatggcctctactattgttattggtaatgcctcaaatttagagggaataacaaaaatatctgacaatatatacaattcatgtactaaactcctaggttgccagccaaggacatggatcgatgatttacccttgacgatagaatttacttcattctttaattttccatctcccacgatgattatttcaatgttttcagaaaaacgatccaatagtttaatgacggctttacaaaattctattattccttttacctcttcaaatctccctctaaataatattacaaccgagctttctttgatcccataattctttcgatagatttgtcttttggcttgatttactatatatggtaatgtttcgattccattcggaactgtataatacgatgttttattatttttgccatatctctgagcataattagtaatcctcttggtcaatcctattaccgcggaggtatgacttagtagaactttaaatacagtattattgaaaagttcttcaaatttcgtttgtccctctacttttgcaggattcaatgcatacattccatgtaaagttaatacattaggaattccttgtctattggagataattaaaccagcccaacttattggataatgatgcccatgaacgtgaactaggtcgggtttaattttcttcatatacttatgtatcgaataaccaaagtccattggaatactaacgctttgtaaggtggggtaaggccaaggtggcaaataaatggaaggtattctgtgaattggttctaatttttcatttttattcctcaaccgatctgttggacagataacattaaaatcattccctgaacgaacggtcaattcggttaaattccttacatgagtagaaattcctccgaaatgtggtggataaaatggggtaatatgtaaaatcctcatatctctaagtcacctatataatttgttactaaagtatgtcttaattttgaactactttatcaagattgtctcgctttgaatggtttctttaaccgccatttttaccgcatctttgctatccaacattggtttccaccctaaggaaagtagtttagaaatgtccaattgcatttgtctaacgtcccctttccatcccctgccattttcagtattatttatggcaaattgcacctcttttagagataacatttcgcaaatgatcttagctattgacagcgagttgatagtatctgtgttaccaagattaaatatctctattcccttggaggaaactgtccctttaattattccattgatgcagtcatcaatgtgcaaatatgattttgattggtaaccatcgcctaaaatttccaaaagagatgaattgttttttaatttgtttaagaaatcaaagattattcctcttctacttctcctcccaacgatattagctaatctaaaaattttagcttccaatccgtacatatgacaatatgctgatatcaaggattcgcaggcgagttttgatccaccgtaacttgatataggtaatagaggaccatagctttcttttgtgggtatctctttgggttcaccataaactgtagaagaggatgtaaatattattctttgtacatttttagattttcttatagactctaacaatttaatagttgtcacgatgttctcatttatagaaagtaatggatcatcgaatcctgttcttacatcaggataggctgcaagatgaaatatggtatttatctccttgtgaatatccagtaaactattaattccatcaatatccgaagatttgaatataattttatgattagaatcccaactattgatattggtcatgcttcctgttttgagattatcaataacatgaattgtgtttgcaaaagtcgataatctttgtgctaaattactgcctataaaccccgctccgcctgttatcaaaatgtcgtctagattcactgaagatgatgatgaaagcgctgatatttttaccttgcgagaaattaatagtcaggatggtatgaaaatatcgtagtcagatacgtacccgtaccagctagacagttttaggcaattttaaaagataccatggagggtatattacatgattagtagaaaatggactagtgagaagaaggctatcatatgctctttagcgcaagaaggatatcaccaaaggagatggtattaggaaacaaagcattatcatttaaaattataaactttctgtatcaaaattcttgtcaaaatttagttgaagttatcattataataattttgacatttcggtaacgcttacgataacagaacttgtcgttggaaattcaatctcttctgttgaattgttttgtatagctatatcggtaattgagctttcattagtagatttaatatctgcgtggtattggcataaattgccaggatctgaaagttcgtcaatagattctagagtaactgtttgaagttggttaatttggcccatggtgactagtatgtctgtattattgtcttcatcgcaaggaagttttgcagaaatatgcccttccataattttgtatggtgaagaatcgtagatatgaatatagttattggatggtatactcatgtctccgagcgttatagactcagtatcactagtgataaatgattctctattgtttaattctaagtttggtttggtgatttgattaggcccggtagttgattgttgtgtttcgatattttgattaaatgtattctctatttgagtcgagaaatcatagaaattaatatcatgaatccttccataatataaccctgtgatgccatcgatattcgtatcattatttccagcaaattgagtaccattcaatcttagtccttggaaaccatcttcagaagtaagcgcaaggttaaacgtactgttaggttgccaatttagtccagtataaatatagtttggttcagtcgtaagacaaccattggcaatttctacaaatctgacgaaaatatcatcgataaattcgtgaacaccggccattttaaagttatcaggatcgatgtatgagtaaataatatatacataatttgaagcattcggatggatctcatttatcttaaaagtggttgtgatttgggataaattttctaacggagaagggttaattataatattttctactgggctggcggtactgtttcctgtcccaccttctaataatgaggaagaatcgttccatatcccggagataacctgccaactgttaaaatcaccttgcatgttagaattaccaagagaaattaaggatgattcaccttcttcaatcattgttgaattatttgtacccatgttaccattaatacaagttaagctactttgggcaaatgtttcagacaaaagataggaagccgagtatgataaaactgcagtaaataaaaataaaaccaaaatatttcgatatatcattgtacaagattatgaactaacgaataaaaagatatcgataaccaattagatgttctttgaaaaaaataagtagtatgtcataaataccaaatgtatatttttatagaattaagtcatatcttttttgtaaaatgtttggagaattgtgagatactgtcaatagaagcaattctctgtccggttttgcgtgaagtcaagctcaagttatgttctcatgtaaataagtcccatccttgttttattatttttgttctccttcggaggtaaagattcgaagtgtggagataagtctccatataattgaggctgggccataaatcccaacaaattcggaaattatttctgacaggaaagagggtaatccttattgatccgggttcaaatgcaaaaaaaggcaatgtcattcgatataaacgtcgttttccctaactgattattcttataaaaaactaacgggaagtcctctactataacactttcaaattgggtatcttgaacattattaaattaatgagtttattaattgtatacacgaaattcacgaaaatactgcatgttatacccttgactatgagtcactagtttatatttaaagcctaagtacatttctttttaacatagtctgaggtttaatttaaaagataaaattttaatttattagaattcacgtcgagaatttaaaaataaatctgttgagactaattgactattttaagttttagcattgcattaaacaaaaaagtataaagattctagaaatgtcaataagtataatatgaagaaccacacaagtaccattcctattataatagtatcgccatcagaatttccaggatcgtctggtgatacttataactttttagaaatcattgatcaatttttatttgaagggttaaaggtaatattaatatgtccaaaaagtagcaaaaatgatagtactgattttggaaagtacaatccaaatttggaaatagtaagagtaaattgtaaaccgcctagattaattgagttagacaaaggaattgaaataaaagactattttaaatttgtctggttcttattaatggaaacaattacagttttgagaacaattaagacgaagaaagttaagaagttatttgtcagacacagtatactaactatgcaattacccattttctttaagttgttaggaataactactttggcagatggggagattgtaagtgacacaataaagcacctatttcccgttatatttctgaaattattctctgcatatgagaaaaaaataataagattatattcgtattttaaggtttcatcgatttctcaagtaaagaatcttgagaccataggatatcctaagaatagaattttgattatacccataagcataaacacagaaaagataactagattcaagctggaagaaattcctgaacacacttttggatattttggcggtttagaaccttggcagggtattgatgtcttgataacggcattcaaattattagtcctaaaaataccttccgcagttttatatattataggcgatggttctttgttaaaagatcttcagagaactgtatcagataacgatctaacaccaaacatattatttgtaggtaaaattaagagagagaacctctggaaagattattttggtaaattcagagtagtagttattcccagacagaaaatgaataactcgatagatactattatgccaattaaattgattgaggccatggccgcaggcaagcccataatagcgatggatatacctgttatgagagaaataataggaaatccgctaatattaataccatctggagatattaaatcactagcaaatgcgatgtgttccttatcaaaaagtcctgaagaaatgacttataggtccagtctatctataaactcttcttcaaactatgacgtgaggaacaatattaaaaagatgatttcaatcatgaagcactaattttactttactgataaaaatcagaaatttctattttaaatattaaatagactgaataagatttaatatctattcgcatggcaagaactatgtctaaacattctgaattttaatttaactcattattcacgttgtttagttttatcagaacatatcttaaaaaatagaattaacaacaaaaagtcttatttgggttatatttatcaatacggtatttttgatagtatggtatttccaccaaaagtaataccattatcagacgaagcacgaaacatggggatctgggtaccattatcgtatttttcccaccatgtaaaatggatagtttggttatcaacgagcatacttggctttatagaatccaccgaactagataagctcaaatttgttttgtaagaaaaaccgtcactcgtgcgttttgtgtagaatatttcagatttcccatccacaatttcttcccacacaatatggatatcattattaccattaacaataagaataggctcatgcaaatactgaattggtgattgttgggtagtactataaatattatcaactggtggtttggttgcatttaatacactttcctgaagttgtgcgtaagatgattgataaatcattaatgtagtaattatcgctgaaatcataataaaaattccaatgaaggtatttgtacagttgtaattcatataaaataggtgtcgagagttatataaaaacatgctatggggggtaaatttatccgtaattgtctttcattacattgacaatatctataacctcaattcttgctcataaagagaatgaaaatctcaatatagtgtgaggaacttgaaccatatgataatttaaattattattcaccatatgcgaaacaggcactaaacttcatcaccttgacaatttctcgcagttcttcaaacaatttacaaaaagatgtatctttccctgattctataaaaaatatattctaaattttggaatatattattgagatatgcctcaaagaatagccaagtggttatgaatatctttttatgtatcggtcctaccttgttgcatgattcacctatttccccaaatatttagataatctctttccatagttcatgtgaaatgatcaggataatgagtcactagttagaagtggcgaaatactacttggttttgacgtcatagacaactgggatatagaattagcagacatgaacagaggtaaactagtagaaccatttcactacactgatacctttgttcagatgttaggatatgccaaaacatactttcatctaccatacagacaaacagaagtgtaacagatgtggctaataatatggtcattaagaggccaaaatcaatatcaatgccgtcatccaatcctaaatcaggaagaagaagaggaagaggaagacaaaatctaaatttggataaaggatacaaatctgcacaagaagaacaagaattaatcaaacgaggttatgtattacatataccaatcaagaaaaagaggaagagaaaaggagaagaagaagaggaaggaaaagtgatgctcttccgtaaaaaatactctccaaagaggcgggttgtagagagaacaaactcatggcataacaggtttagaaaactgtttactcgatatgagaaaaaaggttgagaactaccttggactggttcagttcccatactgtataatcatccatagaaagttaattgtgggataggccctaaatcaaataatgatggacttgtagtagtggatagagttttaggtgaaggagcgtatgatagtaacgatactttcaaatatttgtcagagaatgggattataccttatataaaagtcagaaagagcttcagggttagaaagactgctcatctttttaggaatttgtctgtgatagcacaaagaaacgactttgaacaatggaaagacagcgtaagctatggacaaagatggattactgaaactgtgttctcatatttaaaaaaagtatgtttggagaatatgtttattctatcaaaatgaaaaacataaaacaggagatacagcttaaagtattactgtataacaagtttatgtctctttagcgacataaaatatgaattacttgtaatctggatggatcatgcaacagagcatatacatatactcagacaatgatatatcgaaatattttggttttatttttatttactgcagatttattatgttcagtttcctttttatgtctgaaacatttgctcagggtgtcttatcatgtataggtggtaacaccggtgcaaataattcaacagaagagattgaatttccaacgacaagttctgttatcgtaagcgttaccgaaattgcaaaaatgctataattatatcaaactcgtcttttttacacaaattttgatatagaagtcttaactcaatacgatattcttaaatttctttcaagaagcatatatttatatagttatctagaataaaagttacaattgattcgttcttgtataactatttcattttatttcacgatattcgttatattgtcaatcatttcatacgtcgggactggagaagccgaaataattatatcaatagacaaggaaaacctaccagttgtagactatggcataatggacggtatccatataggaaaacaatataatcctgttactgtttctcatttttcttacaaatatttcgatgaatatatcaagaataataatcaaacggccaaggaaatctttctaaagcatgccgattggctagtcaacaactctctaaaaaaggataaccataccttctttgtgtataattttacatttccaccatatagtttagaagcgccatggtactcggctatggcccaagtaaaaccagtactaccattgttgaatgcatataaaataacacaagataaagtttatttaacaactgcaaaaaatctattaaatgtactttttattgatattaatgatccttgcaagtgcggggtaacttataaaacacttggtaatggatggtggtttgaactatatgccaatggacatgcaaatggtccaaaggtattaaacggcatgatgtttactctggttgatatttatcactattacaattttacgaaggatcgcgatgcattatacttatttaatcaagggatactatctctcaaaaataaccttcataattatgataaaaatggtacctactcttcatatgataaaaataagggaaacgctccgacgttttatcataaagtgcatctatgcttattagataaattatacaatattactaaagaaaatttatttaagcaatattttgttaactggataaaatcatacaacgaaccaccaaacaccgaaaaaataaatgaacattgctttgccaccccagttaacaagccactttattaaaaaatgtcatatttctcatccaattaaattagatcgattctaatgatagtaagatatgttttccaaggcgggaatattatttctcaaagctatcgtaatacaaatatcagaatattgtcattacgatactctaatctgaaatagttctcatcaaagaatttctccaccccctcaaaatatttaaactcttttataggaagctgagtaaagaaagtatctcctctgagccactcagaagttcttggagttataacaattgcggtatttttaccatggtttgttaaaatgctttcataagcataagttgcattttcagaaagcaagacagatcttacctcactagcgacagttagattccaaccaataccttcaatatttggcctattggataatccacgcatctctataactgttgaagggtcggaataaattttataattttcggggatattttctttaatccattttgacgcatcaagttcctcaaatgtgtaagttgttaaaggatacccaaggctcgttaaagggtctgtataggcatcaaaaggtactaacagaacagggtatatgaatgcaaatactattataacataaatagagagaatttttgaatccttgtggtgtgtttgaaagatacccagagaattggttaactgaatggatcttaatttttcaattattttctttgaattcttattttcgatgtctgtttgtgatgcatttgtaggtctcagttttatttttttcatattgttatagaacatatgactagttttgaatttttgagttagaatgataatcggcaacgtaaatgtggttacagcacctaaagctaaaaaagccctctctaatggcataatcctttggatatcactaatctgttgaaaataaattaaaagcataacaacacctataaaatttaaaataacaatttttttgtctttatagaaacttagcaaaaagaaaccaatagctgaagccaatagaatctgctcagtataccattgttccagatgccttacctttgtaggggtctcaaacatgtcataagtcaaaaaagttttatgctcaataaaatccaatttaaactggaatgtaacaaagcccaagcaatatgctaaaagtatcaatgaaaaggcaaccgttaatagtctaaaaataaaaaacgatctatcctttttagatagatagtagaagcaaaagatataaacagagagcgcaaccactacgatgaaacctatataggaatgtatcagtatgaaaattgcaaagatagtgactgtaaacaccaaagctaccattctattggtatcgactaattttttccacagataatcaatggaaaaaatcatcaatgggaaaatactcataacaaatgaagatggataaaaaaattgcaaattactggcaaatgccgtttctgttagaggtaacgcaataactgtaccaaatattgcttgtgtattgttctttagaaaataacacagcatgacataacaagataatgaaaaaagcataccgataaggattgatcccatccaaaaaacagagtttaggtcagcatcaaatgtagaggaacctaaggcaatagttatatcaaatgttggaggataaacgagcaaaacctcatccgaattgtccaaaatgttctgaataacatacatgtgattaaaaacatcgattcccggtgataaagggtacggagaaaatgaacgaatgtacagtgcaaaagtaatccctataattaatatcaaaactattctcaaatgatattttttgaaggattgcaatgatttagaggattcaaacacaaagatagctgctatagaaatgaataacaacaatggtccaatgatacctataataggaacatcagctgtaaacaaagagtacacaattgctgaaacggcaactatgccgacaaaccaatttaatatgtgtattacaatgtctatagattcaatacttgaatttagtctttttaaatatcttctagatatttccagaattaaaaaaccaagagcatatggaacgtacaaaaaccagcataatgaaaggattgaggaaacatatgtaggtaaatcataaaaccgcgacagaataaaaaatgcaaccaaaatcaatcctacaattttatttggagagaaaaacttcataattaatattagttccctgacttaatatcagctgaaatatttttgccgttgtgaaaagccaatacaatcaataatactattatgactacaaatataatatctttggggcttccaaatgagattatggatttatagatatctaaatgtgtaataacttcgaaaataggtgcttcccacagcgtaaaggttttttcagagagtattttgatatgcaaattatttgttgaagcattttctgatttgctcatttccatgatattccaattatttgttgctacaatatcatcatccgtcggatttgttatgaattcctggtttaagatctgtttaaattgccaatcatcgaataaaaatctatattcactgaagacaggaataccctgaaaaacgtgtccgtttataaaataagactgtccatcatttacaagtgcaggcgtatttacagttgaattaccaagatctattctaaactgaaggatacctatttgggtgtcttgttcaacaattatatttattccctctaaatatgaatagcgatctccatttagagaaattaattcggtaagatcaaccagatgactggaattgcttgaaattttctcataataagtgttatttagccatccctcgtagcctaatctaccgttaataaagttaagaatgtattcacttttatccccaactaataccaactgtatagttatttgagctatttcaggatatttagaaatgaagccagtattcattgaaatatatctttcagtgtatctgagtggggaagacataaatcctgctggattatcagaggtacccccgtcaacatacaataatgtgatgttctcatttggtccagaaaaattataaagatttaagttgtgcggaaagccccacgggttgaattgtatttcttctgatttcgaattatttgaaatcactatcccatcgtgtataattgccggtcccgggtctaaattctgaacaaattggataggatatggataattattagcgattagcgattcataagatgccaatagttttgtctcatttacaagctgttcctttttgactgattctataatatctgaattttgggcatatactagttgaatggataaaggattagtacataaacaaattaattgtgtaaatagaacaaagaggataactataatacatgtaaccctgataatagaaatactaatattttttttatctattatcaaatattcgtttatttttaatttttctattttgtatatttcagcaaagaccaatttacatcactacaagagtttgctacttgtcaactttctttttattttctattatgtgtactagccagctgagtgaattggataccctaattgggagcaagtttttcaaatctattgtatctgaagtgttaaatatatttaactttataaatagaaaataagacaaaatcagggcaactggaattgcaataaccatgtgcaattcaatcaatttgagtattaagagtattaaacccggtataacaaaaatgtaaatgacgtctctccactgaacgataaattcgtttttcttcgaaacttgcaaacaaaagataaatcctataatggttcctactgtataactaatggctgcaccagtcccttctagagctggaacaagggtaaaataaagtatggttctaggtatatttgaggcaagtcctatagttaaaacttgtttgtaatttccgtacgagtaggctagattatttattccagtagtaagcgtcataggtaatgtggataggaggagtatttgtaatgtaaatgaaccagtgtcataaacctgtccaaacaaaccaagaatttcttttgaatagaataatatgcaagtggaaataggtaatgaaactatcaaactcagtttgattattcgccatgtaaatctttttctcccatcttgcatcgaactttgtataggataagcgatggtaaatagggcggaagttaatgaagtaacagccatagacagagaaaaagcaataaagtaaacacctgcttccattgatccatgagtaccaaatactagtaaaggcccaagatgagatcctatggtgtatataatcgtgggaatccagtttgctaaacttgagacgaatatatctttatagtattttagaacgttttcccttgaagttttcatttccgattttatcattttaagtaaaacaacagaataaagaatggatcccaatatgggtacaaagacaaatccagtcattattccaagcgcaccgttatcattaacaactaatgcgtatgccaataatattttaacaagagttccaacaatcattgtcaaaggtagcattttggtatctagtgaggaaataacaatagaacgtgatagagtcatcatagctgtcgacgctatcagaataagcgataaaattaataatgaaaaatctaagctaaaggtttggtagagccagctttgtaataaaataaatatcatactaaccgcaattataccaagtgacgtcaagataaatgatgctttcacaaatttctttgtaacatctaaattattttccaaaaaacttttgcctaaaaatcgttgaactcccattggtattcctatcgaagcaatagttgagaaaatcacagtcaacgaaattattgtagacgatatccctatagtctccggtgtggatatct

SEQ ID NO: 19 - DNA, 3077762 bp, Candidatus Nitrosocosmicus epidermidis (residues 1,538,882-3,077,762 of 3,077,762)
  source 1..3077762: mol_type = genomic DNA
ttgacattataaaccaaaagatataacctgatcccattgaaatcatggtttctaaataaataaataatgcaccttttgctacaacctttttactcaactgagatcatttcaagaaataggagtctcatataataaatgttatatcagatttggaccttattgattgctgaaccctttagagagctcaattaaaataatcttctaatatagttagatggtcaaatcttacccttttataggatgcttaaaatacattcttattcttacagaaacaatgatattcattaaaatacaaaacatgttttaaatagtgcattagcatcagatttgtttaattaagttgtctatagattgaacataatcaatctctttaatgattctaaaaaacagaacatattcaaagcatgaatactatggattgcattgtatttgtaccgtttgtcgaatctctttcttactaaatcctcttgatatatcatcccgctatatgaaatcaactataaagtcttgaggttgatttaaaattaacctctataaaataggatttcagaatttcctaaacacatgacaatctatgaaattaggtgtgaatatgcatgttcaaagtcacagtggagactttaagtaagcaaattctccttatatattgagtgtttctggtcaattagttttgacaatagtacctttttcttagagatttgatataatccctcatgactatacgaataataagcaagggagggagaatctgctaatatgggagagaagaatgatgaaaaggatagattagatctacaagataaattagagccatctaatatcaacaaggttgacgaaattgcggtagacccaatgtttctcccatacataatatataataacaatcttgatgacctattgacaaagtatggcgattttgataaggtcatggcgattgttataggtaccaaacctgacttttataaacaggcccctgttctaatcgagtgcgtaaaacaagggctgccatcctttattatttcaactggacagcactatgacgagttacttggatatggaattaaggaatttgaacttgataacttcattgcatgtgaccttcaaattagaggcgatttgattcaaaaatcgagtgatctcatgctcaaatttgcgcattttggaaggcaccttagaactcggctaccgcagaaagatttgttaccaatagtccatggcgacactttggttgcaggtgtggcgaccctttcttgggtattcggtatgggtcaaaaagttggacaaaatgaagcaggcctaagatcaatgagtccttcaaacatcaaatatatcaagatcaatagcctcccaacggaccttgatgttgaaaattttataacagaccagatttcaaaaaaatggtttattacccgcgaggaaccttttccagagcagatagatacctggatttgttcatcgggaacgaaattcttttttgcgcctaccaaactgaataaagaacatttacttagggaaggttatcctgaagaagatatttatgtggtaggaaataccgtggtagatgctattggattaaaaagaaggaataaaccaaaccagagcatatttgaattatatccaaaattggaatctggcaactggattaggatggacatacatcgtagggagaacctgacgactcacagattcaaggctatcataggtggattgatagatttaattaaagacacagactttaaagtggtacttgtcttattaaatggcactatatctgctcttaacaaatacgatctttattctagattgtcgaatctacaggaggattttcctgacaagtttctaatgaccaatttatggaaagaatatggtcatgtaattgaattcctcgatagtggtaaatgctgggctgaaattactgactctggctcgatgcaagaagaactgttgtattttccaaacgtttgttcttttaccgttagattcaatacagacagacctgagacggtatttaatgctaagggtaatctgttaatcccaccaataaacagatattggatacccaagattgtatcttgtgttaacaataaatacgaagacctaggattcaaattcaagtcaaaagaaaaaatatatgggcaacccggccaagtttcacaaaaaatagttcggttgatgaaaaaggagtttgaaaagaaggaaggtaattttttcccttggctccatcaacgattaaacttttggcatgaagacgatgaatttgactttctctaaatttctctgatccaaatagttttatgataattgattagaaaaattttgttgacctctgatacaaaatttaggattaacttaagagaagcaacccatatggctgagatttgactatccgttttcatgatgactggccttcttacaatagatctgttatgacgcgtggcgagattttttttgtatggtattcttgatacttggggttctgaattagtggtattgaccaaaaataagtaaggcaaaccatttgaatttccaggttcatttattctttcattggtaacatacgccattcgtttcatctatcttacagacaaactggaggaataaccaaggttataggaaaaatttgccttcgaatacaagctatggacttgctttaacaggttcaacaagttagatgtcgatttggtaaaagttaggatagatgattatgatgatcttattataacaatagataggacaaatatcaaggtaaacaatagaggacaatgaataaacaagaaatgaaattacagaataaaacaagctaactcaagatccatgttgcagtaaacgtaacgaccaaagaaatctgtatgtcgaaggtaaccaatgagaagggacttaatgacagaatactaaggaaactagtaaactatgttttaaataattcaggtgaataaaacgtagtaaaaaaatgtacttttagctgatggagcctatgattccaatgcaatcttccgggatcttgaggataaaaagataaagcaggcgataaaggcaagtagcgactccattggtttaattagaaataccaggaaagaaaggaacaaataggtaatacaacaaacaaaggatttactgaaaagaaagaagaaaagaaagtatggatacagatagttttctgaatgctcccttttcatctatcaagaacatgtctggagaacacatccatctccaagtttcaaaacacgctaaaaatatgatgcttaaagtttcatagtataactagttcaggagaatataataccaattatagaaattatcagatatcacgaatcatgcaacaaagcaataatatatcgcttctaacatttgattcgataaagacttaaattgaaaaatcaaagggttgtttctattgtcggcgcgagacctaattttataaaattaaaaccaattcatgatagacttagaaatgaacttcatcatgagattattcacacgggacagcattatgattatagattatctgaaattttttttaatgaatttaagttaccaaagcctgattacaatttagagataggatctggcctacccggtcttcaagtcggagaaatgataaagaaaattgaaagaatattgaccaaaaataggtacgacttggtcttagtttacggtgacacaaattcaacattcgctggcgcctttgctgcaattaaatccaatatcagagttgcacatgtagaatccggattaagaagctttgacaggaggatgcccgaggaaataaacagaattttaactgacaatttaagtcattacttatttgcgccgacaagaactgcaagtcataatttagagagtgaaaatgtatttggaaaaatctatgaaactggagatttatcagttgaaataatttcaaaagctaaaaagttagcttccaagtccagaattacaaaggatttggatttggatcctaaaaattatatcatattcaccatgcatagagccgaaaacacagaaattgatgccagtttcctctccatcataggagcatttacggctttgtcagatgtcaaaatagtattccctattcatcctcgcaccaaaaaaatattaaaagaaaaaaagttatatcaaaaactaaagaactgcaaaaatgtattaatgattcctcctgttggttacattgactttacccatttggttaaaaatgctgataagatcataactgattctggtggcttgcaaaaagaagcctatttactttctgtcccatgcataaccatcaggagaaacacagaatgggtagaaaccgttaaggagggctggaacattttgaccgataccaatacggagaaaatagtatctagtgttagaaaatgggtccctgagaataaaactcaaaatcaaatttttggagagggaaatacgtcaaaggctattaaagaaatcatcctaaatgaaatatttgattaatttaggttaaacaaacttagaaataatttacgatagaatgtcttatttgtgaagatgttattaaatatcttgtacactcttttttcatcatctatcattctagtcaatgttgtgcataattgtaaatttccaaagtattaggtagaaaataagatagtaaatgagctcaaatgctcaattaaaggttgtaattcatcctaaactaatagctaccttctttgtttagcttttgttattccataatacctcttgacatgaggtctatacatatagtagatgatgacggagttatagatcactccaataattgatataaactgcccatttacaacattgagtaaatagccagctgctccaaaccctgacagtaccagtaaaagtttccacgaccagttcttacctctatacaatccataagcagtaaataatgatgttactcctaaaattaacaaaaaagcgggccccataagataaatcccacctaaaggcagtaacaaattaaaggcgtaaattgacatgataagaagaagtataccgctaattaccgtcaataaagtaattatcaaaattcctctaggaagctttttctttactttttccacttttttatctaaaagttgtgggaatataactttttaatagcagcattaaaaattttataaataatcagtatcaataataaatcttaaataagcttataatcaaaattttttatggatttcaatagaaaattattcctcgtattatcgctcatagtagtgcttcccctttctgtattaacttcaaacatctctattgctaacgcacaaaattatgtaatcccagaagaaaaacctaccatctcgacaagtggaagtgcagagagggaaattgcttcggatgaatctagaatttcattagccgtagaaaatactaatgcaaatgcaaataccgctagaaagaataatgccgataagatgaacgccatgatagaggttctaagacaagctggccttaccgatgaaaatattaccacatctaatttccaaataacacccaattacgattatgaaaatagtaattatgatagaataatttcatacactgctatgaataaagtagaactcaagacgtcggcaggtgtaaatatctctaaatttatcgatttagccgtcaataatggagcaaacagggttgaaaatatagactttgtcatctcaaagaaaacgttagatgagaacagcatggatcttttaaaggaggcttttaaagacgctaaattaaaggccgaagttttagctagagaaggcaactttacagttgcaggtgtaaaaaaaattgatgctagttcagcacaaggatattccccaccaacctatctttacgacaattacgctgctgataccgctgaaaaaatgcctgctccctcaacccagataataccacaaaagaataaggtgaccgtcaccctaccagtagtattttatataggcaatcaaactgggtagtttggaatttttctatccatctaaacttttggtaccgataaatgtgagcagccagagaccagtcttgtcagcctacctacctttctatctacctactacctatgaacgaactaaacactataatattaaaggcccgcctaaaaacttcgatttaaatacgcttttttttatgatatatgtagataattacttatttactagattataaatgatagtaagaccgtttgttagggccacttcatcctgcaacttgataacagcaagccacaacatagcccccatatttttgacttctctacttcatgatagtctccgctttttatttattgcacaaacctttcatagaaaagaagcgactatcttggtaggaaatattagtctatgctctgaaagaatataaatcgatgtaagcagggtgtttagtgattaaataggattactgggtacatggctagaacatattaatacctcgtaagatgtcttaacttttaaaaaaccctaccttccatataataagtgtcatacgcagcatctgtagcgactttttgccactgcacagcacaaatcgacattacttatgaagtctacttgaaggtcgaggaaatgactacgtattatataatttgacattataaatcgcaacttaaatgacaaaataccggcaaagtcttggtttcgatatcaatcgaaatcttgctagagtcatgatactcagccggattggcccctttaaccagggcgtatagagtgcccctagctctcaaaataattgatttatgggccattaagtaccaaaacaatgtcaaagtatcttacaaaccagatgatttaatcttcttaacaaatgaataaacctctctgtaagaggtccaaatacttgattaactaaaaacgtaggtatggctacgcggttaaacatttaaaagacatatctttgaaaatctgacaggtataattgaataaaaaactattagatattctggtttgtccttttgacaaggtatccacattagaactaataggttttaaaaccaattctaatgcccaaacagacgtttctcacccttcttctctaaacgatcaaggcgctgtcgcaaacgatcaggtttacaaagacaatgacgctgacagtaacaagaataatcagcaattgccaaacagccgttctgttttatctgacgaaattatccaagagggactattactttgtaggacatgtatgagattttatcccattactgaagagattccgataattcttcctgatgaactcagagataaaaaaaaggacattgagtttttacaaacttggaacaaatcaattcctgaaatcctcttaaagaatttaaaaccatggaccatatgaaatcgtatcggtagaaagaacacatatacacacaacatcttaaactgttgtctaaatttacagattattgtattagaaattaaaggttcacttgtgactttgtatgaattctctaaagacatataacattcagttgacatccccattaaaataaccaccaaggcaagttcggcacactttgttttacatttcttttgttgttactgatttgtgtgcaaatctttcatgcttttgtaatctcgttttagataaggtcttgttacaatctttctcctcctaagagaattttaatgcactttggatagccatggctggtgctggtgacagttcttccttcacttagcatcctgtagtagaggatcctatgaaatgataattagcatttctgtttttattatcattctatattatcattctacacagtcgttgtgggtggcttctaatataacaatttttttgtgctggtaaaatcaggctacatacattccaaatgaatctgcgcaccttcttacttaaacaccaacgaggatcaaaattttttatactatttgataatacatattctagattgaacaagtcaaccactttgtcagtatttatcgtcctagtattgtcaacttttgttgaatactacttacaaaatgatcttcatgccgtgtcagcaactatcgctgatcctaaagataagctcatgccattagacatgcaagatatgttgaagaccactcaagctcaaaatgaaacagcaaagaattcctctactattggtgggggttctgctgctgatgacagtccagacaatataaataattgcgaaatgcccccatgtcctcctggacaagcatgtatacaaagttgcccctaattttgaatttaaaattgaggataaacttatttctcacttaactatttattaaatattttataattattttatgcctcaacacaagagttgattcaatatcaataattctttacatagataagtggttctctgaattgatctttatctccagtaaagtaaccattaccatttccatcacagggtgtcgtagacaaagagccgccatttactaacgcattacggacagcagatggagaagcatccgggttagaggccatataaagggctgcagctccagcgacatggggtgatgccgtacttgtcccactcatcgtagcataactatttcccttataagttgagtatatttttgcaccaggtgcagcaagatccaatacagagccgtagttgctaaaactagccaatgtatcatcgtttccatatccagtaacagcacccttagacccacattttccatcgctatctccaatagcagaaattgctagcacatttggattatttgcaggagaaaatgaactggcgtcctttcctgcgttgcctgctgcggcaacaaatgttattccagctttaactgagttattaattgcagtatccaaagcagctgatttacattcacaacccaaacttaaattcgcaacctctacttgattagcgtaatttgtgacataatctattcccttaattatagtagagagtgcgcctgaaccattcttatctaatactttaatggcccatagtttagcacctggagcaacacccacagatcctatggagttgtctttggcagctgcaatccctgcgacgtgagttccgtgaccattgtcatcgttagctggggaggtagttgttttgcctgaaccaaaaaataaagaccagcctccacttgaggatgtttcaaaagacttttgatggtaaatattcaaatctgaatgtttaagatcgatacctgtgtctagaattgcaatgtccacatcaacagtaccggctccattcccagatctggtagagctaagatcaccgtcaattctattaatcccagtgggtaatgtttgagcaaaagcctcagccattacatctttttctacatagtcaaccattggcagttgttctatgatttcaataactttctcatttggcacacggattgccaacccgtttagtacattctcataactctgtaggagctcaataccttgcgtaccaattttgtttgaaatggttgataaaaagtcggatatagttgtatcatcatcattaaatactacaatatattgaccgggtattacattgccagtagaagtctctacgtctgaaagaaatgcagatggaatatcagtataatcaccaattaacggtaaagtatctggaattttcagagaagccttattcatttcgtttgggttctcattttcgtcactataaacagtattaatcagattagaagggaatggaagagatgcagactgggttttagattcctcattattagcttgcccttccccgtcatttctgtcaacagtatctaatagaggatctgtatcgtcagtgttctcttgatcatcaccatcatcagaattggattttggtataatgtttgtaactactgtctcaaagtcaataatagaagaactgtcttcttgttgaggagaattattatcaaaaccgaaatttaggaagggtatatcaggcaagcctatgttaaatgcgtcaacactctgaacaatgcttgtgctaaatatactcataaagatcattaaagaaatgagaacggatttagcatgttgacggcttttgcaattcacatattaatattgaagcttgatcatttatgaaatattgaaaattttatcttctcatagtttcagatcttgattatacaacactcaacaaatatcaaatactggtatagttttatgatagataaaaatactaacgagaaattaatttaacgaattgacaataacaaaatctataatatatagaatgattactttaggagaaacaaatccgtattttgcagcctgaaagccaattatattaagaagtaacgttgacagaattattttagaatatttataaatcactataaaaattactataatctggattttaaaaataaaaaaaggtcttattgttgacctaatgcgttgttgccgtcattcaagttaagtgagaaggctaagttattgcatgatgctactgtatcgtcaccagaaccacattctgataattggaatgtttctgtattttgaccgattccttgtactgcttcatttgatttctttttctttttatcgccatggtggttgtctccgcctgcgaatgccatgttctcaccaatggttaggactgaacctaccaatgccgctgcaacaaagattgacaagattgatatttgaattttcttattcatgcaagatattgtagcgtattatataattggattgtttaatcagattctgaaataatcttactaaatatgattcttcaataaaaattctccataagattcagtacaatatattggttgatccttggctcagtgatagtacccgtttcatgttttacttgaaaacaaaaatcattcacacggctcttgcatccaaattaaatgtatctaaggggattttttgcgactataataggttaaaagaacatattttatgctagatctcctggtaggacattgcactatgtacgaatgtggtgtaatcttaatgaatttggttatggggccattctacagctattttattttaaataaatgagccgttcccgaagccccattaaacactcaattagataacaattacaaatgagtttagtctccctgtttaaattcctgacaatgttggctctagtttgactcgaacggagtgatgttaattatattactagcttcttaccgttgcatacattttttctttagcgagtcatatctgtagtcaaaagcaacatcataataaataaagaaattagtcaggatggtctataataattagtaaagggtggtagtttcgagttgaacatcattagtccatatgaagttgtagaataatttaccagattttatatctttttattcttattgaaaatatgcgtatactattttcatccctctcaaagttataataggacttaaatagctgaccttttttgaattaatattgaacaagaatttcatacttgtgtttgtcttagtattatctgctaccgtttacgtcaattattcagcctggattagtgtacatgcgcaaaatagcggtcctcaaaatggcgatgagaatcccataatcagtgtccctgacagtccagtagtttcagaagcgactggacccgaaggttcacttgtttcttatactgtgtcggcaacaaatgctactggttctcctcttgaagctacctgtacaccgcaaagtgacactatttttgcactaggaaccactaaagtagattgcactgcagtagacgaggcaggaaatgatgcagaagcctcttttgatgtattagttgaggatacaacgcctcccacaaccgagcttggaatcagtaaaacagactggatggggataataattaacgatgattttacaatttctgatgacattggatttgcatttactggttctgacttggtaggagtcaaaggctttgaatgcaagttagatgatagtaactggcgtccaagcaccgtagattaccaaggtaatgacaagtctggttgctattatttggaccttgaagccggaccacatacttttcaagttagggcggtagacacatcaaataataaagattcgaatcccccatccttggcatggacaatcataccccttgaaaattctataataaacctacgtgattttgtttcgacaatcattatgcctccaaatcttcaagaagaattatcagattcactaaacaatgcaataggcaatatccaagatgacggaagctacgatcatctcatttgcgaatatttggattcatttagttacagtttttcaaaggcttctgttttagatctgtttgatcaagacgttactaattttgtggataactcatttacagcgattagggacagaacaggttgtaaccctccagtaataagtttagagaatgaaataacaatcgatgaaggacttaacggtgttatcttagacgcatcgggtagctttgattcaaaagacggcaatagtctaacgtatgaatggagtcagattgcagggttaagagtagatttgtttgacattttcaaatccaaggcttctttcaatgctccacttcttgaaggaacttcaaatcaagtcatagttttcaaggttaaggtgactgataaaaatggcttatcatctgaaaaaagtatcaaagttacaattcagaatttgttaccgttcaatcaaccaccggtagctgaaaaacagagtgtaactgcaaataccgctgatccaacagaaataactctcaaggctacagacccgcaaggtaatgctttgacatatgctatagtttcagagccacaatcaggcaccatcacagaccttaacgaagaaacaggtagtttggtctatacatctgatgctggatttacaggacaggacagtttcaccttcaatgccaatgacggaacagtggatagcaatacagccactgtaacaataacagtaaaccaagtcaatcaaccaccggtagctgaaaaacagagtgtaactgcaaataccgctgatccaacagaaataactctcaaggctacagacccgcaaggtaatgctttgacatatgctatagtttcagagccacaatcaggcaccatcacagaccttaacgaagaaacaggtagtttggtctatacatctgatgctggatttacaggacaggacagtttcaccttcaatgccaatgacggaacagtggatagcaatacagccactgtaacaataacagtaaaccaagtcaatcaaccaccggtagctgaaaaacagagtgtaactgcaaataccgctgatccaacagaaataactctcaaggctacagacccgcaaggtaatgctttgacatatgctatagtttcagagccacaatcaggcaccatcacagaccttaacgaagaaacaggtagtttggtctatacatctgatgctggatttacaggacaggacagtttcaccttcaatgccaatgacggaacagtggatagcaatacagccactgtaacaataacagtaaaccaagtcaatcaaccaccggtagctgaaaaacagagtgtaactgcaaataccgctgatccaacagaaataactctcaaggctacagacccgcaaggtaatgctttgacatatgctatagtttcagagccacaatcaggcaccatcacagaccttaacgaagaaacaggtagtttggtctatacatctgatgctggatttacaggacaggacagtttcaccttcaatgccaatgacggaacagtggatagcaatacagccactgtaacaataacagtaaaccaagtcaatcaaccaccggtagctgaaaaacagagtgtaactgcaaataccgctgatccaacagaaataactctcaaggctacagacccgcaaggtaatgctttgacatatgctatagtttcagagccacaatcaggcaccatcacagaccttaacgaagaaacaggtagtttggtctatacatctgatgctggatttacaggacaggacagtttcaccttcaatgccaatgacggaacagtggatagcaatacagccactgtaacaataacagtaaacgcagtggagccacctgctgagcctgaatctgaagatgaacctgacactagcaattcaggagaagataacacacctccagcatcaaatgacgaagataacacaccaccaccacctgcttcacctaggtcttctaataatacaaacagtagtaatactggcctgttttcagatggatttcccggctttgaagataatatgaggaatttatttggcaactaacgaacagaaattatgaacctgctcctctatgaataactttggtcgtcatgctagagtaccctgttttttgaaagatttgattttaattttttaataaataaatttcacataaagcaaaagatttgaaatccacaagtattttattccaaaaaataacaaattagataaaaatgtctgtcaaataggttcagtttgctaagtcttataatacattaacctcaaaagaggtaatatactttagtcaatatttttataggttaatttgactaattttttttctaataccgagtaaacaatatcaatatctaaaacaagaaaaacatatttacttggtttcatttccatgttgacctcgcaaagtcttacaaactatttataataattaaacaaaagacatgcaaaggatatagttaagattttaagataaaatttatttggttaataaaaaaaaggtcttattgttgacctaatgcgttgttgccgtcatttaagttaagtgagaaggctaaattattgcatgatgcttttgtatcgttaccagaaccacattctgatgattggaatgtttctgtactttgaccgattccttgtactgcttcattgctggttctcttttttccgtcatgatgtgattttttatctttcttcttatcatcatcatcgtggtcatttccacctgcgaatgccatattgttaccaactgctgctacggagccaattaaggctgctgcaacaaagattgacaagattgatatttgaattttcttattcatgcaagatattgtagcgtattatataattggattgtttaatcagattctgaaataatcttactaaatatgattcttcaatacaaaagtgttttaaaattttaatgtacgatttttgatactctattatgtcgcaaagttgttttacgctttaaaatgtaaagttattattgtatactgatcagaaactttgataaacattatttgtaacagtttatcaacgtccatgtagatattataaatattttgactgtacaattacaaaattaaaataaagttggaattagtatttttctagtggtttacaacattcgatgaacatctcaaattaaatttgtacgtggacttgtgggaagaataactatccaaatggtatctgagactcaataattaacattaactgtaaggtaaaattatatgtatatctttagaaaataaaaaaaacaaaagcgtcagatacctgcaactttatggatactcgaggttcagaacaggacgatatatcagagggcaaaggtaaatccaatagaaatttttttatataatataaataaggaattaaagtatttgctaaaaaatcatgtgataagtttaattattattgtttcgatggttgccatagctaatcttgtctacttttacttgcaacaagtaaatgaaaaggcatccttggatagcttacttaatcagcacattgccctccaaaatcaatctggaaaatccattgctaatagtattggtacagacttgggtacaatgatgaatatgattgaaaatgttgcccacctcgaatctgaaaaatatgttatatcatctgctcctcaatataataacataagcaatagtactttaaaccacatgctagattttcttaaccgcgaaataaaccacacctacgacatcgttaaacaaaaagcagacagactatatattgtaaacaactctggaatagtaacaaatagttttaccctcccgggtgaagacaaatttttggggctagatctatcttttagagattatgtgaatcaaactaaggagagtatgaaaccagtttattcagaattgtttacgggagcagacagtaaaaacagaataaccttaacttatcctatcctgaaaactttcggactagatggagctaatcatagtggttttgacagtgaggagacaaacaaatcaagcaattatcttggattagtagcagtatcaatgcctgtttctgaaatgtttgacagatacggaaatatatttaatattgagacccaatttcttgtcggatatgataaaaatgggactattatgataagtccacgcagtgaatttattggtaaaaatttcatgagtcccgaaatacaagaagttattgacaaaggtggcgtttttaataggatcataaatagcttgttaaatggtaacgaggatcagggcctttacactactgagtcaggcgaacgatataatacagcatttccaatatttgttgatggaaacatggcttatgggttggctgttgttacccccactaattcgatatatcaaagtatgaatgaaatcctccataatgagaggattcaaagtgcagtattgtttttcacaatgtctgcaggagttataatagtatttattttattaagaagttggaacaaagatttaggcaatgaagtaaaaaaaaggacaatagagctagatgaggcaaatcatagactagggattgttaatgaaaaattagtagcgtctgaaaaagccaaggaagaattcatatcaatggtcagtcacgagctaagaaccccgttaatgccaattaaagcttatgcaggtatgttactaaaaccaaaatatatgggtgaaataaaccgaaaacagaaaaaagcattagactcaattttaagaaacgtaacaacaatggaaagactagttggagacgtgctggatgtatacagactagagatgaataggctaagactttctttacaggaaattactgtcaaaacgcttcttgataatgcaatttctgaatttgaacaaataattaaaactcaagacagtgaaaaaaaaattcaactaaacgctgaattgaaagtgagtgaggatttaaaaattcaatgcgatccacaaaggattaatcaagtattgggaaatttaattaaaaattcgattgactttgtacctgctgataacggcaagattaatgtaagtgtggaatattacaatgattcacaggatactgatcaaaagactgcaaataagagcaataaaattcttattactgttgaggataacggtccaggcatcccacctgacaaaatagatagtatgtttaggaaattttatcaaatagatacttctttaacacgaaaacatggaggaactggattgggtctagttatttgcaaaggtattattgaatcgcatgaaggtaccatctggatagacagaaattataaagagggtgcatcctttagatttacacttcctatttagtttttaactgatttttatacacctttttgctctgaagcgttggatcaaaatactcattttttattcagcttttaggcattgaacgaaccatcaatttatccaaataaccagaataaacttaatataataagctgtactcgtcatggttattgaaggtccttgtaatagatgataaccaggaaaatattgatgtagttactttttttttagagctaaatggtattacctgtatttcagaaaacagcggaaaaaaaggactggagactttaaggaaagaaaattttgatttggtgttgcttgatttggcaataccggattttagtggtattcaaatttttgatatattaaaggaggagggaacagtatcagaaaaaaatattgtcatttttactgcttcgttagtagatcaaaaagagatagatagattattaggagcaggagctaagggaattattcataaacctttagctgttgaagatctggaagaattaattaggatacacttgagaaaaaactgaaaaggttcttttcaaaaagattaacggataagagtattcgaggttagctaactatatattattgcttttatagaactagtttaacatataattttagtttttttttatacgaaagattaaatttcaaaccaagtaattctttaacagaaacaatatgataattctgacaaattttcgtcgtaagtataaacgttaagaaaaaaaatgaaatagtaaaaaagaaagagattactcttgagctaatgcgttgttgccgtcattcaagttaagtgagaaggctaagttattacatgatgcttttgtatcgttaccagaaccacattctgatgattggagtgtttctgtactttgaccgattccttgtactgcttcatttgatttctttttctttttatcgccatggtggttgtctccgcctgcgaatgccatgttctcaccaatggttagtactgaacctaccaatgccgctgcaacaaagattgacaagattgatatttgaattttcttattcatgcaagatattgtagcgtattatataattggattgtttaatcagattctgaaataatcttactaaatatgattcttcaatacaaaagtgttttaaaattttattctaacataatattccaccttttctgttcacaaaactagtttcttaatgatttatggttttggccattatacaaaaattcagattatacttgttactagattaaatataaattatatacataccctatatgcagtagcaccgttagcatacgaaatctacctttccattatccttaagaatgaaatagacgcaggtagaaatgaaattaggataaatacaactgtttgaagactaaacttgttaatcctttttttattatgattgattctgagaagtataatttggattatttattgatataatgatttcaaaaatatgtcaagttcacaacgaacctttaaaaagtaaaatttgtgatataatagtctaggttagcaaaatgattattaaaaaaaaagatgaattgagttgaattctagtattcccattagttacaagattttactctagttatttactctaagtgatcccgtaccgtttggatataattttacattagttgatgcgtctgaaaatataacaccaccaatttcgatattttctactaaattggggctattgattatagtttgagacccatcgacgttctgagttgtatttaccggatttgaaaataccttcaagtatacaggaagtgcactagttgtcgaattgtctaatttgactgtagctctcatagagattagaatatcggttatggtgatttcatcgctagtatcatttaaatactcatatgtcaaagggacgtcatttatcagaaccaatggtttgcctgtgatctgataatcggtgtcaagtcctacgggtttggaagaaaaattggctactagggttatattctctgtcccagtcaactgggtgtcgtttagaattgtacctccagtttcgtttgcatttgtcaagttatccatattagcaaattgctcacttagcgaggttgtattaattaaacctaaagtggaattaggcagttcgaggttaacggttgacgcattagaaagtactgaggagggtaaaagagaagagtttgtggtgtctgtggagtttgtggcgttgacaacagacaaagtagtggagtcgttttcgctagtagatgccactacagttgaaaattgtagactatacgatgttagcattaataatatagttaatgatatgaagcaaattatgcagtattttattcccgttgaaatagataaaaagtgcattaagaaaatacatagtctaatgcataattaagtttttagagaataggtaagaatatttgatatcagacccatatttatttaagcataactgtcctgaattgtcatttatcggttgaactcaggtataggttgattagcaataacaaattgccaaaattgtctcatctgtggttggactgtttactcactaatgctattcaaactttataaaaaaaatttgtatgagagaaataatgaaaaaaaataaaatttcttaaatattaggttgaaatcaacgactttgaaacttctattaaggcatttggattcgaaggatttggtgctaaagtataattctcaaattatagcatttaaggcatttaatattctagatttttaaaactacttgaaaaggaggagaaggaggagaaggaagaggattacaatactatatctattgaagaagaaatttggtaaataaagaaattattagcagatttatctagaattgcaaaagacaaaggcctgaaattgaaaacaaagttttatgatacaagtttaagcccggatttgggcagaactgtatataccaaaagagagggagtaaaccatattgtgagtgatgcgacagctagattacttaaaaacatctttattggtaacatagttacatctattgctaagatgtcaatgtgttctgtcaccgcaataaaataaatatccaaacccattgtgatagtactttaagaatataggattattatgccttttagatttggataagtaacctaggtttacaaattcaaattagtttatgactagactagctctatttccatgttagttaccttcttgcagtgcagctgctcaaattattttgtgggataagatggtgactaatactgactatgtgtataatattttagcttgaactatagatgcatcataattatgatgatgatgactaacagatgcttaggaagtaaattgaataaagagaaaatcaaaaaaacaattttaataaggtaaaatagtctatgtctaatgctacaaatacaattcggtagtaacctcatcagcttaggtttggtaatagttgacatgcagaacggatttgttagtaagggcgggtcctatgataaacttggtatgaatatcgaaaattaccaacaagttatcccaaacattaaaagactgattagtttttgtagaaatgaaaaaattccaatattttataccgaggcaattagggaaccaagtggtatcgatttattacttcacattcacaatatcctacccagagcacgggaagaaagacttcaaaataaaaaggtaccgatctgtatgagggatacttgggatgcacatataattgatgaaataaaacctactccagaagatcatattatcctcaagcgacgagattcagcatttcaagatacagaattaagagtttggttgcaaagcatacatgtaaatactttgattttctgtggaatagacacctcaatttgtgttgagacatccttaagagacgctttcaatttaggctatgacgttatcctagtgtccgatgcgacagcttctgggtcgcaaaaacactatgaaaccactatagagagagttagggactactatggagtggtgattaaaatcgatgatttaaaaaaaatgattaagacacttgaagatctaaataaggatgagatgcaatcaaatgatgaggagaatgaaagcattagccagttccttgaaaagcataatctgataaatgtaagaaaagaaaagaaataggctattaaacctaatttcaaattttataaagacttaaaaatgataacaagaaataaaattatagaaaaccaaaaatgcgtttgaagaacaagttaagaagataccaacaacgactatcagcaagacaatagactatctcggctctatcaggttctcaagtatatcgctttggattcaagagtcaatcaaacgatactaataaaaagatttaaaatcttctgtccaattaaagcctcagaataacttattcaatagtatttcagaattttatactagcataatcataaaaaaaatttaatacataatttccctttgatatagtaatgaagctatttttcgatggaatggctctaaagcaatctccttcaattagaaacacaaacaaaagtaaaagaattaatttgttatgcacctgtactcttctaatcctaatcgggtcacttgtcattttctggggtttaaaagatgtaaatgcccaaagtagtcaaggcggccagtttaaggtaatagtgcaagtccaaaatactggcagtttagacgagcacggggcacttcatgttgctattgacggttcccgtaatccccaaactcagggtagtttgatatttcctgcactacaaacaaccacttatacatttgaattcaattccgctgaagctccggtcggaaaaggctttaatgcagaagtgatttatggtgatgacgaaataaaaagagtatttggagttaacagcgcagccaatacgccagaaactgtgacattaacaattccataaaaaaaatcaatttatttgttaaatgtatctctatagtcaaatgggtatgaatcattgttactgataaagtccttggctttatcttaataacccatcttatgcctgcggcaaagaaatcacattttttccctctcatgtctttgatagccagcctgcgagcaaatcagtagtctaagccttttgctattctttcatgagcgaatactctaattgtctcgttttcaaagattcaaaagagaaataaaaagaatcattaaaattgaataaaatcattattcggttctaatgttttatatggtttttaaacttccaagcatagtaaagtttaaaatgatttgccatatcatcttaactaacttctgaagaaataatggatacagatcctctcaatcgcccggtattaacttatgctcatcacaacttcatattagtagatgaggaaattgatgcagcaaacgctgtaaaagtcatgcatgacaaaaaagccgaaactataattgtaaacaacaaaaaatcagaatatgtagggattataacagatagtgatatcttagacaagattgttatgagaggtgaggattccgacgaagtatccgtaaaaacaataatgtcatctcccattattactatctcagcaaaagcaaatgtaagacaggccttggaacttatgagactcaatctgatcaaaagaattcctgtaaccgataatgtccacatcttgggaattgtaacccaagaaggtttggctaatgctatcagaacttcagtgttagagaggcaatttagaagttatagagtagtgatcagggaaagatacaagccaatatggggaaacctaggttttattcttcaattttcaggcttgcttttcattgccccagccatcttggccaccgcgttgggtgaagttgtatctgcaacgggaatttttcttgggattacaagtatgtcagtaaccggattcgtcttgaatgcctatggagaaaagactcccatgaatctcagacaggcttctattctcatggtctttagttttgtcttactgagtttttttggaagcataccatacatgtatgtaaatccgtttggcgaaggaatagatccgttaaccttgatagtgaacagtttctttgagagcgcatcaggttttacaacaactggattatcgatgttagtttatcctgaagatctcccaaagagttttgatttttatagatcgtttactcagtggataggtgggttaagtttcgtatatttagtcatcacgttcttctatccagaacgaaagttggcgcatatgaaaggaatgttaggaggggggacactaaagttaaaacaattgattcttactatagccgtaatttttagtatatacactttagcattatctattttattatatatttcaggaaactatgatatcatttatactatttccttaatatttagttctgttactggcggcggcttcgttccttcatctacaactttggcgtctgaaaactttctagaactgtttgtaataatggctggaatgataatctctgcactaccttttgcttttcattatgctgtatttagtaaagaaatgcacactacaaaaatgcgtcccgaagttattttgtattttggaatcatactagctgcaattcccatttttacttaccttgtttatttatctgatcccactgcgaacgtgatggtagggatatttcatactgtgagtgctgcaacaactacgggctttcaatttatagacattacgcttttatcggatgacggtaaaattttgttaatagttttgatgctaattggaggaacagcgttctcgactgcaggtggaattaaggttggaagaatattacaaatagttcaaaagatgactaaaaggaaattttcggcagatgttacaaccagatctatttcttcagtgtcttcaagatacgatcaccaatatcatggttgggaaaaaaagtctgatatacataaggaagaaaagacatttaatgaagctatcattgttattttcctatttatctttatgtctttttttactggttcacttttatcaatccttacagaaaagaactttttagattcgctgtttgaatcggtttcagcattaactacgtcaggtctatccgcgggaataacaaacatcaacgcagatctaatttcaaaaacattgcttattataaatatgattgtaggtaggtttgaaataattgcggtagtttatttatttttagagatttcaaaaataaaaaagaaacattaacttgtcagctttttatttagattatactagtacaagcaacctttattccagtgtaatcgatcgctcatgctataacatccgacattttttgagaatgccgaaactctaagatgcgtcgtagaaaagttcgatttgaaatatttctccggtggatcattattagaaaatatactattattgcttttagtagcataattaattcaaggcataaatataaaaattggtgaccactcggatttaccaaccataaaacaaatccctatatacaaattgcaaaaaagaggaattaatacaatcaatgaatccaacccttctctgatcaagattccttatgctcgtgtaatcctctaacctaaaatttttgaaaagaccatgcaagattacataaaacgtcgcactagggatgtacaagaatagtcctgcctatgctaataaaatagaataattttctattgtaataatatagtatatacttttatattttaaaatccataataacacaatgaatacaattaattcattgaattttctgtttttggcaggaatattaacagccacgattggacttttgccactaatgaattcaaacgccgctcaggcccagacaaatgcaacgtctggtataaacacgaccaatatgaccggtggagacaacatgatgatgatgaaagataactatgataaatcaatgatgggaaaagaacataaaaaatatgaaaaaattaacggcacattaaacatgatggaaactatgtacgaagctattggagataaatttaatgtgacactgacagatgctatttctactgcagaacaatcagtaggtaatggatcctttgcaatgtccgcaaatggtgcagagaaagacggattccttgtctttgagatacttcttggctcacctgacatggaattttccaaagtattggttgacccaggaaatggtcaagtattgcaaacaaagccggttccaatgatggaatggatgatgatgatgcattctcaaggtcatggagatatgggaatgaaaggaatgcatagtggtagtagtactggcggtagtggtcaaggatatggcgactatggtatgggaatgaaaggaatgcatagtggtagtggtactggcggtagtggtcaaggatatggcgactatggtatgggaatgaaaggaatgcatagtggtagtagtactggcggtagtggtcaaggttcaggttggtagtacgataaatcccctgattttttacaattgacttttttttattaaaatttttgtttatgctttttattttgcgacacgacgtttggttttagattttttataaaattcctatcttagatgtttgcctgcactttttgttcaaaacctcgcagataattgtcaagtttttctcgcagataattgtcaagtttttctctcaaaccataggcattatattattagaatgatatgacatagataaaagatattaatgtctaatccagacaacaatggaccaaacaaaaataatataatactttcggaatctgaaattgaaaaaatttcaaagttatatcaaattgctttggatttaacctcattagatgatctaaccaaattaggtgatactggtgaaggaacatctaaatcagactttatcaacaaaagacgccaagcatggcatgatgttcagaactacctagaggaattaggaaaaaaatataattatgatccggaaaaatatgtgataaataaaattactaggaaattagaaccttataaacccaattcttaagttttttatttattcttcgatatatataaacattctcctatcataaaaatccaaattaaaggctacttttgaatccaccttgaccgaaggacaagaggaaagtaaagagaataagatataaaaagagagatggtagacgtggtggaggaaaagagagattttattttcgacatctactctttttttataagaatttttatcctgtatcttaatcttaatttcgagaaaaattattaatgatttcaataaagcatcttgtacctttttttaatagatcaaggttagtaaattcatttggtgaatgcattttatttggcaaaattgtactaccaacgcatatggaatctacatctaagatgtctttaaaaacatacataggaccagtacctgaagaggaaacattcaaaactataccattaaatatctttgacgcagaatctacaattatttttacatacctgttattcaagggtgttctaaaagatggctcaccacttaggtagtttatagttacttcgttctctgaatagccttttgatctcaaatactttactaacttatcgaactgcttgtaggggtccatatttggcactagcctaaaatctatcttgacggttgcggttgatggaagtattgtttttactcctttattggtatatcctgcaaccagcccggaaatattacatgaaggttcggttgctaaggctttctttatctcgtaagctgattgtctgttaatgaagcttgatataccatattcctttttgaacgcttcctcgttaaaaggttcatccgctattaattgcaattctttttcacttagaggcataacttcgtcataccatcctttaattaggattttcccgtcattggtgttatacaacaaagacaataggtatactaatctccaagcaggactggctattgctactgccaaacttgaatgaacatctctgttaggtccatgtaccgtaatttctacatttagaattcccttttgacctaatgaaattattgctctattatcgttatcaacatacccgctttcccatattaccaaatcagacttgaatttttccttgtacttttgcacatattttatcaagttggggcttccaatttcctcctctccttctactataaattttatattacaaggaacatcccctgtctcacgcaaaaaatattctacggcctttattctggtgatgagttcacctttatcatcggatgaccctcgaccatatattagattgccaattactttcccactaaaaggatcttcattccacctttcgactggatccactggctgtacatcataatgattgtaaaacaataaagtttttccgttgggattggatttagacctaacctcaccaaaaacaactggagcgatagggccgatagttctgttttcaacttgttcttctaggtctaagaataaaagttctgaatagattccagcatttttcattaaatttgacaagaggattgcacattcctccaaaccctgattagttgcagaaatgcttggttgtcttattaaaacttgtaaatcggatattagatcgttcatttgatcttcagtcaaagaagccggaagtaacatattatccaattaattcacctgcccccccaataaaacacaataataaagaaatcttccttgataccatatccagtcgactaatttatcacacaacattatctattaaaattttgttaaatcaattagattaaaatttaactaaaataaaatatagaaaatacagctataacaaatgttattaaaaagttctataggagtggagaattactctttgttttgtcccagacatgttggattatttctgaaactgtttgataaacatttccattgtatttagactcccataatctggaaacgtattcaccaggagaagtcttattttctagtcgattttcaagtattccaataaattctggtcccagtcccaaatcttttaatcctttttttgctacatgtaattgggttttggcagtttctgaaacattgaaatgggttttagaattgtaccctgtacggatcactgctaacctttcttctcgtatagaggatagtggtcgtaatggctttccctccaatattgaacgatacaggaatccaataaaaaactcaatcattgccacaatttctttaggggtcggctgaactgacattatcctagtttcaactctataataaggagaattcaaccgtatcctaagatcatcatgtctatctttttctagaccaaaataatcatttgtagcatcaggacctggtcgtgaggcgatataatctatataatcttcaattctatcaaggtattttggtatggctggaaatccagaattttgctgttctgaataatcatacaaataaatgcgtggctcataaagtgaaaatagtcttcctgcaaataacctactatttgagcctagtaatattgctgaaggcaataaatttaaaatataattgaacatgtgggtagtatagataggattcaacccttgtaagtgaagatgaaatccctgtattgctgtagcaatgttgcgggccctaaattcttggccatcaatttctatatttggaatattcttttgccattcatagatgttcaaatagcgctcttttcttgttatcaacttttttttaaatatgtctggagatgggtttcctccaagaaatactgggattacattcttatttttatagactttgttaattgcggtactaaggtagtctatgaattcttcaaaaaaaacatttatgattgacaaacgatgcattgaaattggagcggttttaacttcgaactgacactttccatattcagcatcaacatcatactttgagtttaattccttaatcagtggggatgcatttacgggcagtgatttgtcatcaagcaaacaaatttcaatttcaacaccaactctatagatttcatccagacggcgaaggtcatcttgaattctcttttttaacccaagagtttggtctgccaagatattgttcaattgtgttaaacctattagcgatttatgctataaatttctttatataattattaatataaattctaatataaaatttagataatatatattaaatatagtttatatagatctcaacgatgaacgaaagcaaacaattcattctatcacctactccatcctagttaaggtaatgtaactaattagtgatactctaaatgtggttcttttatctagttacataaatcgtaatctcaccttttaggagaaactattaggctacttatgatctatcatatgttatcatctatatctattagtaacggctttgtcttaaggttacttactgttacctgtttgtgacatttataacacaaagtcctcaaattattttcattatggaaaaattccagtacagtcctgattttattttctaatgtatcaaaattataacccaaaaaagtatagtaagatttgggtataatgtggtcgcattcaagccaattctcaatttttttgttaagtctcttctttttgtttagttttaatccacagatctggcaggtgtaattatctctttttaaaacgctatttcgaatattacgccaataaaaattcttattataccatttggtaaattccttgctgcactttcttgaacaatatttcctaaacggtttacaaatcaggttttcacaatcgttattcctgcatttttgtttgccttcttcgtctattctatcaaattcatttatgtatacaactaaatttaggcattttttggatttatcttcctttttgattatggttaactgaacattttctccttctttatttaatttatgatttaattgtaacgactttaatgatgtcaaatttgggccgcagggtttctttaattctttagactttttatttcctcttttctttctctttttgactatcatctaattataccttcatcagtaaatataatttatttgccttcaagtctatcttcgtatttttactaataagcttatggccacaaccagatggttctataggtagtatttggagtggtagtaataataataatcataataataatagtagtagtgatgttataattatagtatccgtattcgcaatattagagttgatagaaaatttatacaatcccacctgatttgtgagataagataaagtattatttctgctatcagtagaagagaaaaatataatcgctatataaaaaaagcatcttttgatcttttaataatttgatcgaaggcgtcccatttaatagtatcaccgttctccgccaagaaagtgccagaacctttggcataggtttctcccgatccggcaacttcactatttctagaaaaattggattcaaaactggaaccactatagtttggaacttttacataatcacgcccattgtacgttactaatgaagcattgataagtcctcttttcacaaaaaactgaacttctctgtttgtcgttacgttagtattctctactaaaagaatttagtctaggaatagagtatcatttgataaaagggatctgaaacaatcatttttttatatcgttattttgggttgttgtgcctattaaattgatattttcaggactgtactggaattttttattagaaatgtccttaccaagggctaatgtgcttgaatggtaaaatgcttgaaagaatgaaaatagcaaaaactgaatagcaagaaaaaacgatgcaataaacccaaagtaagaaattctcacatgtttcataattctagatcatattctggttttaacctctttaataattttatatcagctataaacatttaaaaatacgacagaaaaatgaatatctattaagtttgaagagcataggtcatagggattttccaagcaaattactgtttgcagttacttttatgattctgtgtataactttttctactatgatactaggcgtatatctttcgtccatacatcaaggatattcatgcaagacctggccactttgtcctaacggttttaattttcccccggaggaatatttttatgagcactatcatcgatttttggtactgattctatcgttgtcactattttcatttactgtgtactctttggccaaggttagaaacaggaattttagcctaaaactttctgtagcatctattctgcttagttcacagataattctcggatgggcagttattgcaactaaattgcatcctatcatcgtagcaagtcacctttcaactggaatcgcgttgtttggaatattggtggttacattagtctccttgcagcaccaccaccaccaccacgtcataaaatcataaaatatttgaacgaatttttgaaattattacaatctatagcttaaaaaaataaagtatatttctaaatttttgtaagtttaaaaaggtttaacatattaatttccattccaaacctatcctcactttttttcatatacttgtagattttaagtaattcaacaagatctctgattatattaaaattttgagatatccgcttttttataaagttatatacatttgtataaatcttgaaagtcgacaagacttcagaaaagtatctctccttgtcgtacaagttgtcgacaaatagttgagcacaaatagtggaggggattatgccctcgcctaacaatgcatatacggtccctatagattcgccgacaccaatagttttattcccgtcatcaaagggaaggcatttcgaaggaggagtaattcttactggcctacctacttttttgattacttcacatgggtattttttcatgaatgaatccataaaaatatgagtttgttttctgtggaaatctcctgatcctatatgtgcatatccgttgcctaatgggaagtaccaaaagtaacccgacaacaatggaaaagcctttaaataaaaatcatcaaaaggtatctgatcgtactttactttgtactgaatgcaagggatccataattcatcctgtaacttgggtaaataatgtctatgaaatcctgtggagtctatgattaagtcaaaatcttgctcaagttctttcttattcggtactttctcgaatataacatctgtcccagatatcatatcttggattagttttaatttatcatagcttatcataccttttaaattaatgtcaatcgtattgcccgaatctatcccgtctcctatatcgaccctcatcttttttccatcatgtaaaacataattatcaaagttaagaccacatgctttggcataacccttcattacattatcacaagtggcccaggcgcagacggcatcatgatcctttttaggcattctttcaaagccttgtacgtgtacatcgtgcagatcgctaagttgattcatcaaatatgcaccagcaactccaatcccaactacagcaatcctcataatattattctatactttctatgacaaataaattgatttcattatttgacagcattaatggatatgattaaaaacaagatttatcataatgaatgtattaaatggttgcaaaaagggctcccaaacaaaaaaagagaaaaatggccggcccattaagggctggcattgcattgatgatccttggagcaattcttgtaggattgggaagcttgcttaacagggaatcaatttcgacttatgggtttgtagtggttctcggtggatttttcttatactttgtgtcttattattatcttgatagggtacaaaaaaacaagaccaaaaatcaacactagctaatagcagtcactccaatctgatttaacaattgataattgacagtatattttaaaaaccatggaccctaatgatttgtcacctagaaaaataatggatgatattttgttcaaaagattttataataaaaacatgggaatatcatttttttataactcttccctattgtcccagaatgattcttcaggtagcgcggatgctaattacaacctgaatttaagaaataaagacctgcaatttaacatcatcaaattgtcgaccgaggcaaatattgggttaaaaatttttggtctagaaaggggactcaagtcatcacttggtgatatcgaaactttaatcaaggaagcgagaactctcttttatgagatcgacgggaataagaccgctcaggcaactacaatatatcccactgaatcaggcgatattaaaataagacgcttccttgtttcccatgatagtcagggatatcttttagcgtttcagaataaagtggagctttttgattcagaagagacccaagaaatatttgataccattctcgataccttcaaattcttgaagtgattgattaatagaagatgtaagctaatattgtggtagtagtatctttagttagaaagattaaataatttttccagatgtcatatcttaatcttcaggcagaggtgaaaattgaaaatagaatactattacaattacgaaactataagatataatgaatcaatgaatcgatgaatgtatgtataaatgattgactggccttccaatgactggccgtccaatatcaacgatttttatgtgaatagattaaatgaataactgtttagttataacataaaagaaacttttactattatatcaggaatcaggaaatggatcaattactgtatgagttttatttgttactacatcagtaaatcacgaactatatgctagaatatatatttatttacccatgatttttggataccagaacatttgcaaatcctcaacttgggagagaatgtttacgaggtagaattatatactacaggaaaaaagaaaataatgcataccgatgcttttcaaagatcggtttttaggattttttgaaaaaagcttgttgccatctatatttttttatgcttgttcattcaatatagatcgccggtttgaatggtcgggagaatcttgccttatttttaggatcataaatatcggggtcatcttcgtagtatattttgatatcagtatctttgatgccgaattccaaagatatcaatccggttccgtcgataagtgctgtgtattcatcaaacaaaccaatgtttgttctcctttcttgttctagtggagacaatgaaaggatatcttcattaattttctttataaagtcagtattgtttttcaccaaatttttattttctaaagagattgaagaatccgacagcaatgatttcataatgagcccgaaattcttagttcttgagttagccaccagatttagaactttattatacagaaattttttatcatttgatgacaaatatatataaatactttttatttctgtatttttagttaccttcaaaattttatgcaaatcaacaaggatattagaaatctcttgttcacattcatcggtaactggattaacaaactcactttctaggatgggccaactatcctgaaaaatagagcctttttttggtcctaataattcccacaactcctcggcaagaaatggacaaaatggcgccaacatcttgattcttgctttaaaaaaataagaaatgacaaaatgatcagtatcatttttatacatgcgatcagaagatttagcatcctttcttttatgataccattcaaaatctttatccatcaaatataacacggtatttagggcatctcttattcgcatttcatcaaacgaattggtaatatctttaaccgttatatttacacggtttagtaaccatttatcctcagcatttaattcaccaaaatgacgagataaatcatattctaaaacctttggatttatagtattcttttgctttgtagccaagtcctttccaaattcataaaatccgtttagcctagaatatatacccttcaatgttgaaaaggaaaaatcaacatcctgcagtaattcacccaaaactaacattgcaacccgtatggaatctgcgttaaactgctttatagtacttcttaaagggattatgttacccatggattttgacattttctttccgtccatcaaaacagacccgttgactactatttgtttgggccataatgactttggaaaaattattgagtgattaaatatgaaaaatgataaatgatttggtaccaaatccctacccgaatgtcttgaatctaagggataataatacttgaattcttcacgaatttgtctggattgaagtaaaaactcagataagagtgatttatccaaattggaatcaacctggatggatgttaaatcatctgagaggttatcattttcgtcaagtgcaaggtaataaccggattttatattcaaaagaacataatcaaaaaaagtattattaataaaattggaatatttttccaaattattcacattaatatatttggaaataatatagtagaccatgtaaataacagagtcagacagactttcgactatccaatctttatcccatggtaatggtgtacctaatccagttttccttgcacaagctctcactttaagccaatcaaatacgttgtggaattctttaattatttccgatgggattatttccattgtatttaaacattcaagagctaaagttttccattcaggattaccgtagttgagaaaccactggttgttcaataattttacaaaacataatgccccgcacctacagtaaactggcttgtttgtcatctcaaagaacggaacagactcttttaaagaccttaaacgttccttaaccaagtctttagcttttgaaacgagcaatccagaatattccaaagttctttggttcatttttccactataaaattccattgagtaaagttcagatgttgccttttctaaattaggatcattttgattggatatagcgtatttcttaagaaaaaccatagaaggaatcaattcatttttcaaatcatccacgactgtttctttgatttcaagactttttttatgagtatcataaatggtaacatgatctttataagcactatctgatgatatctcgtgttgttcttgaagtttagaatttactatcacaataggaagcagcgtgtctaaattgaaatcgtcagtgcaatctgctgttcttttttttagatctaaaagggcttgcatgtcaaatggagcatgagcaggaaccgacattacgattccgctgccttcattcaacgtaacgaaggtagcaggcaaaattggcatagctcgccctgttagtggggatacaactactaaacctaacaattcttttcctaatagtgtcctgactatcgttattgaataatttaaaaactctaatttattagcagcggctctacttaaaatccaattctccgtttcattgataaggacctttatgtactcttcgttgggatttatccaaagattagtcaccccaaaaatggtttcgggtcttagggtggctacaggtatgattacgtcatcatcttgaagtttgaatttgattaatgaatactctgtgaaagacggctcaatatcacctaaagtatcatgctggctaactggatttgagtcattaggacaccagccaactggatgggacccctgttctataacccgaaggtttttgagggtttcaaattgccaggatattagtttcttatatatcggatcaatagttgtaaattctcttctccaatcaatggaatatcccatttccatcattccagcctttatctcgttgtgaaaatatttagcaatatgaagtggatctttaaaactagatatatctaggtcactaattttgtagatttttctaaaattttctattatttccttgtctcctgcttgtacccgttttgccataccgaggataggggtacctgtataatgaaaggccataggaaagagtacattgaatccccttaacctcttatatcttgcatgtacatctgcaatagtatatgttcttccgtgtccaatgtgttgaggtgagtttggatatggatatgcaacagtaataaaaaatttcttttgatccacaattggatctgatgtattaattgcctctttttcccaaatttgtaaccatttgctttctattgaattccatatgttagactccatttccgcttccctatcctcatttaaacaacttatctagaactatttttaaatttgtaatctgattctcaaggctcaggttgtatgaaggtctgcaaaaagatgttgtatgtttataaagattcctttgaataatgctaaggttcgacttgagtaaaaataacaataacaataataaaaattgatgaatgttaagacaatttaatttcacaattctaaaaaatttatctcctcttatatttaggttgtcaaatcatttggaaagatgcaaagagccagctaaggagtatcattaatattttactctctgtctgtttgttgctgatggattttggagcgtgccttcccccattttattaaagactaattggataatctgttcagtagagtatgaaaatggattgaaagtttatacctaaacgattagtttaaaattgcaaagaaaatatataaaattgaaagtgtaccagaattattcaaaatataaaaatgggctggcaatcccattattgattggtacaattctattttttattttttatttctattctcgccttacatctcctggtgtcgaaatattcttgtctgattcattgtactcacttgctgtcacagtaatgattgcgtatttaagttgtattttccttttatttttaagcattcacaagtattttttttcaaagtcaaagattgaaaaccatcctgaaaatttactttactacttgcaatttccttttaggtcactaaagtataaactcatttttgtaatttcgagtttgatttattttattttttttggacttctttctaatatatttatttattttgtagacgaaaatactgttttttcaatatatcctattcctccttctgatcatgctaatgaagttggaaacggatctcatacgagtagtcatcatcaaaatgcttctgaaatagaaaggataaattcagtgcaaaataaaaacatactatacccttcatacaaactcattatttgctgtaattatattggctacctcccaatgctaatacttcagttaaatgaaagtttatctatcttgataatacctctaaatctgttaattgggataacgctttctgttctggttggcttgaatgttacgctaaatatattcattttaataaagaatcggacagagcggttgtctaaaagaaacctatttggagcggtaggaatttctacaggtttatttgttggatgccctacttgtacaggtagtttattttattctctggtgggctttagctctatggtgcttttatcatccttaaatatttaccaaatcttatttgtaattattagcataccaatgctttttggatcattaattttgatgatgaatatacttcgaaagacttatcttagatcttgtcagataaagtgatcgaattaaattaaatagtttgatttataatcctaaagaaaagtagagaattaaattctctagtttattattctttatctatgaattcatcaggcgaaggaggttcaggattgataccctttcttttcctcacatcagcaataatatttcttatgactgactgaggaaccgcttgccacgtcttaaaataagtgctccacattgcttttcctgcagttccacctctcatcagctcagacaaatcaaatgtttctgaggcaggtacttcacctaagattatagcaatcacccccttttgatctacgtttaacaacttgcctcgtttgccggataatatccctgctacagtacctatttgttcctgtggacattttacttctattccaagtattggttctagcaacactggatcagctatcaacatggatcccaacatagctcgtcttgtggcaggcattaactgagctaaacctctatgggctggatcctcgtgtggaacaaagtgatgtaatacaaagcgcaaacccctaacagattcttgagcgattggccctgaatgtattacatcttcaaatcctgatttaatcgaatccatggactcttggataaattgtactccttttgtctcgtcggaaagcatgttcccggttgggtctacagtaacgacactcctcgcatcatcggtactccaacccttttccctaaggagacgagacatttccttcttgtccatatcttcttttaattgacctgttctaatcatatcaatgacttcctcgctcaatggctctaccctcaaaaatattttattgtgtttattgggtgatttgctcattattggccctgcctttcctctaatggtttccctatagtttatcaaaggctgagtcgttttgatatctaatcctaattcttgcaacaaggatgttgcaatttcgaggtgcaagactcccatgcccgccattaacgtttccccagtttcttcattaatctttacaataaggtttggatcctcgacggttatccttcttaatccttctacgagttttggtaaatcttttggatgctttggttctaccgcgatggtaactactggttcagaaacatattttatagattcaaatgcaggaacgtttttaattgtggaaatagtttcacctgctacagcataatctaaccctaacaaggcaggtatattaccacatggaataacacttaccacctcccgtgtgttacccatataaatatttacggattgcacctttccgcttcgctttgcatctattagataaacttcgtctccgtcttttatagtgccagaaaatagtctaccagtggcgactcttcctgcttgcgggtcaacgttaattgttgttaccatcattaataccgggccattttcatcacaatttaaaagggcttttccaatgtcagaatctaaatcaccaggccaaatttttgggattctatatttttgtgccacatggggtggaggatgatgttggactaccatgcctaatacggcatcatgcaaaggcgccctttctgataattttttaattgaggtaggatcggtcgatgtgtatgcatcgtaaacgtctttgaagcttatcccttttttctgtgctaccttgaaattaaatccccatctatctttagctgatccaaatgcaaccgtattgccctggatgcttactttccatttttccttaagttctggttcagcatagagatctactaatctgttgaactctgcgataatattagatagccatttttgcattgctgctggatccaaacgtaattctttgaccagtctatctattttgttaatatacaagacaggtctaaccctttcttctaaagcctgtcgtgttactgtttcggtttgtgtcataataccctctactgaatctgaaactacaactactccatcgattgctcttaaggctctagtcactctaccagtaaaatcaatgtgcccaggggtatctatcatatttataacatattccttaccatcatcattttcatagaatagagtcacatttgctcctctaattgtcatttgtctattctgttctaatttcatggaatccaatgctaatgcttgtccagcaacacttggagaaataattcccgaagcagctaaaagactatcactcattgtggttttaccgtgatctacatgagcgataaccccgaaatttctaatttgatctttatttccaattattctgagaatatcttgagtcgatttaaacttgggcatcctatatttcaaaaaagtttttttagggttattaaaccttccttgttagttttaacgcaatcatttcatctaaaattgcgttaaactttccaatttctacgactatcaaaaaattaaatacaagtaattatagtttgtttaaaaaccaaagagaagatattcaaataatttagcctctatccgtataaagaagaattagtccatgtagagaacaattcttttgacgaattctgctattccttataacttatatgacaaccattgatctaaaagaatgttaattcatggcaatagagattagagtaggccatacaccagatgctgatgacgctttcatgttttatgcgatagaaaatgagctaatcccaatggaagactttaaaatcacacacaaggtagatgatatagaaaacttaaacaaacaggcaattaaccatgaactagaaattactgctatatccgcccatgcccttgcctttctcaaagattataaaatactaaacagcggaggcagttttggaatcaattatggtccaatcattatttcttataaaaaatcactagatgagatagcagatagcattgttggaatccccggctatatgacttctgcttatcttttgatgtctatagcactagggaagttaaattgcaatgagatgctttttagtgagataccgagagcgattattaatagaatagtcgattatggactcataatacacgagtctcagattacatatccgcaacatcatttcaataaattatttgatttgggagaatggtggaataataaaacgaatggattgcctgtccccctaggaattaatgtggctagtaccaaattattgaataatgatttaatcaaagcctttgacagtctgctcaagaattcaataaagtatagtctaaatcatctcgaagaggctatagaattttctacaaagtatagtaggggcacagagaaatcaacattgaccaaattcgtaaaaatgtacgtgaatgattatactgtagatatgggcaaagatggcaaagaggcaatttcgaggatgtttgatatggcacgagaaaactgcataataaatatcaagcctaccttaaattattcctattgaaaatgcatttcagatatgtacatatcttgtgttctcgtcataacagggcatgatactgtcggtggtattttatgtagtggcattgtgccagttaaagtctactaaatacaaatcaagtcaggacaagaacccctcttgagcgaacgtagaattttgaatcaatgtctaatccgaactaaatcaaaacaaaatgggtttgcaaaacgtactactttactgggttaaagaaagtatctctttgtacaggatttcgttttatttccctaatcaaaaatctcagctcttggattgatatttgatttggtttacccgcagccttaaaaatttcctctgaaaaagctgttccgaccaagtcatttcctccatagcataatgcaacctgagccaattttttgcctaaagctatccagtatactgagacattttttagtacctttccaagcaaaagtctagataatgctattattctcagattataagttgatgggctttcggaaacaaggatatgttctcgttcaagctgggtattttccaagctaaactttagagggataaatgttgtaaatccactagttttcttttgtaattgccttaattttatgatatgatcaacaatgtcttctggtgtttcaatatggccaaaaagcattgtacaattacctttcaaacctaatttatgagcctcataagctgtttctagccactcatcccctgaacatttgcctaacactattttgtcgcgtgtatgcttgctaaatatctcggcaccacctcctggcaatgcatctaaacccgcaatctttagcctctctaacacctctttgactgaattcttagttactcttgatataaaaaaaatctcagcgggagtaagggccttaattattacatttggaaaacgactttttattgactttaacatgtcttcatagtattccaaccccaatttaggatggaatcctccaactatatgcagttcagtggcacccaaattatttattgcaaactcggctctttttaccagttggtcattggaaagagtgtatgcatcatcatctttttcctttctatagaaagcacaaagctggcaactagcagcacaaacattggtataatttaagtaataggatgatacaaaactaacgtcatcgccacgaatttcttttctcaattggtccgcagcatttcctagcaaaaataaattttcatttttgaacaaatcgactccttcattaaatgtcaactcctctccggacattactttctctaaggcagcagtaggtctgactatggtattagacaatatagagcatactacgtaaaaaaatataagtgcttttaatgcctaaaccgttaatctaaaatcaaagaataaattataccaagattaagtttaaacaatcattgcaaaatactcaggttcatcatgacatttataaagactcagaaatcgaaaatacgatagacagaattctaaaagatcatgatattacgttaaatgatttaattttgttattaaaatcacaggagattcaacgtcttggattagtgggtaactctattagggagagaaggtatggtaaaaatgttacttttattaataatattattttaaattataccaatgtttgtgttacttattgtaagttttgtgccttctatagacctcctggacatgaagaatcatacacggtatcaaaagaagaaattttaaagagagtcgtttttgccaaggctaactataatatcaaacaagtcctcttccagggtgggcataatccaaaactaaatacagaatattttgaagacgtctttaggacacttaaaacaaaatgtccagacgttgcaattcatggactgtcagcctctgaggtagatatgatagcaagagtcgacaagacatctcctctagaggtattagaaagattgcagaaggtgggtcttgaatcactgcctggagcgggcgcagaaattttagttgatgaagttaaagacatcataagcccacttaaaatttctagccaaacgtggttagatatcatggagaaggcgcacaacataggaatgaaatcttcagccacgatgatgtatggaactgttgaatctgtggaacagagggctcgtcatatccttaaaattgcagacctacaaagaaaaaccggtggatttatggcttttatcccttggagttttgaacccaataaaacagaaattcaagatagtgggctggtacaacaccctatggggggatttgaattgttaaaaatgatttcagtatcacggattgtcttcaatggtctaattgatcatctccagtcttcatggctaacaaatggaattggaatggcgcaattggcaatttatcatggttctgatgactttggaggaacactcataggagaagaagttgtaagtgccaccggtgcaagatccacagaactattgtcaaagaatataataacggccattaaagcaatgggatatacacctgctgaaagaaacaactcgtatgacgttataaaacatttttagaaagaaaggagaagagctgcagacaaaaatcgtaattaagattgggaaggaatactagcaaaggcctttataaatagatttataaatctattttcattaaggttacaattgtgtcagttggaatagacgacatggccatctacgttccgaagctttacatagactataaagactttgctcaagcaagaggaatcgatccacaaaaactagaatatggtataggaattaaaaagatggccttggccgacgctaatcaagatcccgcaagtatggcagcaaatgcttgtatgagattaatgaagaataatgatcttaatcctcaagatatagggagaatttatgtagcgacggaatcaggcttagatgaatcaaaggcaatgaattcttttgtaattgggatgttagaacaggtttatggagaaagtactcttgaacatgcaggtggtattgaatgtaaatttgcttgtgtgagcggttcgtatgccttatatgataacactaattggattcgtgcaggagaaaataacgataaggctgctatagtgattgttagtgatattgcaaagtatgacatcggttcctcaggggaatatacacaaggtgctggcgctattgctttgctcataaagcaaaatcctaggctgttatcttttgacgagaaagtcacttccaccatcataaaaaatgaatatgacttttatagaccgtttggaaaagaaactccgttagtaaatggcttatattcaaatctgctttatctgatccaggtaagaaaaagctcttgagacttacaaggaaaaggcaattaaatcaggcataattaaaatcggaaaggatgaatcagttatagatcatattgattatatcagcgtacatttaccctatagaagaatgggcgaaaaggccttggcttatttgctaagacatgaatggagatacttgcctagatgggaaagtattatctctgaaataggaacacaagaacctgttccgaaagaccccagaggtacgattgagtcgatcttggctgatactgagtttatgaaagctgatgaaaaatttagaagagagttcatgaaaactaaatattataaagaggtttatgacaataaaatgtcctcctcgttgcaggcctcggctgtgataggtaacttatatacggcctctatgtatatgggattgcgaagtttattagaatttgaatacgcaaagggtgcggatctatttaataagcgaataggatttggttcgtacggtagtggttgtagtgccatggtattttctggtgttatccaggaaaactataaagaattagttaagcgtatggatttagaaagggatattggccaacgaacgaagatatcaatagacgattatgaaaaattacataaaaacactcgtaaatataacgaggcgttcctgaatgcagaggatgagtttattcttataaacattggcggcgtcactgccgaccgagccggatttagagagtattgctatgcatcttgatctgtatgtcataatgtgcgaaaatatatgagccactagaataaatatttttttagattgccatctaatataataagattagtcatttaataactttataatttattttttgtttgctgaaaagatcgaccagcacgttggactgctctttattctccaattctaagctcagatacactccagctgtccctgcgtgaatatttgaaccaagtctgtcgtgaaccacctcaactatatttatattcgcttgtgcaatttcatctactatatttttcaaagccccaggtttatccttgagctcaataaatattttcattaatctacctgtttgcatcaatccctttgcaacaacttggcccagtaaatacatgtctacattgccgccagataatattgatacaatgttcttattttttgatataccatttctattcgaaattaaatatgctagtgatgcggcgcctgcaggttccgttacaattttagaacgttccatcaataaaaacattgtctttactattgcaaggtcatctactaatacaatatcatcgacgtagtcttttattatctggtatggtaattttccaggtgattttacagagattccatcggctatggtatagccttcctgaaccttgctaatgttacccgtatcgatagcatttttcattgatggaaatgctagagattctaccccaattatactaactttaggattaattgtctttatggctaaggacacaccagctattaagccaccgcccccaacgggaacgtacacctcatctacattcttcaaatcctcgagaatctctagccctatcgttccttgtccagcaatgacatgaggatcatcgaaggctggcacaacggttctaccttctttgattgcgatttcatttgcatatatggatgattcatcatagctattgccttccaagattacatttgcaccatatgatttggtagctgcaatcttcgctggggatgcattttttggcataattatggtacatgacatattattcaaagctgatgcataagctactccctgagcatgattccctgcagatgctgctataacccctcctttttttgcatctttgtctagtctatcaatctttgttaccgctcctctaactttaaatgaaccagtcttttgataacactctaattttagaaaaatattatttccgcacatagtcgaaaatgtattggatcgtatcagatcaatttttctaattgacgacttcgacaataccttttgtgccccttttatacagtctaaatctattctgaaaatttttttctcaagtaaagggtaattcaacgtttatttaaatttagttcctgtaattatgtagtgaatgcatgtatgaattattataacttcgactaaaacacaaataactttattttttctaatctaaatctgtatttaactcctttttcatcaagtcatgtaaaaagtataattcattgtttatagcatctactgtttcttttggtattttttcaaaattaattactgaagtcttttcttttgtttttttattctttatcatttcaaaatcgacataaataaccatgccattttctccctgcagcattttattttgatcaagcgacgctaagtcaatatgataagtttctattatcaggttttctagttccttctttagctttgttatttggtcattgttcttttctatatcagggtaattttcctcaatggatgatgctttctctacaagatttcttgttaaatcactctgtgtaaataattcttcaaataactgagtattatcaacacccttataacctagcttttctaattcctgttttattatttgatcaccttttactgtaatctcactttttgcactcttgttaagttgttctaattcacgaattttttttgatatttggataacttgtttatcaatttgatagtataataaagaatgaaactggattcccatatatatataaaaataaaatttatcaatctctaagctcaactggaaatacaatctacggatatcgtcagattttgttgactgtatgggtacactctgccaattcttcgatttggtgtttaccattttctcaaaattttgaaaaagagatactatcctgtttggatcaaaggatttggtttctattactgaaaaatcacccaacattacttttgtctcgatgtttacgatgttattccttatcgagtcttcaaatacatttttaatattttcataaaattgatttaaaagtatgacaatatgttggttttttgtcttttctttcagcggtaatcgcatttgtttctatcttaatgatgactatttaaaatttgaatttatctatgagacatcaatagattaaaatatcatcctacagacataattgttatgccgacagcctatatcttgattaattgtattttaggaaaggaagaagaaataattaaacaaatatctcaaattcaacaagtaaaggaagttcgtggaacatatggtgttcatgatatgtttgtgaaaattcaaactgatacagtagacgaaatgaacaatacaattaccaatagtatacgaaaaattaatggaataacatcgactgttacattggtctccatacctgaacaaggcggcagaggttaacaggtcattatttcttaatgtgtagaataataaggaaactactaagtcccacacatatccaacctacagttccaactatcacaaaaatataataaagtgggattaacaaagcaactgccgataaggctgcccctaaacaccacataaaaagcaaaatctggatatcaatttcagaagctttcaatttaaccccttatatcctcgtcgtaaccactgatagaattaacaattttaccacaaattctgcatacattaaattcaacaaattcaagatcatcatatttcctatacgaaaaacggtcatcatgagtacaaaaaatctcttttattctctttatcatttatctcacattttaggtcgagactgtagtgccgccggtgagatttgagctcacgacagctcggtcttcagcttcaccctgttattatttaacagtcgagtgctcttccaggctgagctacgacggcacattctaaaatcattggtttatagtatatatattattgctttaaaccctaacggatagaattgttaggttaaaaagatatatttaatttttaaataaaatttgaccttaatcctaataaataaatgagtataaaataaaggattagctatgacagataaaaacgaattggatagttcagctaatgattcatcttcattattagaaagtccggaagaaaagaagaaaagattcctaatggagtttgagaatccatttaaatgcgataaatgcagtgaacggtttaaaaagaaaaaatacttaagagaacacaaagccgaagtgcatgcctattaagatatctttttttataacatgtaattttgcgccattcaatctcacacatctatacttattttaatatagaaaaagatgaaaatatatacaaaaactggagataatggcgaaacaagtttatttgatgggactagagttaagaagtccagtagtaggatagaatcttacggatcagtagacgaaattaacagccatattggtatgctaatgtctttaatgaattcgaaaacaaatttgatagatatagtcagagatttatttataatacagcatcaattatttactctgggcagtgatttagctaaccccagtcaaaagttggaaaattatcctcgaattactgatggagaaattgcattcctagaaaattgcattgataagtttgataaagaacttgaacctctcaaggcttttatcttgcctgggggtacgattgaagcttcgcagtgccacattatccgtaccgttacacgtcgtactgagaatcagagcagttgatttatacatgaatagtgaaatcagcaaaaattgctttgtttatattaatagactttcagatcttttttttatcttggcgagagtttgcaatcgaagacagggtaaggaagatgtgatctggaaaaagtaattttattaatctattaattaatcaatttttttaataacaaaaataatagatacacatcctcatgttgatgtttggatggtcttttcttcattcataacaatcagacctcagagaatccgaactgtagaagataaaggtcatctccatctattaggtaactaaattttcttaatttcaaatttgactagtccaccctaacaatgcatttgcttttcgtgctcttagtacctgcagcatcaatctcctatgctaccatctgagtatatcaccgtttacctctataactactggaagcctctattgcaaaaatcattattcgcaatagtcatattagcgaatttaatattttagtaagcacgctttgacagataaacactagatactactaaatactactagtatattgtcagagacaacttgaacgaagcggctaattcattcgatatgaaaagcgttgtaaaggaccacaatcatgatgaataatcataattttaccgaaataaaggaatcgttgatctaaagaataatcaaatacaaacctgtcaaatgctttaattccaaacatactagactgttaattacactattcataataaaaataatttggttatcgtaattatggtaggtactttaatactttcattaactattctataaaatttccacatgtttactagaaatggtatactagtttaaaaattaatataccatctgtaggaacatctcattacatcatctatagcaaggcctgagggtaaatataattgaatcacaatcctctaaacggaaatcacatctcaatttacgtctcttttttgttttgttctattgatggtaatggtactatttggattagtctgcttactacttcatttggataacagttcgagctgtccttaattcaaatgtctaggttaggcttccaaattgtatagatctaatgaagacaagattgtgttgaacaatatcaattaaataacagttcaggttagaaattgatttaagaatgcgaataaaataaccttgcaacaaagcgttttcacttgagtaaaacttatgacaacaatgaaagaagtggtatttaataattggacgctatttcacacatttgttcgtatctcttcacaattattttgagcaacatccttttctgcttttctaaaatctatgataacatcgtaaccctcaccacaatcaaagtaatccataccaagtcctccttccaatacatcatcccccaaatcaccatatagtctatcgtttcctttgtgaccattcatataatcttcctcagctcctccaaacagaacgtcatcttcgtcatttccaaacaaaatatctgctcctaaatttccttgtaaaatgtcgttgccttcattcccgtgtaattcatcatttccttgtctacccatgagtacgtcgtctgactcttctcctacaattacattaacaatgctatttccgactactatatcacttctatctgtaccatctgtaatattataatttcctggttctggtatgacaattaggttttctcgagattcttgtgctattgaataatcaaaaatattacaaaataagataatataagatactattagtaacaaaataaaaaatggtggagcatatacatgcattttgacaaatatatgagaataaaattctatttatggatttaaaataaatcttatagtgagttttataagatgcattgtaaaaataagaatgttcaatataacttattcttgttgtgattatgggataaatatggatttgattttttttcttcgacatgtttatttcgattaataaatattcaaatgatcgtaagaaaaatatctagttaaactcgttttctctttggttcacatgatgcccttgttcatatttcaattctttgacatggcgatttgtgtgttagcataaaattgaggatatgttgtaggatattccaattttagttcatctcaatttttttataatagatgtatgtttacttttttcctatcttattcgaaaaatgcatcaaataatgaatttcttcatctgtaaactagtagttgatttacttcttttatgatgatattatatttttgtacctatgtaaatttcatgctaaatcataaaatttaaagatctgttcttatatcttcgcaattatttgacgcgatatctttagatggatcaaaatcaattattatatcataatcgtctccacaatcaaagtaattattacctggtccaccttctagaatatcctcgccggtgcccccatatagttcatcattaccttttccacccaccataaaatctccttcagggccaccatataagagatcatcgccgttttctccgtaaatgttatctgctccacctcccccctgaatatcgtcattacctttctgtccaaaaatatcgtcattagccgcccttccttgtatggcatcgtcattaccttttccttctataaagtcctcttgaactgttccgataatgatatcgctacgagaggtcccctggcaaataggagctttaaagttctcattaaaagtacaatatataactcgttcacttgagtctgcgttgttgataggacccgcatatctattaccgtcaccgtcgccaccgccacctgcaaatgcttcaaacaataaactaggtgcaccttgagataacaaaatctggaaactgattgttactagaagaagagtggaaaagatagctttggtgactttattgcccaagacaactttaaattctatattatccttaataaacaatcattaatatttttatattaaatatatttaacgctgagttaagaagtatttgtaaaatttttctattcgtttaaaatcaactatacgagattcaagcttaaatctatagtgttagccatatcatacaacataaaatacctaattcaattcgtaataggattaaaaggagtcgcgattatgcaatcattttaatataagaaggttaataatcgacgtacacctttagagcttatggattatattagaatcctagcaatagtattcattctaatttcgttaatatatctcccgaatatatactccacatttgcacaaagtgcttctggaggtagtgtttctcaaagtcaatccggtgcttctggaggtagtgtaatcaatgcaagcgatatcaacaatatcaatcagccgtctgttgaaacagttcaaacagatcaacccttttctcctaattctactggatctggacaatcctcttcggttggcatagataaccaacaacaatctatagattttgatacttttctcctgcaattgcaacgtcctgtagtaggttcttttggagatgaccgaataacaggtacgcagcaaactgatataatcatcggattttctggttcggatacaataacaggaatgaatggaagtgatgtaatccagggtaatgaaggacaagataagctttatggtgatgcaggtgatgatattttgcaaggtggtataggaagtgatcaattctatggaggggcggataatgatattatggcaggcggtggtgatgatgactttatagttggagagttaggtaatgacaagctgtatggtgatttaggtgatgatgttcttgttggcggtcctggtgcagactattttgattgtggagaaggtgtcgatgtggttgttgactttaatatacaacagagtgacgatagagctggaaattgtgaagagctgatagaacactcctaatctctaaatatcccgtaaattactactacaagttctatccgtgattattttttgttagatacaagtgaaatggagaaacaaaactcaattaccgatagtgatgatcataatcgtcaaggtaggtatgatagttcttcatctacaacgaatattcaaaaaagtaatgattacacgattcttaaagccgtaaacatatctaaagtgtatgaattgcctgcaggagaaagtgtgatacttagaaacattaatttctctataaaaaaaggagaatttgtttcgattgtgggtccatcaggaagtgggaaatctacactattgaacataataggtgcactagatagacctacaaacggaaagatattcttgaaaaatttagatgtcttttccctttcagatcgaaaaatagcaaagatgagaaatcaaatgattggttttatttttcaatcttacaacttgattgatagaacaactgttttatcaaatgtagaaattccagcaattatcgcgggaaaggatggacgtgaggtaacagagagagccttaaaactgttaaatattttgggcatcaaagaaaaagcagctctcaaacctcttagtctaagtggaggacaacaacaacgagtggcgattgcaagagcattaatgaataacccagcaattatacttgcagatgagcctactggtaatttagacacaaaaaccggagaagaagtttttaaacttctcaaaatgatctcattcaaataccatagaacaatagtgatggttacacataatccagatttggctagagaaaccgacaaaacaatttatgtcagggatggaaagattgaaaaagagattatacactaaaatgctatttctagaatccatttatgaagataggccaccttctttttccattattttagtatttttcataggaatggttgtctcaaattgtgttttgcagaatagttttatcaatagcttttattcgtttgcccaacaaactgaaaagaatccgggatttcaagattcttactggactgataaaaccatagcaggcggaaatgattcaaacaaattggaagaaaaagaggtagggccaggagaaggaattgccactcttgctatcgtccttgttaacaaggcacagtccgatatttcggcgataaaaggttatctttctttaccagatgaatttgaagcagtcaaacgtgaaaacattgctaataacaatatctcttttgccggcaacgataatctttcaaatatagctgttgcaagttatgattcgatagtgaaaccaggtcaagaatttacactttactttgatatttatataaagaaggattcaaaggtaggttcatattatagatatctagatcttgcatactccaaagttttgacagctggagatactaccgtaaaagatattccagtgtcatttagaattccaggtaaagaaatacttgatgtagaaactaaaaaccaatatctatcccccactaaaataaacaaagtaggtatcaatataataaacaaaggaagtgcagatgcaaataacgcaataattacaatttcaaatgatgaggataatgtggaaggaagtcttgcctctatatctgaaagttcatcggccgagtctgttcagcaaactaatcctactacaagcaacattacaaatacgacattatcttcttcgtctgccaatgaccaaactgatgaaaatataacaagctcctcaattacaacctttggtacattaaagtacgatgtaggtaacataggtcccggtgaggtggtgtcgataaacccattgatttatccttcgtcaagtgctgctggaacgcttcaaaacttggatatacaaatctcttacggaaattctataggcaatagagagacagtcgattataatttgggtttggtaataaatgccgaaccgacagaatctaattttaatgtattttttagagatgatgaatttgacaccggcgtggattcagaacagaccgaaattagtaataaagtatcaaatagtagtatgattactgctggaagtattgaagatctgatttttgtcattaaaaagtcatctacccaatctaatatacaagacgtggtcatctctctacaaccatcgagcgaatctgtcaagattttaggtccgtctaggtggtcatttgattcaattgaggaggatacacttcttaatactacattatttgcatccgaagaacttataggcaaacccgttcaattaaactttaatttagattatcttttagacggaatggcaaaatcagaaacactggatgtaggtttatacgtagacggtagaatttcaatacgtgcgtacgatttcgaaataaatatcgtaggagatgagcctaatcttgtggctaatcttttaaatgaaggcaatacagatgcattatttacaactgcagaaatgatcccatcatctgcaacaaagaccgcgaattcgacctttatatccgatgatggcaataataaagataacagtactgctggcaacctagttgatgaataccctcctctacagtatctaggagatctggcagaaaactctccgttacctgttagtattccattaaaaataccaaacaataccagccccggtaactaccatgtatttataaagatttcttataaagataatcttcgtaataatcataatctcgtcgttaacggtactgtgaactattctcctcaattagagagttcttccagtgatcctggcttaattttaggttttatcaatccagttatcttacttgtattgctcttggtcataatcataattatatattttatcattagacgtttccgaaaaaggaaaaaagacaaaaggatgaaatcatcgacgagttctggcaattcagaaaatgaactagactctgttttaggagatagtgattgaagttatgaatgaaagtaaatcttgcatgacgtttgagataactattgtgttaagagtagtgaaaacgatataaaatgaatttcagacagatctttatcctttcgtttaacgcgattaaggaaagaaaagttaggtcgattcttacaatattgatggtgatggctggaagtagcttacttgttgctgtaaatggatttagcgctggttttacagagttttttaacaaacagttcagcaatcttgcaccaaacattttgtttgtaagcagtgtacctcagtctgaaagtggagcaggtgggggagctatctcaggttctgctccctcaccaacggcgaaaataacactcaatcaagcagttataagtcgaatcagttctcttccgtttacagatgaagtggaaccgtcgtttcaagaaactgtgacagtttcatctaggggcgactctaaaaccaaccctgtactttctgttgaccctaacgccctaacgattattgcaccaacacttgaatatctagaaggttcatccataagagagggggatccctcagctgctatattagcagaggatgttgcatttccacctggcgaggatactccatttgctcagcttggtgaagctatccgattaacatactcttttgtagatgaagcgggtaacactcaagagaattctaaaaactttgtagtttcaggtataatggagtcaacaggtaatcctactattgatagtgcagtagttattaatcttgaagctggaaactcattacttcagagagcaggcaagtatgattcattgtttgtagctgcagaggacagcgactctgtggatatagtagaagaacagataaaggctgtttataaaaacaatattgggattacgactgtcaaagccattttagaaaccgttcaggaattcacaggagggattacatcatttttgtttggaatagctgttatctctcttattgttggtgctgtaggaattatcacgactttatttacttctgttgttgaacgaaccaaagaaataggtactctcaaagcgataggggcgcaaggcactacaattttaatactttttctagttgaggcagttataataggtattttaggtggcgctatcggtcttttaggaggaataggaggaggatatatgttaacaagagccggacccggtgctggtgagggaccaccactagagcctatttatatgccattggatatggcaagagtttggattacatctgttatattgtccatggtagcaggctttttacctgcatggaaagcgtctagagttacccccatcgctgcattaaggtcatgaccaaaataacaattgaaggatcacttgtccttcattcttattaatttttgaaacgtactagtcaactaaagaaatccataattctacaaatatttttatagattgtccatatcttgatcaattagtataatactgtacgagattattatccatataactgataggaaatgagccttttgtggataaacgggatagtaaaatctatatgaattatgataatcttataagttaaacatctttcctaccgctttatttaggaaaaacaggaacgctcataattacattcattaaaggtaaaaaatattcgtaaggcactgttatcttgagaaaaatttgtagcttaagatgtcctatctcttttttgatttgtagaaacagaatatctaactatacattatggtctgaatctgaatttttcaggtctatcgcgtagaagagtttctgaaagactaattagctttgcttgcaaaacgaaactgtgcaacaatatggaactgtagtaaagagtacccaccacaagatttgttacaataagagaagatattagagtacgtttttgatgggacaccaatcaaggttggttctgaatatatctgaagcaggattgcagcagagcctaaaattagaataattatcgcactaatatatccaatggaagaaaaatttttggtagcggaacgatccatttctgttttggccagaattcatggaaaacgtcctggtcttcttatcatattaactataacaataataaattgaataattttaaaaaaaaatcaggaaggaaaaaagcagccaaatcaaatcaaaataagaacaattctagttttttagatctgctagatagtgtaaaaaaagatgatgataaattaaaagatgataatgatttgcaaaaaaaagaagaaccatgagaaaattgtttttcttcatttagatcttataatgtaacacatagtagttataaaggaacattaaaaaagccagaggatagatctttcctacttactagtagtcataagtaaatcagcaactgctccttttcctaattgtttaagttgtattgaatattaaacccaatgatcaagagaaaatagttaaaaggtattttagttattgcacaattgtaaatgtgaaaagtaaaataatagtcagggatataatgccaatactcagtgatttaaggattatctcatacttgtaagttgccttagaattaccgttacatctcttattatatttatagagtctggaaattctaatctctatgtagctcagcataaagggtattaatgagagtattatggagaaagatgtgatggcgcttgtctgaattacaaaaccagcaagaaaaggcaacatgccccatgaaaaagcaaaccaatagttcttgtggaacattccgtttaaaagctcaaaattatatgcaaaaagaaaaaagccttcaattattgcaataaaaattaagaatggtgcatatagaatagcataatacaatcctagcccgtaagatatgctcaaacaagcaatgataatgatccatgattgtttcttgctgagtaggtctccccacggttttattttcctagagcctatattatcagccacgtgagcccctatgccgagagaaagaaaataaattaaaacaattaagcctagtttccataactcaaatgaacctgccatcatgctgccccaaacgacgaatgaaatacacatgccggtatatggaagaaagagcattccacaaaataatcgaaattttaggggaccgaacttgggtacgaaccactcgttcagtctagagtcattattcatctttaaacgcagatactatcgcagaggtttcgaaagtttgatattccttacttatctgaacaaagctatatgacatgagtgttgaaattaatttcaagtcccaatggtttttgataataagtttatcaagcccgtcaaacacgtttgtccacttaccatcaaacttccaaagagcctttatgattctaaagtaagtcttccaagctaattgataggttagtttcttcggataggtaaaatcgtgaagtataaggaggcccttttgtttcagaactcggtggcattcattaaccaatgaatctagatcgacgtattttggcaaataggatgctacgatacaatcaaaatacttggtttgaaacggcaaaaattcagctgtgccgtttataaaatctatcttaatccttttctcccgtagtatacgaaggtacccaaatgtcaagtcaatgccatagacaatattggcattctgttttaataaagaagtaagaattcctgtgccacaagccatctccaaaacccttgatccggagggtacactcttaactatctgctttttccagtttgcgtcttggcccaaggtggcaaattgtactaatctgtcatagccacttgagttattcttattgaaaaagctctgagccaaattaactccattgtccttaaccatcagtcataattattatctaaaactaatattattagtggttaatttgggttgaaaaggggtaaattaaagaattaaattattttgtgttttttatcctaacatgactcaaattacaaatgtattatatattgtcatagttactatcgcattgtcaatagttgctactctgctaactgtcatgctggatcgctcttttgatattcccgggttaatgaaagagattccacatctcataatgattcaaatatttcaaatgtagtgactatttagaattctcatggtgggaagcaggaggagaaccaaatcaaaacaacaagttatatctgattttacagaacacttctacaaattaaaagaattatcaagaactggctggaaacagaagctagagattgagaatgcagagtctgttgcatcccatacacttttgatgatagttttagtcttctttttttcagaaaaatatagatattcttataaacaaaaagctagacttattgagatggctctaatccatgatctggctgagtcaattattggagatattactccagacgatgataaagaattcttgaaaagaaaactggaagacaaagctttccataggataacaggaaagatatcatcaaaaactttgaaaaaaaaatatttgcaattatggcacgaatatcaaaagaacaggtcatttgaatcaaagttcgtacatcttattgataaactagaaatggttgtacaggcaaagtactatttagataataggagagagatcaaaaaggaaaaggttaggccttttttccaatcaggcttgacatatatgtctcatggaccaaattttcaattacctaaaacttctaaaaaaaatatacaacacaataaggaattagaagatataaaagagatattagagtacttttgtaattaaaatatgcaatatttcgtagccttaaaaataggcgaaaaaagagtaaaaagtgcacaggaattgttatcaaatttcctaccagatagcactcctgcattaccagcacttgccttaaaggataacaacagtaacaattgggaacctgtaggagaagaaaactattttgccatagttcatgaagaacaaggatatttgattgctatttgtgataagaatggaattgctaaggcgatagccaattggttttcactccaatcaatggatgcaataaaatccaaaatagtggaatcaggaaacttacgggaatattttggcaaattatcgttaccagtgtaaattatatcctttttgaggaaaggaattttaaaaagcataaataatgaatacagatgggtaaattcgaaaaggaaatagaagtaaagggtcatcttgttgactcatcaatacttacccgcatttttgataagataatggatttaaaaggcgattttaccgttttagaatttgagattggcaagaggaaagaagatcatagttatgcacgcctagtgattcgaggtaacagcgacgatcatttgctaaatatcttagaaaacttgtttcgagagggcgctactagtgtttcagtcgacgaagtcaaatgtgttccctcacctcgagatatggtattaccagatgacttttatagcaccactaacaatccaactcaactattctaccataatgaatggataaatgttaaaaacatgatgatggataaatgcattgtctacaatccggttaccaaaagtgcagaatgtaaaaccaaccgagatgtcataaaaggcgaccttgttgttacgggtgaaagaggagtcagaattataccccaggagagacctagggagggagttgatatatttcagtttatgagtagttctagctccagcgaaagacccacacaacaaattgcaaaaaaagtagctattgacttatatcgcacaaagaaagaacaaggaaaaataattgtggtagcgggacccgttgtagttcattctggagcttcagatatattggcaaggctcataaagttgggttttatagacggaattttatcgggaaacgccttagcagtacacgatattgaaaattcgttacttggaacatcattgggaatgcatgttgatgatggaacactcgctgttcgtggacatcgcaatcatatggccatagtaaatgaagtatttaaggcaggatctataaggtcaatggtagagaaaaacatcctcaaaagtggaattatgtatgaatgcattagtaaccatattccatttgtgctgtgcggatcaataagagacgatggccccattcctgatgtaattacagatatagttgaagctcaaaaaaagtataaattattattgcaaggagctaatttggtaataatgctgtcaactatgctccattccattgcagttgggaatatgttacctgcatctgttaaagttattgcagtcgatataaaccaatcggtagtaactaaattattggacaggggaacaactcaagcgataggagtagtcacagatatcggatcttttttaccgattgtaatgagaaatttagaagagatagacaaaatagaatagaatagaatgtagcatgaataaaatgccacaattccttctaagcatgtatagttgtgatacatatatttcatgaagatgggatcgtgtggatagtattacagaatatgtaaagtctgttatcaaaattgattcggctcaatgccgatattcatccttcctatttagataatgtagaatccaattcattgaaattcattaaatcatacatcagcgatcctcaagttcatcttctattgatatgaaatgatttaaattcaatgagttagtacaaaatctgtgagaagcacagccgtaatttcgttcttcgtttaagggccgctctattaaaaagaacactaataaaataatccataaatgttatatctagacaagattttatctgatcttgcaagccaactatttttcaaattatcttttccaacttgactagtattcgtcatttttcataacttcgttatctataaattttattagtttcttatcgaatatctttgtagtctgattgcaaataacgcatctaaaatacacctgagatttgtactcgaggtcttgttttggattccatgtgcttaactatccaatcctttggggacctagtcttgcaaccaggacaaacaataaatatagatacttcatctaaatcgtttgagatggacatgtattagctatcctaatgttcttcgaggtatttatttatgattaaactatttaggaaaaacctgaaatcgtcatattcctatgctttaagcccaggatgaaaatattggatttaatttactcttatggcttctttgatcaatttcatagcaattttgggattggctcttcctttagtttctttcattataagccctaagacataattgatgacatttggattattttttgactgttctatcagatgaggctgagaatttatgatttcctgaattatctttacaatcgatgcctcatcagaaattttttctatttgcaagttctctattattttcaatggacttgtaccagatttgatgctcttatcaaatatctctcttgctatagatctgtttaatgattttacctctactagtttcgcgatctcggctacctgactcggcgaaacgttcaatgtatctagcccccttacattgtgatcagttaaaccttccctatctttctcattaatctttgtaagtaattcattgactatccaattggatatttctatcggggatttatagtattttagtgattgttcaaaaaaatcacttatttttttatcgttaattaaaatcttcgctgtatggtcggttatcttgtacacttcaatatatctctttagcctgtcaattggtaattcaggcatattgattcttaccctgtgcacaaaattgggccccaaaataattctcggaatatcaggctctggaaaataacggtactcctcttcctcttctttagatctggcggctacagtcacctttcttttctcatcccaatgtctggtctctgattttatctcaatatcatgcataatcagagttttttgtctagtgatctcataatatattgatttttctacctctttaaatgaactaatattcttaatttcaactttatttccacctcctaaagaaacattaacatcgcatctaactgacccttccaaacttggatcggtgactcctagatattcaaacatgttaacaatttcatttaagaaagtcctaacggctattggactagtaaaatcaggttctgttacgatttcaactaacgatacaccagcccgattgtaatcaataagtgagtaattatttgcagcggatttatcgtcttcataagttatttttcctggattttcttccagttgaactctggtaattcttattttacttctctcctgacttttgtcagttgaatcagttttgaattttgattctccaacaaattcaattgtcccgtggtaaccaatactgcttaattcataggagttatactgggttatttgataatttttgggcaagtctgggtaaaagtaattttttctataaaatgataccttttcaggaataagacaattaaaggccatacagatcatagaagcaaattctactgccttcttatttactaagggcaatgtacccggcaatcctaagcaaatagggcatgtattttcatttggagaggaatttctataattagacagacaatcgcaaaatagctttgtatgaagattagttagctgacagtgtatttctagccctattttcaaatctggagctatcttcattttattgctcatatacttggatccctggtctcaaaactatcaactttttcaagcaaaacagcagcatcaattaatttttgttcgtcaaatgcatttgctatcagttgcactccaataggaaggcctttttcagatagaccagccggtatcgaaattgcaggtattccggcaagattagctaatatcgtgtaaacgtctaagttgtattgttctattgtttgttctgttttttcacctatcttaaatggcaagataggcatcgtcggtaagagtaaaatatcatatttattgaacaacaaaccaaactctcttttaatctttgatcttagtttttgtgcttttgcatagtattttccaaaataaccagctgacaacacataggaacctagaagaatccgaagctttacctcatctccgaatcttgatctggattcggaaaagaaactattccattcataaccttcggggctaccttcataaccatatcgtaaattgtcaaatctcgacaaattactgcttgcctctgctgttgctatgatataatatgaagctaacgcataatcagagagaggcagtcttgtgtcctctatttcacaaccatagtcttctaactgtttgactttttttctgttatttctggccacttcaatttctgaatcatcaatcaagttaccaagtacaccaattttatactttttagacaaaatatcgtcaatactattcatttggtaattgtatttttggtgaacagtggtattgtctctaggatcttctccagaaataacatttaagattggaaccaaatcgtatatggttcttgcaattggccctatctgttctaatgaattagaataagaaaccagtccactcctactcacacttccataagtcggtttaattccaataactgagcaaaagctggaaggacatctgatcgatccacctgtatctgatcctaaagataagggtatttgcaatgaagcaacggaggcggcgcttcctcccgaagaaccaccagcgacataatcaatattccatggatttctaactggaccaaaaactgaatactcagaagtagtccccattccaaactcatccatattcaattttcctataatgataccatcttgctcctcaatcctgtttaccaccgttgaattataaggagatatgtaatcagctaacatgcgagaagcacatgtattttttaaaccttgcacactgatattatccttaattcctaccggaatgccggtcagtaaaccagtgttaactccttctttaactttcttatcaattgctcttgactttgttatggcactttcaaaattatggctaatgaaggaatttattttagaatcaacttgttttatcctttcaataattatcgaaatatactcttcagcgctaatctcttgctccttaatcttttgtgaaactaagaaggctggtaattcataaagatttctcaatttcaaatccttggtccgagaacaaagccgtctttgatattctttaatttgatcatcatttgagctgtttccgaggatcttagatgtggtctcggtttgtcgtttcgcaagttttcaaaatcccgttctagctttaaatcctcgatgtcattgtcttcagaaccgtcagttgtgaatccatctaacttgtcgaacattaagagcacttccttcagcttttcagaaatagccgtcatatcttgctcgggtatctccaacttagttaaattgcataattttctaatatcaatacccatcgccatggttagctaatgggatctagacgtactttatatttatcttatggggtaagtctatctatatctctaggataaaaagtcgcatcccttatattatctagttttaatatagccatcaatagtctttctagcccgagtccaaaaccagcatgggggggaactccgtagtcaaaaaccctcaggtggtaatcgaatgcctgatgactcaaccccttctttttcatactctccattaaattatctttattgttgatacgtgtactaccggatgacaattctaggcttccatacattaaatcaaatgattcacttaaaacatgaggatcattttctgtatttggaccgggtaaaggatcgattttctttgatttcacatagaatggctttgtagaagctggccagtcagtgataaaataaaattcatctccaaacaaatccttgagtagtttgggtgcaatatcatcaccccatcgaatatacttgtgactattttgtaaattttccactaattgagaataagtaattcgactgaaaggtttactaacgtcaggtagttcaatttccaaactctttagttcattttcatttttgtccctgatatttttaataatatgacgtatcaagttatcaagataatccatcatgtcattatagtctacatatgctttttccacatcaatggacattgcttcagaaagatgcctgtttgtcctagagggttcagctctaaatataggagctatttcaaatacattttcaaaagccattgtcaattgttctttatataactgcgggctctgtgccaaaaatgcctccctatcataataaaagattggaaataatgctgcacctccttcggtagcagtggctatcattttgggtgtattgacttcgacgaaatagttgtcacttaaatacccccgaatagaattcagaatcgtattccttattttaaaaacattttgtaaatgatttcttcttaaatcgatggccctaaggtccaatctggtgtcaataccaatcgaagaaatagcctgtgtaaggaatggtgcagatttattggatacggaaaggattttgatttcctcaggtattatttcaaattcgttgctcgaattcttttgtttaacaacttttccacggatggcaattgaggaatgctctttcaaactttttaatgactcaaatataccctcactcaactccttcttctttacaacaatttgaatatcaccaaacctatctcttacctggacaaaaagtacgttcccatgatctcgttttgaagatatccatcctataactgcaactacttgattaattacggaatcagaaatttgaaaggaatagtgagtccttctccattcgcccaattcatcttcagcaatgattttgtcttccaatattatacaataatttcaaatttttataagaatatatctttttcacctcagaaaaggtatatcccttagacattgattttcttctaataatgctttatgtgttaacaaactacaactgtgactcaattttgactaaatttcattctagcatgctattttagctctcaattgcattctcatgttcgttgaaactagagatcgtgatttcttacttatcttctaacaaagtagattccttatgggatgagaaagacgtttgaaaatgatatttagtaaattcaaccccagtcagcattctgtgaatttgtacagatgaatcacagaatgcattatagatttgaacttcagatataaaagggggccataatggctaccatatctgtctcaacattctttagtaaatcttttagtatagacgttttcacacttatttgaattatttataaaataggagtcaatagccaggcttgtttcaattttttaatttttatcctccttacttgtaggtaatgcatttctaccgctcttatgaagcattgtaaatctatttttgttatcgaacaaatattcaaatacggttagagcataataatctttatgggaaacgagaatgtctttcatgtaacaaccggaaattgggaatcagaggtcctcaaatctgacaaaccagtttttgtagatttttgggctgagtggtgtggtccatgccgtatggttggtccagttgttgaacaaatagcacaatcatattcagataaaattaaagtggttaaactcaacgtagatgaaaaccaagaaatcgcaatgaagtatggtatccaatctattccatcactgttgattttcaaaaacggaaaagagataaaaagaactattggtgctgctccaaaagatacttatgttaagttcatcaacgaggcgatttcttcataagcaaaaattatttacctgcccttgtaggatttaaaagcattaatattctcaatacttaaattatttttaatttgaataaatccgagcttctttcacttttctcaaatgattataaaaaatattataaagtttcgctttttgaaaaattaggctttattcgacagagttgctcaatttgtagcagatacttttgggctattccacaaagatcaatttgtccggatcatgaaaactactcatttattggaaatccacccacttcaagtagatttagttatacccaatcgtgggagaagatcagggattacttcgaaaaaaatggtcacagcatagttaacagatatcctgttgtatgcaggtggagagatgacctttactatactatcgcctcaattgtagattttcaaagagttgccgatggtaaagtaatctttgaattgcccggcaatcccctagtagtccctcaaatgtgtttgagatttaatgacattgagaacgttggtattaccggaaggcactacacctcattttgtatggtagggcaaatatgtgatgccgatactaaaggagggtactggaaggataaatgcatagaattggatttcggattgttggtagacgtatttggaatacctaaaactgaaataacgttcgtagaggatgtatggatgggggctggagcatttggtagctcgcttgaatattttgtaagaggattagaattaggaaatgccgtcttcacagaatttgagggcacagaaaaagatcataaggttcttaaaaataaaataatagatatgggagcaggtttagagagactttcctggattacaaacggaactccaactagttacgattgtacttttgaacgggtactaaagaggatatatgagatgtgcggaatggatagtatatttacttcaaatagaaacaacaattatcaaaccaagatactttcagattactttagcagaatttctgcaaagttggaatctacatcggatattttgtatgtaaaaaaacagatagcgctagaattaaatatagattttgaaaaattgcaaaagattgtagttccatacgaatcattatacacaattatagatcacacaagaactctagttttcgctataagcgacggctcattaccatccaatgttggtggtgggtataatttgagggttcttcttagaagaacactttccctattaaaaaaactccgcctaggactcaaagttacagacattgttgatctgcatttggaccaacttcggcctctctatccagaattgatagaatatagaaacgatattcacgaaatttttgatatagagagtagaagatttattgaaacacaagacagaattgttgcgatttcagctaaaattaagaaaggtaaaaccaaattgagtgtagatgatttgatccgtctctatgaatccgatggggttactccagattatctggttgaaaacggacttctcgatacagtcccagcaaatttttatataagactttcagaattacattctatcaatcgttctgaaaaaagggataaaaaagaatttgattttgatgataacgttgatcttgatagtattaatggtactgccttactgtattataacgatccacttaaatttgcgtttagcgcaaagatcttaaacatatttaacaagaatctagtcatattagacaaaacctgtttttatccaaggggtgggggacaggaacctgattttggttacatcggcacttacaaagttgataacgtggtgaaaattaaagacaaggtatttcaccatatagttggaactttggagctcaatgaaggagatgttgttgattgcatagtcgacaaagagaggaggctggctatcacaaagaatcacaccgccactcacataattaatcatgcttcaagaagtgttttgggctcatgggtctggcaaaattcagcattcaaggatgaaacttatgctaggttagatattacacatcattccgctttatccagagatgaaatgcaggaaattgaaagaaaagcaaatgaaattgtcagaaggaatttaccagtcatgattaattggtacggtaggggaatagcagaacagaattatggctttagaatttaccaaggaggtgttgttccaacaaacgatgtaaggattgttaacatcggcggtctagatattgaagcatgtggaggaacccatgttttcaacacgggcgaactgggtttaataagaatactaaaaacagaaagaattcaggatggtgttgtcagaacagaatttgttgcaggagaaaatgctttgactcatgttcaggaccaagacaaccaaatacaatatattgtcaacaaacttggaacaaaccgcgaaaaaatactagaagcattttcaagaaatttcaacgaattagataaatctaaaaagaaaattaagaatcttttgaaaagaatttcaattgtatccttggatcgaataaataaggaatccttcgttctcaactcaggatcgaatgaagatagatttctgaggtattattttaaaatagatgaagagtttgatgacgaatttcatctttcggtgggtcaaatctcgacggagcgaaattcagacctcatctatatttcagttatagtcacagaaaatagatctgctaaagtcattgttttttgcggaaaggatgctataaaaattgtgaaggcaaatatgttagcaagtcatctctcaagaatacttggtggttcaggtggtggaactccaaattttggtcaaggtggaggaaccatgctagaaagcctcccaagttttagtgaaacggttaggaaaattttaatcgaaaagcttgatgaaacaacaacaaaggattaatcctttttaaagatagaaaggagattattccaaaaaacccatcttccggctttagatcaattcgagatattttctgaatatccccctggtattctggatccgtgaatccggactgtacttaggtcacagttacttttgcaatgccccccacttatcagaatttagtgttggtttaagaaaaaggattgattctgcaaaacatctaagtgactaatttcttgagactgtttgggttttcaagcccgcgtctgatttccatagctatccgcctaccaacaccgaatgtttctccatatttatatttagtatatggagtagtggtggcaagaattggattaccgggtaccctaagggagacatcgtatactataatgtccaaatccacagtaactacactttgtaatgaaaagggaccaacaattccgggcggatattcttttagagtacactggacaaatttttcccccattttaaatactttatccaaaagtgattccctaatactcgctggcgtatgtccaacttctatattctgcaggtcaattggcatttcaagttgatttacagctggtatcgatgttgtaaagtcatgaatgttggtttgtagtcttcgttctatacccaaaaattcaacttctcgatctactggtgaatagaaataattaaaattaaaataagtacctataaggtattgttctatagttgaggtattttccaagtcggatttagtaattaaccctgcttcaattctctttgcagatttttttttaaagtcttcataagatgttactatgaagaatgccctctctagttttcttttggcttcctgaaccttgacaagggcaggaccttcaatttcatctggtgtagtatatatttttggcataagaataccagcttttcttagcaggtcatattgattatttagtgagtgtctctcctcagctttaagaatatacctgtttccaaatatagggatttttagtaatttttcaatgttgtcgatccccaaatatactacaaatgatctgtgtggaattaaaattgtgttcaagtcaagtaattttttttgattttcggcgtacattaaatcagaaaaattatccaaaattaatatttcatcagctaatcgtctaaacctttgatagggtaactctcggcctttttggcatatgcatatggttttaaacccctcatctttggcgccatccattatctctagagcagaatggcttccaattaccccgagagtaatattatttaaatcatatttatctatcagtttatctgcattcattttaagttttcattccaggatgtattaaatgaatttttatcatttcttacttttatttttaataatctattttggtgtaccctgtttctttaactcttcatcaatggcgtttttcaagtcttgatcatctttatttgagtaatcaacacccaatgtctctgcaatcgattccagtttttctctgtcaatggattgttgcgatttatcttgattagataatgattcgttagaaagagacttctttgcctccaccctagctttctgaaactcgcttgttgctctccccattgatctagctaattcagggatttttttggcaccaaaaaatatgacaacgataactaagattattattatccattccatcccatttatgaatgccataaaaattaatttgtaatccccattaataaacacatatcagaaaaatgccaagataagtttcctttacgattgaggatctttgttaattcgcaaaatgtaaatatgcctctatacgaatacagtgaatcatattatgaggtacaacgaagcggcatttattggacaacagcgtgcaagagccgcccaaatgaaattatttgagtacgctggatttgcgatgttaacttatacaataaaaaaaaatcccaatgatgaaggattcatgccagtaggagaagaattatttgttagtaaggccacctatgacaacaacatgatagtatatcttactgacgaagaagggtttgcaaaggcacaaactaaacctatgagtatccctgatggcgataaattattggaaaagatttcattagcgggtttaaaaagatatgatggtgagttaaagactatatagtaatttcagttcccatcttgacattttcgagtaccaatttttcaatgttgtttgtagtggatttgaataccaccgttgccaatttggatctctctatcacttttaagcttatcaagtccatcaaatcataagtaccagccatcgacttttctgattttagaatgtttaaacagtcttgtacatttattttgtcgtattttttggccccctgatttaccctgggatcagagtcgtatattccatcaacatcagtagcattgtaaaactttgtcgcactcactcgttcggcaattaaagcagaagttgcgtttgtgctctgaccaggataaattccaccagtcacgattactaagcctgacagaagagctaccgaaatttcctctaaatttttaggtggtagaggataacaaaattcggctagacccgagatcaatagtcttgcattcaaatgtgaaacctgtatcccaatcagatctagcccagactcatccattccaaggcttcgtgataaatcgatataaaatcttgcgatcttccccccgccggtaactataattggttgaaagacgttgcttattttttttattagctgcacatactcattcaattgcgcagattcagtttcaaagttaaataaactcccactcagtttaatcactatccttggtttaatcatagaatctcatttggcaagtgattataaaaattgttagaatttttgatcttcaaattcctttagtatagattcaaaaaaattccttttttctttggtagtatatactctaatcatatcaagatagccggtgatgacattaattaatggtaactgatcaaatgatttctcgtattctgtttgcttattaattatcataattgaagtaacttcttccttctttggagccaaaggtattgaaggtgcacgagaaatatctaaaaacacaggttccccagaatcttgatgatttccgataacgctttggataaaatgcatttgtttttcaaaatcacttgtcccatcaggaacgcctagtgggaattgtttactgtcaccagcgttttcaaatctttgattggataatgaaaagtattcatagatgcatttaagcaaatttctgtttttgtaatctctagcaagctttactgcaaaagtatccatgtgccgggattttggggcttgaaaattgcataataattcaaggaccatttcgtcatgtaaattaaggtaatcctctagcgaatcaaaatcagtcaagtgcagagcctgattaagatgtttcatggagtgtaatatcatgacttcgccggatcggacagtcttgtgaaaataaacagacttgaacatttgatatcttgagatgagcatggactcatatgaatacaaagcagatttgttaattcccaaaacttttgaagacgcaacctccagggaattaataattctaaaataatctaccttaccatattcagtacctgaaaaataactgtcacgaggcaagtaatccatcaaatctactgataatccaccagaaataacttcatttaaatatcctgaattatgttttccaaaacttagggaagatacagtagaaggactataaccattgcgttttattatatctgatattttggtttccaagatgatcctctcgccgagattctcatgagaatagtttttggaatcttttaggatttcctcaaataaatgtgaaaacggaccgtgtccaacgtcgtgtaatagggctgccaatcttaggtgttgaatcaaatcggcatctgcaaagtatcccttatcaaataatgtttgaccggccatcccagccaaaaacattgaaccaagtgaatgttcaaatctagaatgaagtgctcccggataaacgagatgagcgccagctaactgacgaattctcctgagcctttgaaaaatataggtatcgattatctctatttcaacatttgtaaattttatgttcttatgtattggatcagtaatttcacctacatattttagagccattgttcttctaaacacccttattctatattcagaacaataatactattactctcctattatatttaggattgatttgaaaacaatgtccgtagaattttccgaataaagaacattccaattgaatattttagcaagttcaagataattagctcttactttttctaagaattctcgacttttctcaaattcatctaaaataaaattattcgcaatactccgtagataagaaacatgaggactgacatctagtattatggtaacgtcttcctttggcatacctctatctagtgcagacaaccattcgaaatctaatccatttgccaagccatatacgaggttggattgatagtatctgttcatgattactgtttttccggattttaaggattctaaaatctcttcttttttctcccatctattacttgaaagaagcatgtgtttagtttcagcgttgtattcagctttgccatctaagaaggcacgaatttcttgtcctatcttggtagagtaatccggaaagcctaacagctctgcctgtccacgacgtttgtcattgagataatcaaataataatcgagcttgggttgtttttcctgacttgtcaaggccctccagcacgataattctcccccccggctccatagttacactttttcccttaatgagtcgatcataatattaagggaaaaagttttaatttataaatcctatagatttaactacaccattgaaacctaaatttatcaaacctgtgcttattttatcgagcatttatatcttgatatactttgcatttgcttccggaataattaattctataatagaaggccaaaattataatcaggctgtttttctaccctctagagctgtccaaaataattatgagaccgcgataggtattattatagtgttatctggatttattggcgcccttatcgcggtcaagggattaaacgtagaaaaagtatacgaaaaatatgccttgatgggttcaggctttatgatagtgatgatatcattaattttcatgtacaaagttatggaattaaaggcttaggtcatatccttgtcaatttattttggcattcctgattattttccgagtttgaggaaaatcaggaaaacgcgacaagaaattggatgcggaactagttttttttttctttaaaatggtaataaacaaatcatctttgtcttgaaaatattctaataaagttattaaatttgatatccttctgaaatgattattttcttggtgtggatatgattcatcggaaattgtttcaaaaatcaaccggtcaatactgctttgcgactgataagaagtgattactactggtattttcttatcagcgtgaaactgaaataatatctttaaaaggtttaggctcttgtaaccagcatgttttccagcaatacgatttaggctagcagcgcctttgtatttacccacatttttatgagtattaaaaatctcattatttccaccaaagttaaagtaatctaacaatccattcaatgaatctattacaataagtgaattaaatttgttatattcaataaacttgttgaccattgtactatgagtaatttgatatggcagaaaaatctcaagattaggttgaagatcacaatctgaaaatataaagtgattgttcagaagtgaggaaagttgtgtatcaaaatccattaacaaaatattccaattgctaaattcagtgattaatttctcaattaagcttattttagcatttacatcgtaataatacattaaattaatcccacccgagattataggatgtagaaatgatggtaataattcagctcaccttaaataataatgcctaatctgatatatattgagtaaccaggaaaatgtcggtacattggataaggaattgttagacagtatcaactcagatttttatataaccaaaaagagaatctatttgaacaatggttcaattagtccgcttcctatttcatccataaaatcaatgacggattttaatataagatattctgaagtgggaccagattctaaagagtttgcagtttacttagatgaactcaaattggaaactcgaaaacgtgtcgcaaatctcataaacgggcacaaggatgagattattttcacacagagcaccacggaaggaatcaacatgattgctagtggattagcatggaaggatggaaatcgcttattaattagaaatcctttaaacgagcattattcaaattatttgccttgggtcagactctctgtagataaaaacctacagattagaaattttccagaaggaaagattgagaattacggtaatagcttgattgaggattttgtcaatatttatgagaaaagtacttttaaattagtttctacaagtcatgtcatttataataatgggtcaatcactcctgttgaaaaaatgggaaacataataaaaaaaaggaacaaaggtactttgttttctattgacggagcacaaagtgtaggggcaatggtaaccgacgtaaagaaaatgagatgcgattttttgacatttccgagttttaaatggctgtgtgggcctttaggaattggtatactctatgttaaaaagcaggtaatggaagatttgaatcctgtgttcatcggatcaggaactgcagaccttgaatttgtgagagacaagaaattaaaggatgataaaaacaagaaattaaaggaatctaccaaatacctcaaatatccagaaaagtaccatgctacattcagaaacttcactggattggctgggcttgaggcatcattgcgatacctgttaagggtagggatacaaaatatttttcaacgaaatagatatttggcttcaatattaaggcaggaactaatgaatatggatgatataacactgcatgaagcatcaacggaagaatttagatcttcgcttgtttccttttcttttagaaagcaaaacaataagagaatcgaaaaattaaatgctaggttgcaaaaagaaggggtgatattagcagaaagggaaataggagcaagaaagatattgagggcttctccacacttttataattccgaagatgaaatggtgaagacagcaggttcaataaaagcattgatacaggtattagattaggatgagatgagttcagagaggaagaggaggactcgaagattattacctaaaaacaaatacgataatattttactgctttgtaacaactttttgaataaattcaatggagtcagagtaaaaggtggcgcattattctatgattatcacgctactaaaatttgtcatcgccaacatattgaataagtcattagatttcgaaatcaagtattaagaagattggaaaccgaagtaaacattaattttactttaaaaagttctatggtaactctgttttagatttgtaacaatattgttttgaaaactagatcctcctaagttttacgtgagtaatagtaacgttggattttggattcgaatctagtatctttctcattttcttaatactgatcatttaaatttacttacgatgcggaatctaatggatcaacagatatttagaaaagttgataattcttacctatcccaacataatcttaaaatttttagggaactattttctgttgaattttttttaattagataaactatccttaataaggattaaaagaaagggatattgtaattaatgcgactgcccttcaataactatcattgtcaaagtggagcgaaccttatctatcttgcggattcgccatgtaatgatttccctcaatttatccatattatcggatgaaattcttactataatatcgtaaactccaaatactccattcacctcaatgacttctggaacttccttaatttttttgattatctcactttcagaacctagatcacaatttaataatacataagcagttggcatacttatcaaaaggtggataaagtattaaatctttattagtagattattagaagagcaaagagactactgttttgctgataatctttctttgcttcctcttatgtcaattttgattgcaaataattaatatacccatgtcaaaaaacaattgtaaagcgggggtcgcctagcctggtagggcgtgggattgctaatcccatgttcgcaagaactcgtgggttcgaatcccactccccgcgcttatcttggggatttatacgacaatcttaaatgcgatagaaaagcaacaaatgatagaacgacaaatttggcgcatgctaataatcctaattttgatgatggacaacaacaagacatcaattcatcaatcactaaaaggatagacctgttgacaaaatcatgcaccaaacaatactttaacaaaattttaaaaaatctagccattgctaatatcagcaatgctaatacgatttgtgattatattatttctgaagaaacagagatcaacataaagaattctactaaagaagaaaggataaaagttcttgtatggctttcaaattgtcatgaaaacaagaaactctttaaagagttaactaaacaagatatcttagaatttctaaataatttgcgaaaacctatttccgaggatccaactcagaggtggataggcacctataacggaaggcaaatcattttgagtaaattttttagatggctttacaatccttcagacctgaccatactaagagagaaactcctgatggtatgaaggggataaagcaaattgccaagaaatgaaaaaacgccgtattccccgtcagacttgtgggaaccaagagaacatgctttatttttgagatattgtcctagcgtaagagacagaagttttcatgctatggcgaatgattcatcgtgtcggccatcagaattattgaatttacgaatacgtgacattattttcaaaaagacaagtgaaggaaaacagtatgcagaaattcaaattaaggggggtaagactaggccaaggaccatacaactaatagattcaattccctatgtaaaggagcttattaacagtcatcccacaggttcaaaccactctgtagtttttattagatttactcaaacaatttaatttctggataattatcttatgtattacaacccccaagataagctaatggatttgaatcccaaacctcatctggtgcgatttttcaacccatgatttttaggtacttgttagcagacaaaaaccgacgattatctaataacaatatcctccagcaaattcaaatcttactatacctactttctttttgtcatttaatggatgtttgattagatccgcaagcggatttaacattcgtctctatctttatcagtgttgttttaatgttcaatttatctattctatagaatttctttaatcattatcccaaatttacttcattaacaccttaactaaaacgagaagaatcaaatttgaattttattcattgcagttagaatcccgtaaattagagcctcgggtctgggtggacatcctggaatatacacatcgacaggtaatatggtatcaacgccaccggttgtagcatagatattcccaaagattccgccactgcatgcacacgctccgacggcaattacaattttaggatcgggagtagcctgataggttttttgaagtgcaataaccatattctgagatacagggcctgtaactaacaacgcatcagcatgtcgaggagatgaaacaaattgaacgccaaatcgttctatatcatagatgggattattcaaggcagttatctctatctcacatccattacacgatccaccatcaacttgccggatcgccaaagatctaccaaataaagttttgatcttttctttcaattcattacctatctgttcataagacaaatcagaagaacttttctcatttataggtatattcacagattctttgtttggttgttgtagcgccaattcaaccaaatctatcaattgttctttattctttgctgcaaggttcaggttcttttccattctaaataaactcggatatacttcttcacatctaccacagagaaaacattttccattatccaaagttactacagcggtgttattctttgattttcttattttgattgcgtttgatagacaaatattttctatctcgtctccctttccaactagttcatatttatagacatccctggaaggaattacattaattttgcccttagaattttcaggaattagatctagctccttaatcggattaggtatcgttacgcgtttattctttagaatatcacttttatttttgtccttggaattaggccacaatatccctttataatcaaatcggctcttatttgaaacagtgtctgagagatccttttccttcattacaaatcgtttcctgaataagagagatcaaaacttttgttaatcaatggaaaatccggaacaatattattcagtaccagctaattctatcaacggccaattacaaaaagatgctgttcttattttgtatctaaaaatcctattggtgtcgtctccaagcatgacccaatgtattgtttgacctctgtgggattcagtatatcccaacgcactgtcgtatggttgaagatgattttttagttcctctataaccagactgtcatcattgtaggtttgataattaccactggtatcgctctttgtgcctttatctaggatatcagtcgctattttctgaataatatctatcgagtgcctagtttcaagcactcggacttcgagccttgaaagagcatcgcctttacgtttgtttagctcaacttcatatgcaatcttatggacaataccttgtatattttcaagattaagataagggtaatatgcatagggatggttctttctcgtatcgatatcaactccagtacttcttgcaattacaccatttgctcctaatccaagtacatcttgaattgatatacttccagttcctttaaggcggtccataaaggaggaagtgttatttaataattttactaaactattaaagtctgttaatatatctgatagatctttaaggatcagggttagagtttccggtttaaaatctatttttactccaccaatcctgtttattccgaaaaggagtctacttccacttaatttttcatttattcgcattactttctctttgagtatgttgattcttgagcttccgtatccgaatccaacatcagtacaaatacccgcgagagtcccaaagtgattccaaattcgttctagctctgcacaaatcgttctaatttgcaaggctttcttgggaatttgtattgaagccatcctctctatcgcctggcaatacgccatagaatttgccactgattcatcaccagatatacgctcagataagagcaatgcttcgtccagagtcattgtttcagctagtttttcaatacctttatgggtatagtataagcgcgtttccaagttgagtatattttctccgtatatactaaatctaaaatgtccaggttcgatgattccagcatgtactggaccgacaggtatctcacatataccctccccttcgacctttaggaattcataatgataatttaaatgactttttatttttgtcttaatatcaaaatcctttcgaagcagaaaatgattctctggccattgttcgtgcaaaactagttttcttgtgtcagggttcccttgggcaatgacaccaaacatatcggatatttccctttcatagtacaccgcagatggtatatgcgaaacgatactcggataggtgggcttatgcagattagggagtaatgaagtaactatgaaaaaaatatcttcagtctcactagaaaaaacatgtctaaggttcaaaccatcatgtcttttgttaattaaatcaattgtatgtttagtattatccaattcgtcttttttgtcaagtctatcttcaatatttcgttcatcggtacatatcatggtaacaagtctgcatcctagattatcatttataaaataaataatctcagtagtggcttcgggactgctcgtcaaaatatggatttcgttgtaatttttgtaacagatcctctgtatcctttctttgaatttttcgaagaataatggctcgtattcaaagattttcttgcggaaagtagtatggttcaatatacctccaacccctcaacagtttgaatatttaaatgactaacgccgctcttcttcacaacaacttctgttaacattgcctgtttcaatctgccttctccatcgtcataccactttgaatatcttcacagcatcattgattaaagtgtccaaaggttcaggtatatatatcccgagtattattacaaaagcaacaagcattcccattgcaattatggaaagattaccaagttctccattatttatttgtgttttaggttcaccgaaagacatcattactaaatttcttataaaaccgataaaaattattgctaacaagattatcaaaactgtgctagccagtatattattagtactaaatccggaatataatatcataaatttacttaagaagatattaaacggaggtaagcctattattgctaatcctcctatgagaaacataattccagtaataggcataatcgtaactattccttttattttagacattgctttagtttcgtatttctggctaatctttccactcgcaaagaacattaatggttttacgatggcatgatttatcatatgcaaaatcgcgccgtatataccaacgagacctccaaatccaaacgctaaagtgactatacctatatgctctacactagaatatgctaacatcctcttcatatccttttgaaagagaattgaaaaagaagcaatgccaactgataataatccaaaaatgatcagtaaattttcagaatattctgcacctattgaaccactgctaattagatgaaaacgaagtatcccatatagagcacagtttaaaagtactcctgacagcatcgcacttattggtgttggagactcgctatgggcatcaggtaaccaagtatgcattggagctatgcctgcttttgttccataacctattattatgaaaataaatgctatttttacaatcatcggatcaaaaagtttggagttttgtagcatgtttgtccagtttatcttatcctcttccggttgaacaggtgataaaggatcatgaatattagcataataaaagaagatagtcccgattagtgcaaatgataatccaacagtagcaattatgagatatttccaagccgatcttattgcatcctcttttacgtaaatcattattaataaaacagatatcagggtggttgcttctattgcaacccacattactcctgtattgtttataatgggaactaaaatcattgtaaagatgaaaatattgaacccttggtaatatcggagtagatgtttgtcatcaactagtccaccctgatactgttttcccatataattaacagaataaatagaggaaacaaaactgacaaaggatattaacaaaagtacaaccatactcagtgaatcaacataaaaaaaatcgttgaatagagtaattttcttcaaatcaactatatataggaacagaaaaaaagtcagaaaaaggataaaggcagttgacaatacactgataatttctaggaatattttctttttgaatattgttactaggacaccacctaaaattggagttaagataatagacatcattaagtatgattcaggcaatattttgattaatgaattagccatgctcatcatgtttctaatcttcctcctctgagtactctaagctttcacgtttatgattaatgtcattcatgttatcaaatgtgtatccaattctatgtatcaaaattgatgatattacaattccgaccaaaatgtctacgaatatgcctatttctattatcagagaaattccatgggtgagggagaggacaaacaagaataatccattttccaatatcaaaagaccaactatctgattaagggcaatctttcttccaatcattactaagaggcctataagtaacaacgaaatggagactggaagaaaactaatggcaatagcatcttcatccagttgaatttggtgagtcaaaaaagtacgaaagcgccacaagaatggtcgaagcaacgagtgacacacgtatgctaatgtacggctttgtttcatttttgaaatcgtaacttattttttctgttacctttgttaaaagcctaggaacaattactgcttttaatgaaaaggtgataatggctgccagatatatctcccagttattagtaatataaccaattactccagtaattaaagagaggataattgtttggtatttataagcttgaatccatcccaaaaattctttttttataattaaaataaaagttgcaatcagtaacgtacctgataagaatatcaaaatattgttataagtcatttctaatcctatcctccaatataaaggaaaactatacccattagtccacttgccaaagacaaaaatattaaatcagggattctaaatagtctccatttagcaaccttagattcaatgtatgcgatcatcatgcctaaagatatcacttttaaaagaaaaactaataaccctactataatcgcagggactgagaaagttgtagatagtccccatgggataaaaatgccgattaaaagagacaacaagagtagttgctttatagattgggataattcaataagagcaagtctttttcctgaaaactccaagatcattgcttcatgaaccattgtaagttctaaatgagtagccggattatcaaaaggtaattttccagtttcggacataacaataatgaaaaaaccaaatagtgaaaacaacaggcttgctgatatcatgttggatgattctgccgcatgagatacaattgtttcaatatttgttgcaccaaacgttactgctacagtaaataagactaaaaacaatgcaggctctgttagggatgaaatcatcatctccctgctgacgccgatacctccaaaagcgctagaaacatccagtccagccagcattagaaaaaacctagagaggcctaaaaggccaattactaatataatatcacctccaagaccaaatggagaatagacagcaatgattggtacgaagaatgcaacaaccagtgtagaagtaaatataatccaaggagagaatctaaatatccaagaagattcttctgatattacttcatcttttcttatcaatttcagtaaatcaaaatacatctgaaaaatactagagcctgttcttttttgagttattgcctttatcttccgcattattccggttaataatggagcaagtactataatgatcagaaattgaataataccaataagaatcccggatacggatggagcgatttcaacaggcattatggaaataacctcacgtataccaaaagtaatatgatgatcaccaagacattgagtaaatacaaattaacttttcctgtctgaaattttttcattgtctcatataccttaaatacgttactaataaacggtctatatatgaaatcctcaatgatattcttgttagcaacctgaatcctaactgattttttaaagtagggattagaggagtggtatgggatattctcaatggccaaagaaggcttgtagaaatttctaaatacatgtagtataggctgagacagagaagaagcagtatattgcattctttcattcagattaccaaatccgcagctccaagtttcagtaatcctatgttttgttctaccaccgaccccatatagaaatcctattgtcgcaaccagaattgatacaaatataacgaggaccactggtaacgaaagtcctaaaacagtattatttgtttcaggctctgaccaaatcgaaccaaatgaaaataacggttgattcaaaggcatttgaaaattaaatgcaagagttatcatacctataccaattgagggaatcaatcctagaataatgcatatgatagcaacaatacccattcctgcaagcattgtgcgaggaacttcttttatttggtaaattatatcgcttcgaggttttgagagaaaagaaataccaaagatttttacaaaggtggccaagacgatccccaaagtcagtgcaaacgccgcgcttgcaaaacccacagacattgcaataacgatatcaggaatacggtaagaagatatgaaagagagcatcatgagatattcgcttacaaacccattgaaaaaaggtaaaccagaaattgaaagtactcccactaaaaagaaaagcgaagtccacggcatccttttaactaatcctcccaacttttccatatttccagtatgagttctaaaaattatggcgccaacacccatgaataagaggcttttaaaaatagcatgatttagcaaatggtacattgcagctaacattgcgatcgcagatagatagattaaattaaaagttagaaatacaatagacaatcctattccaataaagattatccccatgttttctatactgctatatgctaaagcacgtttgatatctttttcaattacgctgtataacacacctaccacagaggatatcgcgcctatggtaacaaacaataatccccaccaaacaaattcagaattatctgtcgcacctgatcctactccactaaaatcataaatgattcttatcaggccataaacagcggttttgatcattattgccgacattaacgcagacacgttgctcggagcagatggatgtgcgtaaggaagccaaatatgtaatggcacgattcctgcctttgtgccaaaaccaacaaaggctagtatgaaaacgatatttttcattgatacagaaaaagtatctgaggacaatctgaaggattcaaaactagtatcaccagtttgagacgaaagtaacaaaagtgaagctaatattagcgcagttcccagattagtcattattaaatagattataccggatttcaagctagaatcatttttatgattatatattacgagaaagaaagatgttagagacattaattcccaatatacaacaaatgagaaaacatcatttgatgagactaaaaggatcatggaaagaataaaagtattaaaaaaaaatccaaatacagttacatgcttattttcaatatattctttaatgtaacttaaagagtatattgacacggacaaggaaactaaaccgataagtaggagaaagaatgcagctactccatctatcaggaattcattgaacgaaaaaacattgttaggtgctatttcaaaatgaattgaacttccgtttattatgacattcaacgcgagtattatcaaaaagatggatccaatgatagtaggaatgaaaaagggttttccactcccgtgttttctaaacattaacgagaataaagctccaaagatgtaggatattatcaccatccaaaataatgatatcgagtcttcaaacattgaaatcataaataccgtctaaaccctctgaaaattttatcattataggaaacttgagatttgtacaagtacatcaatatttaattgttatgtatttctgaaattttgagtttttgagttttttataaaatgaataaattaaatcagccaaatttaccatactattgattcaggttagcccatccaggataaataattcaaattattttctaatgaaaaaaatgtaaattacataatattcaatttattgaatttatgaatttaacaaaatttaagaattgagccgactaaatacaagtagttgaaacaaaaaagtaaaaaattaaaaacatatttgacacattttcccgtcaaatcctatatagaagctgacattctatcaaaagaatccacttggcgaattatggatcgaataagacaagcaggtgcaaagggaataactgccgaagagataacacagcaggaacaaattcctgtaagtatagtatacacaactttgaaagaattatacaggctggaatatgtgttcctttatcctagacaaaaaaaggaaaagggtgaaaggaagaagagatttgtttgtgagagagggtcttggggtaaatatggtattgacaaggaatttgacgcaataataaaggtcaatggaataacagaaggagtaatgaatgatctgcgccagcctataatgaaaatatttgatgaaatttatgaaaaattttcatcaaaaaaagagcttcatcaattcttgccaacaaaacattcgaacatttgtccaaattgtcagaggagtcatgaatcaatggagtttttttatgcaatattattgagaagtatagatcttatgataacagagtccaaacagattaaggatttcttaattgagaaaggatatgcttacgaggaacaaatatagttctaaaagaggtagcttcctttaataaaatagctcaaacaaaagttcagaacaaaggatccttttttgaaatacctattttaaacttaatagagattcggtcattttgctagacaatgagaggaaatgttttccactatctgttaaatgatatagacgtaaatctgcatatacgttataagcttcttttgttgaagggaatccaagttctcttcatctgaacaaaagagagatatacctcgtacattatttttgattgaatagcacctttatttcctatagttttaataatctgggctttgatttctaagcgacttctatttttcatagtatggttaaagtgcacaaaactaaaatataagtgaccaaaaaataacattactgaagatcattaggtagttttactagaattattataacaaatccccttttgtggaatttttattgtctattcattactatttcgtcagttgcaattcctcttttggccgagttaagttgagtaaccacattttactttgaagttgataattatttattagatctcaatcgacgtgaggctgaaaagtacatgcaaactgaagtttttttatatggaaggctattatttccatatcagccggatataatgataaatacagacattggaaaggatcttaaaaatcaaaacctatggctcgtagaaacctataattaacgagaaaataacaattatattaaaatcaaagacgattaaggtatgacaagggtaaaattctacagcaaccaacaattatcagaaattgaaaaaagcatcaatgaatttcttaaaaaagaagaggtaaaacaattaattaacattaaatttgccgtcgttaacagagatggcagtaatgaatatactgcactaattatttatgaggaaaacatgtctcttggtaaagaagatcctcaaatgtatgaataattccacattgaagtacgaggaacgtaaatacacaattgagaacttgctttttaacaactagaataggacattctcgatttatttattttttatactaaccccttttacgtggaaaaatcaaattactctcaaagatagaaaaattatgcttatgtaacaaaataatagactaatcagatataatgaatgaaaagatttctactgtcaaaaaaaatagagaaaattattgttgtgctagagcgttgttaccagtgttttcttggttttgcaagttgatgttgttgccagaggctacggtatcatcacctgaaactacttgactattttggttggacgattgagattggccaataccctgtgatgcagaattctctccgttatggttattgttattgtcatcatcgtggtcatcatcatcaatgtccttagacccaaaatcgccatcatagtcttcgccataatgttctctcaaatttttgtcgcagtctttttcattgtcttcataataatcctcatcatccttacacttgtctttgtctacaccatagtgggcaaaggcaaaatcaagactcgatgtcgttgggcccattaccattactgtcacaaatactgctacaattagtaatgctgttgttttgctattacttatctttaacattttaatcttgaattctctagaaagaatatatgatttaataattttctaagataattaggtaattaatttacagtaataatatgcagaaatttttctaattatgtttttataatatgttgatttaaatgccacaattagaaaagagatcaagagaactttggttgcggaactagcctttgaatagtatttcaataattaacaagtataaactattaaatgcagattcttcgaatgctgtggatcagttcagacctccgttgaaataatgaccattgaatttaatctcagttggatgacattttattagcataaacccaggattatctagcatagttataggtttctatttctcataccgtcatgatttcatgtagtcgatatttctaggctaaaggtagtgaatttaattgatgatagatagcgaagactactaattatgacagaacagatttttatgttaggagccctctcatgctaaacccaaaggttcaaatcccaacctgatggatcatatgacaaatcctcaggtaccataattggatctcaatccagttattctcattcaagtcttgcgttcttatacgtaataacatcatcatgtagaaacagtctagtgaaatatgcattatagggaaactgatttaccaaatactttggatatggacagatataggaccctggaaagggttcttgatgccaccactcttcgagtaaaatacattgattaaaatgttgatttttaaataataaagttgcacaatctgcagttaaacgtacgtgtttatcctttctattcctgtctttattaacaatgttgacaatctcctcttttagtttattaaacgggtctaaatttccaaccattgcctgcacataatatagcgtcaagtcaataatcattagatttcctttttctatattttcttggtaattggtaatttgggatgaaaagttttcaatataatctctattgtttaaatttacggatgcatgaagacagagttgatcacgctttaatccttcattgatataagttgctattgcattatctaagtcagattcgttttcataaagaagaatgatatgcccattataagggggactaattaggatattctcataattaatttcatgagttaatttgtaatagaatgctgccgtcttaaacgttagtaacatatgataaattctattattgcttaatgagttaaaattacataccggcaattaaaatgtgttattagatattaagcataaatgcattctgaaggtttgttatctatatcttgtgtattaaaatcatcagcttgttgttgcttgttgttattcatgtttctcaatcttttgtttcacatcttacttgaaataaacaaaaatatgatgataaatatgatacaatttttaattgaaacatcttcatcaaagttagagttccaaaaattcaattaatacactacaaattattgtcctgcaataagtacaagaaaaatgatttctactactcctctttttgtcgtgttgcataagacctggtatcagaggttctaataatattttacactgtatctttctttaacgaatctaatatactctatttctatgaatggaattcttaaatatgttctctgcattaaaattatgatgaaaaatatttccttgttcttatgcgttttatctataacatccatattgtatttgtataatctttcggctagtcccgcccagtcgcagtcagggggcggattagagattaccccgacggttcaatggagtgaaaatttagaagggactttcagttattgcgtttatgaaggaacagtcacacttgattcagttaatgatcctcaagcattttgcattgttccaacttcgaatttgcctttccaaaatatgcaatctagtgtgaatgataatgttgatacttatctgttacaacaaatagagactccggctggtctatttaaggatggtactccatactctgtctgtgttgtgtttgctccattctcgccccaagacgctggatttaataccgcagaaagttgccaacaattcacaaacaaaaaaggtagtcatcctgaagaaccctttatcaacctagatgatggggtattgtttacaaataaccagtaatttttttgtactcattctatttatagaagaaaatatatcttcatttaagcggtaggtaagttagaaaaataaatgcataaactatctaacttgttcctcctttagtatcatttagagaagataattagccaaacaataaataataccatagggaattttagggtacattaaaatgcttgcgagatatcgcaacctggactacaaaagactcgattatgtattttataccacaagcaacttaatccccacggattcacacaactatatagatctttaacaaaagtcttgattattcctaaaagaatatcaatacgtatcttactaaattcatattgatcttttcaaatatatttggagatgagtcagacttaccacatcatctagttagaaacaatttcttgattgaattaaaattttgataaggctggaggcatacatcttcactgaggttagcaatagtgtgcttgtttctgcataaatgctcaccgaaatccttgacaatgtcatatgacaagagagataattcttaaatctttatagacaacgaaatcggttaatagcgccgataggtgattgctcattggatttcaatttcacctttaattgctgattctattgcatggatgaacctttttctttcaatcggtttctttaccaattgttccatttttacattagacatagtatctatgataatatctgcaccctctatacctgaaataaacaatacctttgcgcctttgtctcttgattttattttgttatggaactccacaccatttattttcggcattttaatatccaatattataagatcgtaatagtaaggagctgattgctcaaatctctctaacgccaggactggatcactaaatccttctataatataacttccggattccaaaaattttttgtacacttggaggttgtcttcttggtcctccacaatcaaaattttgatttctttactttctttgtcataaccgatttttctatcgtttatacctataataggatcagtaaattcattgttgctagccaatgatgaatatgtagaagttccatgttgaatatttgactctgatcttctcttaaatggattcagtatgggtcggttatcctttaatgccacagaatatatgggatagtcagcctggtcagaagtaattgtgtatcttgcaatttcttcaaatatgtattctttgtacgattttacaatatcatacaagttttttcctattgccatgccatttggattggccttggagtttatttttgaacatatatttaccgtggagccaaagagatcttgggcctttgatgatgaagattttgctaattccaccattccgtaatctgcacttatcctgtagttaagcggaggtagactttcctgagtcatttttgagttgattatgctatgagcagctatcgtggtgattccgcattctattacatcctgaaagacaaacttgttgctgtccaagggattagtaaaagtgtttggaaaatagtatatgagacaatcaccagcatttttgattattgttgcaccaaagtttttagcaattgaagccatagcatttaaaaagatggaataatagttgctgatctccaagtcattgagtcttgataccgtttttgtggagttcatcatatcaataaagcatatgcagcatttttgacgattacctgaaaaaagtatttctccatcttttataatgttccaataattagctcgaggaataatcgaatgttgattagattcactgccattttgtctaggaattaacggaaattcatcatagtctccgctatgataggctatgtatttttcactactttgatcctcggatgacaatatgtaattataataccaatacatattattaacaatatactttttgattggtacttacgtagaacgattcttatatgaggaaagattgttttacatctaatttactctttcacaattcaaattctataattagttatcacggttataattggcattgtcaaaaaaaaagaaaagaatattgtcttaaaataaaggacatgattattaatgtaaatattgtcttgaatgagtaaacgataaacacgctgaataaagctactcaaccgaccatcctaaaccgaagaccattagatgctaaagatctagaggtagattgaaatctttgacaatatttctgagtttgtctttggtttcaatgttaaggttcttaatagaattctttataccatgcatccagcccactacaaatttactgtttggattgattttgactctttcaaatattttctgctgtatatcaattgataactgttggaaattcattcccaagctggtacccataccaaaagatagattattgtatctctccaagtcgcataaactcaatagttgattttgcaacaactgatcctgtagtggaaagctttttcccaaacctaaacccaagcccgccgcaaattcagaaccttgtgtagccatataaaacgcttcctcttgcagttttgtacttaaaccgtgaaaaatgtgtccgataccatcgccgaaacccctagcaaagtcctgcagtcgatcagatgtaacatgattaacaattgtataacgaaagtctttgcttaggtacgaaaagatgtgtcccaacgaaaatcctgcctcaaagcctaatattctgttattctctattattttgaataagtgacttctaatttgctcaggcatgtaaggaagaatattgccaaatcctgtagcaagtcccctattgaaatgttcttttttcaataaatagtctactaattcatgtctatctttattgttaagatatttgaaagaatttccaatgccaattcccaatcctcttgccaactcagcgttgacgtctgctttctcaatccacattcgcctagtattggtgctcatggtgacgatattctctccaattccagtgccaaaccctcttgcaaactgagcattctcatcaacccattgaagtgatttattgcctatttcatcgtcaagataatgtaatgtagagctgaatccaatgcctaaccctcttctaaactgcaaatgatgttgagaatacgtgaagatggtatgatgaaattcagtttcataatatctataagctcttccaattccagtgccgagacctctcgcaaaggcatcattcacctcagctttatcaaaaagttcattctgtgaaacctcatcaaggtacttaaatatttgtcccaaaccatcacccaaaccaattgcgaactcggggttttgactacattcaaaccaaatttgctctttgagtttatcatcaatgtacaaaaaactcattccaaacccattacccaatcccctggccagatgcacattattctttacaagatgatctaaaatctcttttttgaagtgttcatttaagtatttgaaagaatatccgaatccattcccaataccaaacgccaatccttggttctctttaatcttaacttgcaatatctcatcttgtagtttgtcatcttggtaagtaaagagaaatcctatccccattcctagacctctcgcaaaggcatcattcacttcagcgctttcaaataatactttctgaaatacttggtctgaatatctaaatattcttccataaccaaaacctaaaccaaaagcaaattcagtatttgtcttcattcgttcccttatcttatcctgcagtccttgatcgagatatggaaaagaatatccgattccaaaccctaatcccttgtcaaactcgctatttctctcagctcgtcttaatatatcactccgggtattttcgtcaaaatatctgaaaatgtatccaaagccatagcccaagccaaaagcaaaaccgctattggtctcaattcttgcaaacgccttttcctgaagtatcttgcccagatatgaccatgtgaacccaaatccaaaccctagtcccttgtcaaattctatatttttgtcagcccgtaaaaagaactggttttgaaattcctgaggaaaatgttttagtacaaatccaaatccaaccccaagtcctaggtcaaatttgatgttttggttcgtcatggacagaatttgtgcttgtttatttgtagatagatatccaaagtatattccaaagcccaaacccataccatgggcgaattcgccatcactttccgtatgcattataatggcagcaggtgtttcatctttaccggtaaaggatatatacattccaaaccctaggataaattccgagtgctttagtgccctgttaaaaatttctttgtgaaatgtacttggtaaaaacttaaaatttatggctaggcccattccaagccccttgtcaaactcgctgttattttctcccatcttaaatgtagcttttctagattctaaactcatagaaggcatggccagtccaaatccacaccccaagccccttgtcagttcactgtttcccttagccttttcaaaaacttccgccttgagatcgttcccaagtgaatcgtatgtatagcctatacccatacctagaccatctgcaaattgatcattggtttctatatgttgaaaaatctctttcctagtctccggtgaaacatacccgataatttttccaaggctttgaccaaggtacctggcaaacagcattgctttgtaaattttccttaatatctctgttttgtgtcttgagccaagagagaggaaattttgacccatgctctctgctaaacccaaaccaaattcaatgtctatatcaactctgcttaagatgatagattgtagttcctcatctaaaatttggaaacagtctccaacgccgtaccctaaagctctttcgaacttgacatgctttttgaagtattcatagatatgggcgggtaggaatgggcttgtagtattggaaggtataaacgaaaaatttcttcctaaataggttccaaataaataaacctggctttcttcttcgggtatgatattaaagaaattggttattaaaaatctcatgattttcattcttacaaagtcatcgaatctgatagattccctggcagcatcatgcatagcataaaagaatcctgatagatagacccaagtaattaactttcttgaaggctcttggggagcaacgcttccaaagatatctaactgaagtttttctatattgtttatgtctctatccaggcctgtttcataagcgaattttaatgtataaagaaattcagactcggctcttcgttcatcaaaaccactgattagaccaaattgctgctcatagtattcagtacttcgtaatagcctttgggcaataacaataggatttaccaagatgtgggaaagttctctcttgtcttctgcagtggttaaattgtgaagtgagtgattattcaggtaaacttgtttctcttttgagcctaattcgttgtaatagtcaaatatggttaatggggaaggctctttttgccataatacagtagagattttgtcaatgtccttttcaacgtattttttatatatgtttgtaaaaactgaaatttgtgtaccatactgctttagcatttccttaatccgctccctgctgtatgtaatttcacttctatagatatcatggagtttagtaagggaaaaccggtattcctccataaaagatggtcttagtgccaagaacagattgcttgcttttacatttgagctcaatatctcaattactcttagaccattattaggatcctttcttagaagatcttctgggaaattgtcccaaagtattgcatcgttctcgttaattctttttattagttcaaaaaggtctgtccttccaacttcctctatccctaccgtgttccttggattaagaataataatgctatcatattctgtaatttttcgcttgataatctcataaagtattcttgatttgccgcatccacttggaccaaaaagaaataatttgctaaaatggcgtatattctcaaatccatcataatctacaaaaggaatcgtctgtagatcaaaagtcaactggacgttaattgcgatacttatcttctggagtgtctcgtctatactaccgctgtttcttagtattgcatacgagacatctattggctccatcgacatttgtgttccttgttgattagtctcggcgttcatttaccttcttttccaaattgttgatatatcgtgatggtccacaaaattataaaaggctttgctcgataagataaaattattatttatctaactatagcctaataacatataattaaattaatttataacttggactattccgggtcttgtgttttatggtcaaagaagattattttttccacctagtattcctttaacctttcaagtaatacatgtaacaagatcaatggatgaaaaatgattatcggaggctttatcatatgtattacttcaaaaaaatattttgtagctattttacttttaggggtcaagagcagtacacgatgagagtatttttgcaataaacgtgttaagaggtttggacgaatcccttcagtcgtagaccattgaaagtcctctccagttcctaatagccacggaagtttgttagtttttgaaattcttttttgaaatgtcaaagcaaatctggatttacttcgatctaatgggcccttttttttgtattgcttcaaggttttgtccagagtcagggctccaatgcacgccacagtaattccttgtgcatagattgggttaaatgaggaaactgaatcaccaaacgcaatgaagttctctggccatgatttcattttttcataatgatactgcctgctaccggttgtccgaaatccgtatatttggttatcgaactcaaaatcttttattatgttatacatatctgttgtttccaatttcattatgtattgcaggaatccattttgatctgttggcgggtaaagccctcctatacccagaatactaattaaccatgacgaatcttcaactggataaattacacccattcgtggattaaaggggggatttgtaaatactatggttggtataatcttgtgcaaaggaggttgattaggggaaaaattgtgtatatttggcttataccgacaggtggaatagcctatgaaggacccgatatttgtttccgatggtttgccataaccgagttcttcaagccattcagccgttcttgatcctcttccgctggtgtctacaactaaatctgcagatatgatctcttccgaatttgtatttaggcaaatggcagttaggcctttacacatactgatttccttttgcgtggatttttcagttactagtccttttaccatcgttttttcacgtattataatatttgcaaaattttctattatttcatttctaatctcgtattccagaagttgtcgtgtgcatgcaatcgtagtaatatcggatctaaagttcagtgagtaccctttcccaacataatatcgtacatcattaagcagatccaaagtgtgcgcccctttgagaacaagttttttttctaaattgggaaacagttctaaaagtattttttttcctttgactaataatacatgagtgtggtttgattgaggcgttccattcctggggcctgtatgcaaagggtaagtatccttctctataataatgactctctcataatactttgataagacccttgcagccaacaagcctgcaattccacctccgataaccaaagcttgttgttcaggaattctctccatttattggggtttgctgtggtacacgtttatttaataatttgctttaattttataaactaaagagctgatatctcctaatcatttccagcctgcttagaatatattgacattttcaaactaattactaggacttcattttttactgctaattgctatacattatatttgaaatcttaagaatgatgttcctataattaaaaaactctcttaaaagtcttatttgattcttggagtcctttaccaaatcaagtatactttatgcacctagaattctaataccgttaaaagttgtcaatctagtcaaaaatctaccaataccttttatcaattctcttattctaatattgccattaatttatccccagttgcgcatccttgtaaagactattactcagattaaagatcttgtcagtcctcttaaaattccgaaacaaagcacaatacttgtttaagtcatcataactctactagaagttatacaatcactatgatcctgcggtgaaaaacccatgacttatatttattttaaatgtccttccattcgcagttcaaaaagtatcttcattaaagtatcataatcaatattaacttcgtttagaataaatgaatgatctgttcttccatgtttgttaataaatcttaaaattgactgctttttcttttcatatactctatcattcaccatcaagtaataatgaagataagtcgagtgactttcctattttgatatgggatcggccattttgacattatcacaggtgtctctaatttgtcttcattaagaatggaaacacctatcaattaaaaaattaaggtaataactcctgtatagtaaataatagtactttaatatgccatgtgcaaaacattgtaaattgtcaatttaagtcagaagatgatcagttaattccaaaaagtttattcttaatcatgcacctacaccaccaacagaaacaaacatcactgctaattaatgatgcaataatattatattaaaatgagattgcatgctgcatagattagcatatctatcttaaggtcttatgaatgtgatagattaatgcctttcccccccccctccacctccatcacatttacaattcctttatctaacgactaaaggatggaaaacaggaaaagtacatgagatagaaatttagtttgttgagcaaaataaaaaatattatgttttatcagagcacaaaaaaaagcacattaggttcagaatattatacattaccctaaaatagcttttgaagtggataatcaaatcttcaatggttatggaagggtcgttgaagatgttgtagagaaagatttgattcatagagtttcagaattgatggataagaagtacgggtggagtgacggattaatcgtagaattgtactcttcgaattaaacaaaatatacatgtattgagacaatcttctaaacctctttccttatctttggattattcaaccttgaatggtatcccgatgattcattccatacaaataacctaattttaattatttgtaaattttataaatggttcacaaagaagtccgccttttaaataatatgttgcataaaacctgtaaatgtcagacattaaaaactcaatggaagatacaggcgaaagtatgaaaagaggagcaaagaaagcaggcaacagaatagaagaaggggccgaagaagcaaaagacaaggtggactaatagtccattaatttttttgataatgcttgtaatattatagtttgacttgtctgttttaaaatatgtgtttgatagcagctgtaaataagaactccatcaaaatctaattttatgcataatcaataaaaagattgtatattaataattaatagtaacagatctcatatacctgatggattcgaagcccatcagtgcagaatttgcagttattaagtatcattgaatttatctggaaattagactcataacattggctattactaaaaccatcgggtccgatccattgatatgctttagatgaaaaggtaaaaattttgatgaaaagcaacctcacacaaagtttgtaagaaatattatttctcttttcagtagaatcccatttaaagaaccgatatcagcattaatcccacggatgaaaactgtaactaatgaattaaataataattgctataaaaattcaatttcaaattgacctgattagactgcactattaagacttacccgagttaatcaagcatatctttcagtatattttttttgattgccaaagcttgtgatattagaccaaaacaaactattccctactaatgaaatttaaatactagggttttagataaattatgatgaaaatcaccaatagattgattcagaccatctttttgttagcagtttctatttctttgatagtagtggctgttaattcgaatcaggtttttgctcaaaatccttcgaatacggactcaaatgtcctgaaaggagctataacaagtacttcaaatgacggcaatacaacggagcctgcctgggtattaggtggagtgtatagatttaccgaatttaattcctcctctcctgcttttaacgcttctttctatatgactaaaatagatggtacagccgaacatattcactctatatatgacctcaagttatcgggtagcccggttgttgatagcagttcaaactctacaaaccttaatggaacaacaacagtaacgcttaaagacggaccagtttcaaatgtgccaacacaaatagagttactagatgaaagtgcgatagccattactgttgatagcaattcgactaataatcactttggaactactccaatctatggaactcagcatctcatctgtgtagaagccccagatctgtgcaaataaccctttttgggtttattacctctttatttaagcaagatcattatcttttttttaaataaactaatttttaagtagaggaattattctacgcagaattagaatcccatttaaagaaccgatatcagcacctatcgtcacgggcccaaactaacagttttgttgtagggtaataatatcatgatttgctgggatttgaactattatccaaacacgcctgtcaaattatcctgggttctactccacctccaatgaagtccacaatgatctattcaataggggttggatatttggaaaattataaaaaatctaacattgattctatgaatttttaaaaattgtagaaaaagaaatggctattcaggatgtttcattcaatctagtaaaatctccaaacactattgaaccaggtgtaatgatttccatagattctttatacaatttgttagctcttttatcgctttccacagccttcataacttcatctacatgcttggcgtctctataggatagtatttctaaatttacatcttcgtcatcattagcagaaatgatttttgatatatttacaaaatccatcatgttttctcttgtatttaatctatatacaaattttgacacgcaatgtttcctgaaaaaatcatccgtttgcttgccaatctttgctaaagcatcacgatccttctttggggcgcggataaaaacaatttggatcagacctccggtatccttttggtgttcaaagttatcagaattactcatacgaatcgatatgaattgatattataaaaataacaaaggttttgaccttgttactactcgttatgtcgataaatgggggattatattcaaatttgaatcttatcccccggcccgaaccccgtacaaatgaagtatatacaagattaccatagattttttttggtggagcccccatctgaaagccgcagattcgaatcccactcttatttgatatcaatgaaaaagatagcgggattgatgttaacatctaatttgttgccccttgaatatttgagtaatatctatcaatattcaaactttcacaatattgtgtcgaaagatattcaatattgaatcatatgcccatgaaagatatctaattcttaaatattgccatatctatacccgtttatgacatggacaagtggttttggaaatttaccttcaggtggaatacaaacattttgggtcgaagggttcgttggagaaccagctcagtacataatggctaatcctctgaatcccggtggttcattaatgataagtgattttacaaaggtaatgaacaacgatggatcaataacttatatggtgactattattaatgtaggaactataagtactaactttaatctaataggaggaagtgtgagttaatatgaaatttaatgtaattgttgatagctttggtaatatcgttggagcattccaatctgaatttataaaaaaagaagatggaaaggaaagaaagagtggtatattccttaaaccagatcagaaaatgttcgaaattgaagtggataaccaaataatcaaagaacatccttcaaaattacaagaacaaatgcaaaaaattgtcgatacaaaatttgatctacgaccttatttgaaaaaataagtgctttaatctagattaaatctttttttataaatgctaatgccttattcggtaggaacccccgtccgaaaggtgtagatttgaatcccaacctttgtcttgtttattttttgtattttttgcaaactatatgcatactgaaagaatggtaattattcaatagacaaagtattatgcgaatttgctcattatcctaatcctaacatcacatgcctaaaacggtattatgtctaatacgtaaccttcattcctaacttcatagtcggattttgaaagataaagtaagttaataggcattaaaaaaaatattgctattaatcacgtttacataaaaagtaaaggttattgttcttctgtatcctcttgtaattcttcactaattatctgtcctcgtatctccccgttaggattctgttgagtatgtatattagcataggtgtttccatcgttaaaagcgtctactaaatcagaaatttgcattccttcaagagtgcctgaaagatcttctgagttaattgttccactttctgaaacttcatcctgaggcgattcaaattcaaataaagtagctactactggtccattctgaccttcaattccaaaatgaatgtgtcctgctgttactgcttctatatcggtggcagtaatagtataatcaatgctaccaccatcgttagatggactgaaatctgcaattcctgttgcttgtgtgttcactggcggaacctcttgatctcctgaaagaactgtactgtattctacattgctactaccgttattattgtcatcaccattgttgttgttgttgctattggtattggtattggtgtcgttagcctgtgcaaaagattgagatattgcaaccgaggaacctattccaaataatcccaagaccaacactgctattattgatgaaacaaaaaatggttttgtatttcttatattcattagcatacattgaatgtcataatatataactaaatttctctaggtatgaaggatatgtgcagaaccttgtatttatttaactaaatttatctcaatggatctaaattatcttgtttttagtaaatggatgtcattgttaggattcctgtcgacggcgaaagtagaaacccgtgactactgacatgtacataatcccatctattcctcatttaattagattccatacatcgattagattccctgtttttattctattgcttcgggtcccactccccatagttcctatttataccttaacattttctaatcgataaagtagttattggaattcacgactttcgccagaagatccgagtcgcagcctttgtcttgtttatttttgctcaaagacaaactccatcgtcacattttgtagcgcatcaattaaaagtaatgttacgtccaaagcgagtagcatacctaattttaattataatgcatattcccagtacaatataacctacattatacaaaagatcgaaaaacccagtagtatagataattttaaaaagatcattgaatccaaaaaggaaatctgcaataaaaaacaagagtccaaatgatgcaatcaaaatccagtaattatgtcccttgtttaatgagatagatcttcctctaagataataagcgatagctactagtataataaaagcatctaaaacaaggtaactaaaaaggagtattaaaccaattatatcattactaaaagtataaatttcaaatataaatattgaaatatacaatatatatattacaaaaagagagaaggtaactaaagcgcttataataaaacctaattctattttatacgatttatttaacaagtataagtataaaataaagaaaatatatcctgttaaataaaagcaatctgcaaaggatggatatgcgtctatccgtagaaatccgtcatagtatgcatatagaaattcagcagtaagccagcatagtagtgaagataaaataaacaaatatgttttatgaataccccgtatagaatttgttgacttttgtatgaagattatgatcaaaaaggtaactataccagctgacaaaatgtttggaatattaaattgcggataaaaacctataaaataaaaagaaagcgagattgagcctgtaaaaatgaaaataattattaaggatcttgtcgagaagccttgagaataatttttacttacagaattcacttttaaaaactcttccaaaagaaaaggtttgatggtgataaataataagccgtagatggtccatttaattataaataactagtagtaataattgcctttactacctttcaatatttgcactatcgtatgcggtcgcaagagcttggctattttgtagatccccttggtttagattttgacttggacttccaattacagatggcaacttggcaacgtgcgattgattcgtaagaacactccctggaggaaccaaggtattgtctggaatttcaactcctgttatgatactgccgagcctgataactacgttgttgcctatctttgaatcaagcacggcactttttactccaattaatgtattgtttccaatccaaactggtccatggacaagtgagtcatgtgccaagctcacatttccgctgatgaaaattgcataccctttatcaaatcgtgtgtcattgcctagtaacctatctccttccttagagaaccgtttgttatcaacattggtgccgtttctagcggcatcaagagcatgtagaataactccatcctggatgtttgaataatcaccaacgtgaatcggaatgccttcatcagccctacaaacagcagtaggggccactagtaccttctttccgattgaacaatcaccgattattattgcaaatggatgtacaaatgcagaatcatcaattttaggggatgtaacattttgaactacaaatgtctttacgtttgacattacgtttggccattggttatataccgatgcattgttattagcatcttgtcccatggcgaaaggattttgatacacgaaactaacagttattactaaaatcaaagataccgttattattgcaatagatttgatatttccactattttccactacatttgttataaattgcaaaatataaacaattaccttatgaagtatgtaaatgacatttcataagaaattttactatagttttgtctgtttagacatgttagaactagatataaattttgtatcctttggtggcaactcatcaattagtattgccattattttagctctcaaggttagcaaattctctttatcaatagcaaagccatcacttgttatctctccatcgtcttgataggtacgtttgataagagaatagaatcctttgtaagctggctttcctggatgctttttagatagattggtgactgctatctccaccttatctgtcaatatttaccagaattaaaacctctatcaattaaatatatagattgctgattgtgacaagcataacaatggattaaagatccttacattactatagatccgatatcagccaaatagtaacaaagaggattaggccactgttagagttactattcaataaattgctaggctgatctaatctttgtttctgaatttattctgctccgctgttcaagaggcggcgctgtattcacggtagacgagaacaacacatacggaattttcattcttggataacaccaaaaataaaagttaaatgagaatgttgatattatctgtctaaaggaaaaaaaacggactaaagacgatggtttctaaaaaagatgaatataaagtttgattccaataataattgtgatgagtaatcactctaagaaccataataaattgtatctagttatatcattctttattgcaagtgcattgatttttacatccctaatcgcgagtaatggtgcccttgctcaaccatctaattctaataaattatcaaaagttgaaaaatgtgcttcaggagatcttccaccttcggcttgcaaaaaagcttctgaccggagccaaacaaatagtggtggtatagacccaggtcaagcaggtaatggtagtgctagaacaaatatggatgggaatggtggtagagcaagtacggatagttctccgggtggtttgaataccgcaaattcaaccattaaccagaatcagcaatctactcaattatgcgccacaggcaacatcaaagcgttaccgcatagtactatcatatgtaataacaatgctgatttagaccaagcaaataatggagatattagtactgatcaaacagccgatggtaggttaacaaaaccataaccactaggttgtttaaaaaattgatgtcaaatgtaaaactaaaagttctccagatatgagaaatgcttagggctggtcttttcaatagaaacccgcatggtctatttatatagcaaacaaaaaagtcgggcttaattttagttttggaggagttcaggttaattcattggtaaacgacgtgtcggcagaaaagggtggagttcaaggaacaaatcaggctaccccctgggcgatataatcacagctctcgactggtttccgattagtaatactcatgacctattgtcatatattgaaaacaataaattagccggggataaaatcaccgtttcaatatacagtaacaatcagactcacaacataatagcaaccataggagaaaggccaatttcagtatgtatatacctcatcatatattacagcacaaacaccattattttaagagacagggatcatcaatactacaggtcatacattaacgaaataatcacaaaatggaaggcctgtgttagatgagttgaagaaggaacttgatgatttacattaaaaagcgcgtttgtttctttgataatttaatctattaattcaatttggaaatgatttcaattagttaacaatatggataatcacattcggaattttttagaatatgaacttttagatgaacttttttatcttaaattgcgctgttgaaaacagatcttgctataccctgtgagataatatatgataatttaggatcctttccaattaaaagccttcaatgagattattatttctattctaaaggttttagcgacggcaagtcgttgactcttttttgaaaatatctgcatcactatgaagtgctgttgtttttgtaaatttggttaaatccttcaacacttttggattattcttcataatgagttcagcttgataattttaatgaatattattatatttgtgaggttatgccaatgagtgccatttataagaagaattatatattagaatgttctttgtcaatatacatttgattaccaaaacaattttagcatgtgcggcaatagtaattgcattcgctttgattatcgcaccgtcggtcttaggaaatgatgcattcgcaggaaagaaatcgcttttccaatcaattaagcagtatgactctaagaagcaaagcagcaagattgtatccgatggagatataaaaaaatctggcaataactttaacatccaaaaacaggaaaacaaaggcggcaattcagcagctcaatagatagatacatcatattttttttcatgcgctcaaaaccgttgaattgattagtatagtatcctttagcattgcgtaattcattcacaagtattatatgaggatttcttatatctaacacattttgaatcttttcataacaaaaaatggaaattgggtccatccacttcctctccactctcgacatcactatgtctacttccactcttcttctgtattctattcacatataactgagcaaaaggaaaaagacacaacctttatttcatcacacaaatattttacctcatttcataaactcaaaacatgtctaatatctatccctctatagttacacagtttttttgcagaacattctttggtatttaaatccaaggagatcttttcagtaacaggttgctcaactcagttaaatgaaaatgcatattaagttttatgaataaaaaaatttccttgtcagttttgtccatatttattgcagcagctctcatcggctctgtagttgcttatggggacaatatcgcatatgcaggtggaaaaaacaaaaaatctaatgacgcagctcaacttctagaacaatcttcaaatactactgaacaatcaacctgtggttctgaagataagaccattgcctcctgtaacaacttggccttcacagccaacttaaatgatggcaacaatgcattaggtcaacaataaaagttaaagccaacctcaatccttttttttgttatatcctttttatcatttcttgtcaaatatctaatttcaaataggtgagcaattgtggttataaaagctatgttcaatctgtattttagttttgcaaaatgttttgtcttgtcgactcaggcactacagaagcatagacaaattctgttcctgtattagcacttttctcgctttgcttacatcagccgtatgaatatcttttctttatttattgtcataaaattattattaatggtcttaggcgtatttagtaagtatctatggtcccagattaaattatcaattagtcgcctcatacctccaattgctatatttaaaaaaaattagaaaaacagtctaaaacgatttacgattttaacaatatcaaaatatcatgcaataatcatttattgctctaagcgcggcgtttctattcatacaaaatgaatcaaggtttgcagaccggattattctttactaacagagtatacaattcaggttgttcgttttttaacttgtctcttgatgatggaggaaatggacccaaaaatcttaaatgattttaacttctctttgaggattaaaatccaattgccattgtgagtggcgtactatgacaaacaatcctgttgtggcataactcaggattggactaggctctattagtaacaggatactggaacaatgttttattttgctatcgtattcttatctgtaatggcgatagacacagctttttctatcatctttgatgcattctcatgtatcggatttgactgatgtactaacaatagtttttcaactttaaggttcacaagtctccctgccgatacaatggaagtttcccaatcctttgttactgtgtgtggaggaataaacaaaccgtcaatatttaagatagaaataaagagaatgtctcccccaatgagaatccgacgctccctgttatacagggaaatatggcccggagtatgtccatgagtatgaataacttgtagagtgtttcctatgatatatccatctttcaataagatatctatggcaactggcccgacgtgtatgtttttaaacttttttgatactgtattaatatcagttcccattatttttaaaatgtgtgcaaaggcatccttaactggtggtccattatactctaactcatgtaacaagtacgatgcttctatccagtgagaatagattttggcacctttttttctccttaattcatttacagcctcaacatggtctggatgcaaatgtgtcagaacgattgggttaatatctttgatatcaatccctgcttttaacaaataagattcaaacattggaatactgtaaataaaacaagtgtcaacaagagtatagtctcggggcttttcttcaatgaggtaggacaccatccctacagttggaattggatgatccaatctatctattgaatgcaccgttgaaacaatttctaccatacaacattatggttctctcctatcaataagggttttgttatttaaagcaaaaatattacaatcacgtctgtttattaacatcgaatttcagaagaaatggtttggcttgattgcatttttagttgattgttattctctttagctcacagtatattgatccaattcctttaaagcttcatcaatctgcttttccaactcaaatagacaaatctaatttgtatcgataaatgagaaaaataatacgcttttatagttatatataccagagtacacatgtctaacatagatttttcagaattgattttatcaaaaaaaggtgtagttttatcaaatcgccaagttgtaggaaatataattggtgaaagagatgattctattatagtagaaaaggacaaagtaagtgaaaatgtatacacgataccgaaatccaagatcgaaagctatgatggtacacaattaacattaaaaagtactgaaaccgaacttagagcgtttgagcaaaaaagggaaaatacaggtgaatcagttctaggcaatataacagacaagctagaagatgtcaaagacaaggtagtaggtactacaaaagatctcgcaaataagacaaaagatacaatagcttctacttcttctattggacaagaacagtcttctggtggagatagattatacgaagaaggcggacctggaacagatacaagtagaaatgacgatcctttatcagagtatcgagataaagaacccatgacacctgctaaaattaacacaggcgaaccaactgcggtaaaaagagatccaagcgatcaaaaaataacatcagaaggccaaactgggacaaatacacaggaagcccaagaagagtatcgtaaacgaggtatgacaaaggtggattcggattctcatacgcacgaaggttcatcagtcaatcaaagtaaacagagtagttccgaagtagataatggaagaaattcagacgaaaattcaacaaatgtaaaggcaaccttttcctgcgaaacatgtggacaaacatttgactcaagacaagttttgaaggaacatactagcatgactcactacaagtaattactaaatatctattgatatagccgataggaacactcttagattagcgaaattcctactcctaagaacataatgtcatgtcccatcatcctcctaaaggggtgtcgccatcaaatttattttaagattaaaagcccaaacccattttattctggttaacgatattcgcaaggtaagtatagatattatggcactccaaagatcagattagatgaattattagattggcatttggtaggtatgggatgtgtatctattgcaggtttcttggcaacaatttattctagtcgaaacaataagaatactaacgagatatttgatagggtttgccgatagacttaatttgtgcggtcttaaatttacactagaggaaaataattgtggtatgacatatctattaaaaaggcaatgcctttccctaatcctaatctttgtgaattatgttatctagggcaacaattgttgagctcttaaagaacaaactagtagaaattataatttagaagcacgttatggcttgtcaatgtgaacgataagtgtaatcattgactaattaattattacgacattaataacacttttattgtatattcctaaggtattcacaatcctcataaaatactttttcaaaagttgataataccatagaacgaagcctttcatcgtctccaacagtaggatcgattgagagcgtgctaaattctccagctaatatgacactggttttattatcttgccttggcatatagtatataaaataagtagatccagcaaatggtccttcaatcatttcaaatgcgacacctacaggataaaacattattcctttaaccttttctgaaatagattgaccgttaatctcttcattccaactgtttattaatgtgttgtcatctaacagctctgtaacaacattttttgcattaggatgaatctttgatccttcttttacatgcgcttggactaatttccatactttatctatagaagcatcaaagacgccttctctatcttcaatgaaaaccataactattatgatctattcggccatttaatataatcaataatattaattatggagtctcttttgacgaactgctattagcacgcatccccaggggacaaaaccacatgtatattatgttagatatacactattatgatactaaatggatgaagatggtgactttcttaaggcaacaaaggatttacacagtcaagattcatcttcatccaaaactttggatatgcgaaataacaaagtaagcgtagatgataaacaaggaaaacaaaccatagcaactagaattgcttatggggaagaaactataccgataactgaaaaatttgctataaactgtaaaagggatctcaatatatgtattgataaaaatggtctatctgtaataatcaatgttcccgagattacaaaattgtatgtaatattcaaaagtaactctgtaaagataaggatagttacggaaataacttcagaaaacattggatattgcaaacagatagtcgagaaattcggtgtcgaaatcagacatttgtcagatatcaaaggcaatcttgcaatatccgataatagagaatatcttgcatctgtagtgttacgggaaagtaaacctctaactgaaataatacacagtaatgtaaaagagatcatagaacaaaatcaattgatttttgaaactttctggaaaaatgcaatacctgcagaacagagaataagagaaatcgaagatggcatattaccgattcaaacctatatgataaacaataatgctggggcgctatcttatgaacaagattttattagtaatgctgatacgggtttttcaaattcaacatctattggatatttcaagttacttgatcaaaaccagaccctacttcaagcatatttgaattatctttcaaagtataaagaaggaaaaataaaaggcggtctgcgatggattacttttatagaaaacaagaaagagaatatagaattaataaaaaaatttcttaatattggtattgaaataaaacatgttagaaacctacctccattgtatttctcagtgtcgcgaaaacaatgtgtcacaattatagaagatattaaaaatggagagacgtatcagaggcttattcatagcacagagccactttacattttacattatcagacagtatttgaggaattgtgggacaggggcataaatgctcaagaaagaataagacagatagaaacaggggctattttacagacaacaaaacttattgaaaatgctgttaaaacaaaacagtactttatagacttggtacgaaatgcaaaacaagaaattctgatactttttccctcattaaatgctgtaaaaagagaagttattataggaatcattgatttactgaaaaaaaggagcgctgaaaatattagaattaaaattctatctccagtgaatgaaaatgtccaagaaatattgtttccaaaggatgttgaagggaagtataatgttacagaaaacattattagccgagagattcgaaagcaggaaaatttgatatctaccattgtaatcgtagatagaaaatatgtcttagccacagaattaaaagacgattccaaagaattatttgaagaggctataggagtatcaacatattcaacaagtaaacctaccgtattgtcttacatatcaatttttgaaagcctttgggaccaaacggaaatgtctgataacctcagaacggccaatgaaaagctagtacaaagtgagcaattagaaagagaattcattaacacagcagcacatgaactgagaactcctacccaagcggtaatgggatatgcggaattagataaacaagtatttgaggatctgttgagaaatactaaagtaacaaccgatgatgagttaaaaaggcttatcgacggtctaaaaggacactttgatatcatatctcgcaattcaactagactaaacgaattaataaataatctattagatgtagcaagaattgaatctaatagaattaacagtttgcaacttcgtaaagaaaagttagatcttatcaaggaaattaatgatttacttaagacagaacttgatcaaaaaatcaaaaataagaatattaaaatcaactttataaatgaatgtatcaatgagcaatgctggatatatgcagataaatcaagacttaaccaaatcattaataacttgataggcaatgcaataaagtttaccaatcaaaatggtacaatagacattatgataaaagagaatgcttctaatctaagtgaactagctgtaggaaataagaaaactattgtagatagtataaaggatgacagagaagagaagataaaagaaggaaacaaaaagaagataaaagaaggaaacaaaggaaggaaacaaatacttgttggcatctctgacactggtaaagggatatcaccacaaataatgcctaaattatttgaaaaatttattacaggttctagtaccggaacaggtcttggactttacattactcggaatctagttgaggctcatggtggtagaatctgggcatttaacaatactgatggagtgggatctacctttgaatttactttacctaaagcggatgatgggtttaggtagtaattagaaattagactttctatcggattaggtttatttaatttgaaaaaagatgtaatagatttttgtagaaatcgagtttatttgtagtgattgatatctgcaatcttttatgttgtagcataaaaccccaataattagtcaaattagttactaagctccacgtcccaaaactcactgatatcttatttggtaatactacggttcaaataaggggtgaatatctctttaagctcttcaaaaataatagatttgctttgagaaatagtaggtcttggttacattatcttgtttataactatccttgctgaaaaatgaatttatcaatgtacaacaagactatctagatatctaacctccacttccacctccacctgcaggtggttgtgaggctagtgttggtgattgtgttgctgttgctgttgtagcagcaccctgtctgagagcagcgtccatatttactttgttatctgcactaagtttaacattctctccacctagattcagtaggagtaatgcattgacattgccaccaccaagattcacaggattaccactcactagatctaaacctgtagattgttcggtcaagtcaataaaatattgtgcttgacctggagcagtaggagctattctttgtattgggactattgcagattgtgttgtttgtccatcttgtattttagctcctacaagttgaattcctttttcgtctggtaaattgagtaagactttcccattagtaagaacacatggatcaaatgctgcaagtattcgcgctttcccattttccattggggatggacccaagacaatatttgcagactgtggtggacaatctgcagtggatgtacagctccgtcaagtgtttgtactgtcaatcctccatcatttctcacagtgacttgatcattgttaatatttgttttagtaacaataaccgtctttgtacctgtagctggtgttgtagtttgagctggtgttgtagtttgagctggtgttgtagtttgagctggtgttgtagtagtttttgatggtgtgttatttgaaacgcaagtagaagatcctgtccctggttgaccggcgttaccaccacttcctacaccgaatgatcctgctggacatgttccatctgcatttttaggaacttcgacttctactggtgttgttggtgttttattacattcaggaggtgtaggagtagatgcacaaagataaagccaaccgaaattagtgggtatcggttctcttgtagtagtaccaggcgttgtagttgttttcgctgctgggttatcagaaatgcacttagacccactaggagcattcgatcctgtctttccaccaaatcctacgacatgagatcctgctggacatgttccatccggatttttaggtacttctccttctattggtgtcgtcggtgtagttggtccacctggtaatgtagttgtagatttggtagtacctggaccgacacatgcacctacgcttgtttcaagggttccagctggacattttccgtcaggttctttaggaaaagttcctggtcctactgtagatgtagtgtcacctgtttgccctgtcggtgttgttggttctgttgttgtaccagatggtgctcctgttgttgtactagtagtggttgatgatttacaagcaggatcggttggattagattcgcaagtgttgacagcatcaaaaccaacactgaaacgtgattcagcttgcttttgagtttcttcaaatgtaggtgagcttgtcgttgtttgtgatttacaaaatggagcttcgggagctttcgtacaaaaatcattcttgtcagttccggaatctgcaggaagggaaccagatggtgctcctggcgtatttgtacctagatctgtttcaaaatatggtagaagtaatgtttccgatggggtgtcatcaattgtaccaataattgtttgaggtttacaaaattgtgcttctggagatgttttacaaatagcgttgttctcggatcctgcatcagtagggacggaaccagatggtattgatgatgtacttgtatcattccctgtaatacattcttccgctgtaactgcttgactaccgtcgggacaatttacaagttctgttgaggttgttgctgatgtctttggacactcttccgctgtacttgcctgactaccgtcgggacaatttacaggttctggctcagtttgttcttctgacatttcagtttctgactctacttctgactgttcgttttctgttgagccattatctccatctgaactacctccatctgaactacctccatctgatggactagcaaagatagtagacgacattatcatgactgggttagcagacagcatcatggctaatgtcaaaaatatagtgaaactagatgcaactgttggattcatttctattactcctcctcctcactattatagtcaaatcctaaaattgaatcaaagtcacgtactatttttacataatcaaatgagaaaagtacaatattactcatgtctatatcatctcttgttttataacactaccgtttttatttataatcgaatacgacttgttcacatttttgccgttaagacacattatcatgattgtagatcggaatcaatacggtgactgctatataaccattttatcatctgaattattgatattctaaaaactgagattccattcaaccttgaaccctatccgcacggatgtaatttaataaaagagcataatgttaatttgcaattaggcggtaaatagatattattatgaccattgttgttcgctctgaccgtgaatttacagatctattgaagaattccctcagatcacgatatgaaaaaaggaagagatctgaggatgaggtacatgtttccgatattttgccttcttcctgtattcgaaaacaatactatggacgtaagtttccagatcttgaaccactcacagacgaatccattaatcatttcattaggggcgaggccagtgaatttgtaattacagatctggctaacatgggtgtatcacaggcagatttagaatttgatggtttgattgctcatccagatattctggacaaagaggtgattatagaattgaaggatacccaaagtaatagaagactggatataactgattacggatttagatcatatcttagacagttactttattatcttaccataaccggtatagaaaaaggtatcatatcaattaggtatagtaatagggaaatgcgatggataaaatcggatgaaaaaggcgattatttcttccggccgtttgatggtaaaggtcctcgcatcgaaagctggtctgtattgttaccgaaggacgatatagcccgggaacttttcaaaaacgaaatgatgcgcaggaaaaacttattcgtagaggcaattaatgaaaatgatgtgtctgtacttcctcggcttaacatgaaagtaagaaacatcaagtgtccatactgtgtattttacgataaatgtatgaatgaggacggggaaacagagaaagccgctaaaatggcaaatgaaatagacttgttagatattcctgggttagtagattttagacccttcttacaatgactaaagtgggacatcaatttgaaatatattgataatcacttctagaaacagtataccaatggggtggattacaaaaataccttgcaatttatcataatccttaaattcaactttgcccagtacactgtagaatcccatttaaaataccgatatcagcactaatccccacgcgctcaaactgttaccagttataaattaaaatactgcagtaagtagttacctgctcataaatttataagtgcaaaagacaatctccttatttctgttaattaaagactaaattgaaatatcagattgtagaattagaattatattctaagactttccaaaaaaaagaataaaattgtacctatattgttgttacttattttcttatactctctaaatctactattcccttgggtaaaatttcttcagcaactacttcataaactgcaataaatggctctccatgaggtgttcgtagccatactgaatcccctacgaagggtattgatgcagagaaatatggtggtgcagtcccgtagtctggtactatgactgatggaacactaatttctcctggtgttccttgttcggctttaccggtatgaaatccagcaaacaactctccaaatgtacttgtatcgagttctgaaaaagtggagttatctatatggagtctatgactgattcctacctctacaggttttgttgcggtaaatgtcagaacacctgtataaattgtgccatcatcattattggacaatattactgctccatgaggttgttcattgggttctgaagttgaattggtataggcatcagaagagactattcctctaagcgctatttccttttcacttgacgtagcattaattctttcatcggaagtaacggtagtttcgctattggtggtgaaattatttagttgccccaaggcttgattagggtataattgagtgtcactaataatagatagtaacagtggtgttataactgctgctataattatgaataaatgtaaattattgattgcaatggtattggagatctagtaaaaaaggcttttgtaggtgaaaatatctggctaataagttgctattttccatttgatttcataaagtacgtcctagattccattcaaccttgaaccgtatccccacgtgtgtattcaaacaaatatgagatcttcagaaatgactaaaattcgactctgttttatccttgactatctataaaaacgaattgcttactgatgtttctggaaaaatcattttcaacaacctaatttcttacatagcgctataatccgtaactgttgttcttcaactaacttaataatatctggcatataccatatatatggcatattttccagatgaaattgtctatccaagtggtattaaagtatacattgatagaaacagatggttactaggcctaaagaaaccttatacacttaatcaagtgacgggtactcttccatccccaatgactttggagaatcctgtgaatcctgacgaaagaataaaccataccaataagaggttctggatatacaattctgaattatatactcctgcagatatgagcggaacattacataatctatttggacaggactttgattgggttgctccagtttatagtaatccagacatctcaggacaaaaaggaatgatatgtccgttaccacacgttctgatactcacatttacaactcaagcaagtagtgctgaaccacccatttctcaagatctttacaaccattattcaatgaaaaagtcgattgaaaaatcaaagtattctggaaagaatacatactactatgaaataggggatctaaataattttaatgcgtttaaaataaaaagtattttagattctgatacagatgtttatagtttaatacgttttgagcacatgcctatgataattccagtttctaatgttcccaatgatcctgattacattagccaatggaatatgagacgcattagagcaggcggtgaagttactacgcctcctgacaaaggtactaccacatgggatctatcgagaggaagcggagatgtagtaatttgtgtattggattctggatgtgatttaactcatcctgatatcaagtttgctagtccaggtgtaaacttagatactatgttaggagatggctctccaatagaacctcctggtgctacagaaattggacatggaactgcagtcacaggtataattgctgctacaattaataattcacttggagttgcaggcgtagctggagattgtaagatacttccacttgcatttgtaaactggactgaagaggagcttataagaggaataaattttgcaagggtgtttaaatctagggtcattaatatgagtatcttttttaatcttcctgatactactgcagtagatgcagccctaagtgaggcatcaactgatttacttatttgcgcttctagtggtaacaataatagtagtacgataaattatcctgcaagtagtaaatacgtgatggcctgtggtggaacagatcaaaatgataatcgtcaatctcttacaagttcagtctcaggcgggacagcgtacacaggttctaattttggaccagaaatgtctgtagtagcgccgggcatactaatacctactactgatatggtaggaatgcagggatataataattcgggcgattatatgttagattttcaagggacatcggcagctgtaccgcatctctcagggttagcgggactagtgtttagcgtatatcctgcaatcaatccagaagaagctcgaaatatcatagaaagaaccgcagataaggtgggtacattaccctatagtatagacgcgacacatcctaatgggacttggaatattgaaatgggatatggacgtataaacacacttagagccgtattggcggcttcagcattcaatcctgattctccatggtatcgtgaagttcttcttgaaggaaccatggttctgcatgactatgaggattttggagacgatgaagaaaaaactgtctcatttaatgctggagttccacagattttccaactagggccttttcaaacacatgtagatatacctgtttggatcgataaggtgggaggcgaagtaagaggtgagatacgtctaatccttgattggaaaaccgattcatctattgatgtcaattataatataaaattgtatgagggaacttcggaagatacaaccgacttagatggtgaaaaatctggtttgctgaatgttcctaaagattcattacgcaacctaaatgaaacagtattgaatactgatgagggcgataatgactttattaaattagagatgaaaattactaataatcgacggatctagttgactagcaactcagttcacttgcttttccttctattatttagatttaataatgaatattgtataatagtcaaatttggtactaatccccgctcgcccagactgttactatttgcagttgcaccttcgtgatagaaaacgatggaaccttttgagcatcatgcaatgataatagaattgtttgaatcatatagagctaaaaattgaaatcttcaatagtataggtcttattatatacaggcttttcaacaaccatcagtgtcgatcaatatttctaataaaaaagatcattgataatgatttaagcattacaattgatgcaaatgtgaaagtggtatgtcacgtttgttaatcccaatttcctataacctatttggtttttaaaatggtcatccttttataaaagaatttgtttcgtttgagtgatgaaaaataaagcttaaaacggctaaagatgtcgctttcgataataattattgcaaagttgataggaccattatcttttgtccttagtacgatgtcaacatcaaacctaactggccctaatggttacgcatatgatgatatgaggataactggagataaacagagttatctgaaatttgtttcagcagcagaaatgaatggtgacatgaataatacttctaatgttgcacaaatacaaatccctgaatctgctaaagggacggtgatccctgaaaaaggatatttagtcgaagagatacgcgataatttgtactgggtgacaaatggttcttataataccatgtttttagtaacagatgatggtgttgtcgcaattgatgctccgccatctattggacaaaattacttgaaagctattgccgaagtaactgacaagccgattacttacgtaatttatagtcattcccatctagatcatattggtgcagctggtgagttcccaagaaatgcaacttacattgctcaagaagctataacttcagaattacaacgggcgatggagctggctagcaatacttctactattccccctgtccccactgtgacttttgcgaataactatacattacaaattggaaatcaaactcttgatcttgattattatggcgataatcacatgcctggaaacctctttatctatgcaccaaatcagaaaacattgatgctagtggacgtaatatttcctggttgggttccatttgtctatttggcaatctctagtgatgttgcagggttcataaaatctcatgatataattctaaacaactatgactttgatacttttgttggtggacatttgaccagattaggaacccaagattatgttcaaacgcagcaagaatttgtcaatgatttggaaaaagcagctgttaaagctaatagcgaagttcaatttgctgatatcgcagcacaagttggaaatacatcagatacttggctacttaactctaaatacattgatgcagttgaccagaattgctttcagcccatgttggcaaagtgggaggacaggctaggaggtgcagcggcattcatgcctacgcattgtttcaccatgactgaggctggaagagttgaacctagtctaagcgcaatacttcaaaatgtcactatgcctgatattgcaaatcccactggaaactagaagattgtatctatcgagtgtgaaaattatagattatgaggttggataggtatgtagataggtaggtagtagattacaaagccgccttacctttttctttctaatcttttctgtttcttactgtcaaataacaactgtgcaatggtttgcccttaataatatcggattaatagatattggtaaggacagacttaattagagttaccagaaatggtgtatactgaattacaggaaggttgaccgaatcctactaccacaaggaacttaatccccactggcccgctgtaattttactacttgatagaaagtatagtacaaattaaagtattgcctaagttctcactaaaacacttcataccatcagtatgatcggtagtttagacagatcaataaaattacatgcaggataatcattaatcataactaagtatgattaaatatcaatctatcaaatttgtaaaaagacaaagagatgtgacaagtcttcttaagaatattttctaagatattacctcttataactagaaagggtattagtacaataatgatagaaatcaggtgaaagttagttagaagataagatagcgagcgatattattttgttatgtgtatatgccaatatcatagttattccaataaaccagtgccaacacaattaaaaaaaatgttatagtaaataggtagattgatcaattactataataatgccttacttctcttctaaaaagcctaaaaatgacgtttttgtaaagcgagtaaatatttcttcaaatgtagaagatgtttttgaatatcatacacgagaaggagcattagagagactaatacctccctggagtttcttgagggttctcaaaagcaacaatgatatagaaaatggatctattaccattcttagaataaatttaggtccattaggaataagatggatagcacaacatttaggttatatacaaaataggcaatttcaagataaaatgataaaaggtccatttcgatattggctccatactcattcgtttaatccagacgaatttaataactgtataatggaggataggatcgattattctcctccgttcggcttcggaggttctaaatttgtcaataatctgatacacaacaacctgtatcaactattccattatagacatatggtcttaaaaaatgacatgaatttatggaagttagtaagaaggaacaaaggcaaaaagattctgataactggttctactggtctgatagggtcagcacttgtccctattttaaagattgttggagagcaccaaatcactagaatgactagaccttcatctaatcaaaattataatgatcccaatgtagtaaaatgggatccggaccatcataaaatagatattgacaaaatggagggatatgatgtagttattcatttaagtggggaaaatatttttgcacgatggtcaaattctaaaaaacaaagactagtgaaaagccgtattggaagtacaaggttactttgtgattcattaatcaatcttaaaactcctccatcaactctcatttgtgcctcagctattgggttttacggaaatcgagggaaagacgttcttaccgaagacacccctccaggctctggatttctttcagatgtatgtcagagatgggaagagtgtaccgaatctgcaaaatctattggaattagagtaataaatacacggtttgggatggttttaacacctaaaggaggtatattgcaaaagctagccaaactagcagcattaaagatcggtttgcaattaggagatgaaaatcaatacataagttgggtatcgatggaagacgttattggtagcattatttattctattgatgattcccatatcaaaggacctattaatgtagtttctccaaatccgactaaaatgtcagaatttacaaaaatactatcacgcgtacttgataataggcttgagatatccttatcaaaaaaaactttaaaacttgtatttggagaatttgcagattatgttgtatcatctagctcctttattttaccaaagaaattgtcttctgttagttacccattcatgaatactgatttagaagatacactacgatttttattaggacgtcaaatttttaaacgagaataaatatcacaaatacaaatattatataccaagaccgaccgtgaaacttaagagtataacattttcaggatctacaaattcatctatccatcaaaaacccccgttcactattccatcttcttatattattaatattatgagctgttcaatcttgaactgcatacccgggaaataaaaacagttctattgcatgtctattaagcaggacacgatgcattaattcaggatgaggaagtaaaagagagcgtgtagcggtcggtcggtctcgctcaaccctattgtaattaaaactcgtaattgattactttaatcctattgttattttatatccctttcaatttcgacaattgagccaataacgtatttagacttcatcagttccttaatcgcgtttgacaattcctgctccttttcattatctattattcgagctgtggcttcgaatacattattacttatctcaattaataccctaggatagtgaataatgttttgaacccagtgtgcttttgtagatgtttctgaagtaatataataacgaccattatgctctacaaaccatattcttattttgtggtttatccccgttttccaacccgtactggtcaatagtagatatcgagattgatcacctttatccatcatatctaatcagttcattcactatttgacattatctgaaatatatccaatctaatgtctcatcaaatcaatataattataattggatcatattagttctttaaacaaaaattgaattttatattttttcttttgttctcacctttaatttcataattgtttatcgctaacataggtatagggaggatgctctaggtaatgatcagaatgtgtgttcttttgtatatgtacaagtttttttgactacttctgagttaaccaatattggaatataatttataaagttctccagtccgcagatcgatatacctccatttttccgtatcaaatctaacctccttataattttgtttcatgtccaatggtaaattaacaaatacattctgtcctatggtaatgccattgggtagagatagcgaagtaatcttggcagtcctattcatcgtatatccaagtatatctatcaatgaagtcgtatcgtgaccatattggataactagattctcaccttcgtctattcctacctttactttcagttctggcatgttattctgaattaacacagggttaatgcctttttctatggcctcgatcattaaattcgccctttctaaagctatctttaaagctgatttcttgttaatgtttgagggaaaaaaagcgatcacagcatccccggaatactttagtacatatcctccactattgattataatatttgacatttcataagaaaaagctcttatgattgtaaccatcgatcgaaccggcagactcatactcatcttagtcgaaccaactaaatcggcatacattattactaatggaactttggtgttaacaaagtcaagtaagaacttttgagccgtccttaaattagattcatattgataacgcttttttatggctcttgataatctttcctgtattttatcagtcaatagttgcacatcctcgccttcaaaattagccccattcatagaaatattaacatcatcatgtcctatcacatcttctataagggttaataatgataaaatgtttcttcgattaccggctttttggcttttagtgcaaaattagtgtttatggatttaacaagttatcgagtttactttgacaaaaagatatccataaaaataataaatccaatccctcataatggttctgttaacttgtacctaagttatctacttattgtaaaagtaaaaagtaataaaatatagattcatagaaattgttttcggtctagttttcttttcggcaaggaaagttgccatcaaaacttacgttttattctgtatatatattgcatagttctaaattatgctcttcactaattgaaaatataggtgatcacctaaaatgtggaatctacctgcttgaagacacaatatactactttctgtagatattggatgctttacatgtatcttgacaaccccggagaggaacttttcacctatcagaatgtttttctctataaattactagcaaaagtgcgaaaattacttattttgtttctattctactaatgatcaaacatgttctcaaaccacagtaatcaatatcttgttaactacgagttctgtgttatcactttcatcacagtaattcctgaattcatttccagattacgatgtggattattatgacctagtgtaaaaagaacattgctttggcagcagatttagttggtaacccaagaaaatacaaatacggaatggaaccatatacttaagaggtgctgccatactatttcttttgataatctacaaggaatagtatatattcgatctatagatttttgttaatttaacggcgccatcctcttgactaatctctcgattaaatataactcatcatgaatttagactaacaaatgataatgctgtcatttgctaatgcgacaatttttataaaccccaactagtctttttaaagggtatgatcctaacataatcctctcctcttaatatctctgtaattcccctaatttcaattcctctaggtacccatggattgacagacaataaatcatccaccaccattgcgactttattgttcttcaaaatatgtcgaaactttaaactattcttaagatcccatcctccaaaaaataaatcagttccatcaaaattatatgaaacaggaactacatgaggttgattatccgacgaaacggtcgctagtcggcctaaccgattgtcaaacaaatatttagtttcattttcagaaaacactatcatattattatttttattcacggctctacttccatattcgtatattatgatctgcttattattttatcagtgcctcaatctagatattaacataatattgcaataaagaatactttcatatctattaattagattacactattaattagattacactttattcaaaaataatagattgtaattataaatggtccaaagtgattgatataatggaacaacatattttatgtcaaatctttcatacgattagtataatcccattcatatattctaactggatctattactatggcaacttctgtttttaggtgattttccgatagtaaaaacttgtgcaactgcgatgactctttgccctcaaaatacctgtgcaataacatgcgcagaattttttctgctaaattttcaattatagtaacttttccatatcctctgacgccaagataggggggaaggttccgagcgatttcaaaaccgcatttagaatttatctttaaagactttatgagtttcgaagttccttgcgtagcacaaaaaaatttctcatccatataaacatacattagtgacacaatcataggataacccgattcagaaatacaagctatcctgatagggatatggacgtcttctatgaattttaacattttttggccaatcatccgtttagatatgttatcactgtaaggttttaatatttatcttcattgtgaagtcaggtattgagagagattatttatcctgagatcatatccaatctagacctaatcccactaatccccttcatgatgacctctcaagtccaatatgctggatgtagtccagaaacatgattacattaagaaaataggctaacgtgacctaataattgtactacatcaaattcaatttgttgagaaggaagttcctttcctttaaagtcttgtatcaattgcgtaaatggcgtattaacagacgaagagttgagtattattatgtaattttatcaggatgaataactatatatgtaatttcttttttttgatttgtaatctataacttttttagtttaatagataagaagtgtaacttatgaaagtaatactttactatgtgatttattatctgtaattttcattttacttatacactttaatgcattaattaaacattttctattttattagaaaatcttgtagatttgttttggtgattgctaatgggtctttatgatttgaaataataattctagcaacatttcctatagatttttttacgctactatttttatctaatggatcggttataggatctaatctcaatgttagttgattttcttttttcatcaattgaatataatatttttgattgatattgtttttaataaccgttgtttttatcatgattaaatcttttgattgatttaaaaatacatcatcaaattttatgatataattatcttttctttctaccattttatcaaaatttacatatatggattcaaagttaattttcctttatcagattcacaatacttaactaatcttttccttacttgttttactccaaagtttagtaaaaatgttaccttatttattaaattttttatgaatggtaattctttttttgttggatccgacgtccgagacgagtggattcgaatcccattgatatttaatataagaaaaaattaattcttaagaataatttcactttttgtcagagcggtcttatgtattacaagttgattatttggagcattacgatctaattttatgcttgtcttttcatctaggtaaactaaacacaaaagtagagccgattccgtcattattgttaaaagcccagattctacccccatgagcctcgactaatttcttggtaataaaaagtccaagaccagttccaaaatcagagtcagttgtaaacttttcaaataactttggcagaatctttgatgatatccctttaccggagtcggatataccaacatataccatctcctcttctttttcttgtttctgattgatttttgttccttctctttcgttactattcctatcattttgtatcagttcatcacctgatatacttctgctatctttagtgatattgtttgtttcgtctactcctgtttcatttaaatttaattcaaaatcattactgtcttttatcatgatatggatactatcatctcttttagtaaatttcacggcgttatcgagtatattaactagaatttgatttaatctcagtctatctgaatatatccaacaaggctctcctagacttttatttataaaatccattttgatgcctttattttttgatttttgactaaattgattttcaataatatcattaatctcttttaccaaatctactttctctttttgtagtataatctcaccactattatctgactcaaatcttgcgacatctaaaagattatttgttaaaatatttaatcttgatgcatttctagaaatactgtcatgatgagcatgaagtttcacaatgatccttgctaattcatcatctgtcattttttttctttcctttaagagagtgtcaaataattcagcgtttagttcagagtatccagcaatggcttgagttggtgttctcaattcatgggcggcagtatttataaagtcgtccttaattattccttcatgctttagttcttgagaaacaatactttggttaactatcatttcaaatattgaacaatacgataatactgttggagtactatcagaatagatagagaaaccaataggtaggttaatattttcctccagttctattttctttatttccattataagacattcttttttatctaccaccaatgattttattttaatgtcgatgcttgattcaatatcttgaatatgaatattgttgttaacagtggtagataagagcgcaagagataacgattctctaatactatagtcgattggcacaagaatactaatctttagatttttgttctgatcagatacttgctttaaaagttcaagtgtgccacttttctcttgaagatggaatgcgtctgaagtagagtaaattatttgtatttcttccttggcttctctaatcatgtcaaattcttttttctctgctttctcgtattcattaaaaatagtggtaacggatgatttgattcctttctctagttctttaatcctttcttctgaaggtatgcccttttcccagaaactatcaaaaacaaactgttgttgttctacgatttcaggcacattgctaaatataagttggggtataggttgtgcttttttaagagttgcaacagccacgtattctttttcatctgctacttcaaagtttcctttcattcctttcaaatgtcttatttcagagaatttcaacatctccttacaataattgaggttgtctgcagttatctcaatcacatatctgagttttactcctctttttttgaatgcagcaattctcgcgtttttaatcgcttttacttctataaataccgatggggcagtagaatttacgcatgagtcaatcttttctctactcctgctaacaaattctataattgttttatctgcgtcttctggaccatgaattactttggtgaatgcattatcttcttttgtaattgaattatctgaacttattatttcaggttcagaaaaatcttcactatctttgatatctttaattaaaaaaagacactctcaaatcattattatgacgtatatcagtgaggttcatcaatttacacacattatagtatagatttcatagtataatagtatgtacgtagtatcatactcttcctttgtttcaggtcaaatttgaaaggatgtataggagatacattgctattatgattgaattgattgttgagtctccagagtaattccaaaggtcatttatgtaaaaatccaatataatcaaacagtcagcaatatatggttagattagagtaaattaaaaggagtcaaatgggtgatttacttcaaatcgactatagccagtgaatagtacataagaaataggatatacaaaaacctaataatgatatttatgcaacatgtggatgggatactcaaaataaatatatttggatacttgtaaatttgttgataaattcaatttttggtttaaaaattaaatttcattagtgcttataaataatgtttaattagatattttacattgaatatattggcaatcgatgaccacactgacactaccgatgctcttatagattattgtagtacgcagggtataggttgcaaagtagttaacgaaggtcaaaaaggcttatctgaaattcaaaaacgagaatacgaccttataattctggatattgcaatgccagggtttacaggattagatattctacgtcaattgaaaaaacaaggtgttagacatgaagctatagtagtattgaccggctgggatttgaatgatgaggatttcaaagattatagagatgttggagtaaaagaaatcattaaaaaaccaataggagtggacagacttgatgatattgtgagaacttatttgataaatgtcaggcaagttaattcaactgatattctttcaattcattgatatttttatgtaaatttacaagtgttatcgaataaaatatcatatctctatgaagttggatatatgatcattttcgataaatcggatgttttattatggatagacacttaaaaccatgtccctaattaattcggtgtcgttcttatccatagtcgcatccatagcatgaatcaatccattctccttattgttgatattatgaaatacttctcgttttgaatcatgtgttagtttgtatgaaagttctctaccagtttctatagtatttgctttgagaatctaagattattatctttttaatattttcaatagaattatagaatatattcttaattatgatagctctaaatgaatagccaatgacgatctaatcttgattacatttaattctctatgcaaatgataaaacgcttgtataagtggtctatcatatgataatgatattataactagtcgagatttgaactactttcctgacactgatgccaaattaattctagattttatttgatcttgaatcatattccacaggtatgagaaatgttactaatgtgttgtcattcttgcttaagaaaagaaattattctacaataaaatacaccacgttcaacaaaccccttgagaaggttatgcatatgatccaaagagtttgttgtagttgtttttggtttcaggtagacatgcaatgagcccagtgcgatcgtctgcttttgctagtcgtggaactagcaaatatagtagaagaataaagtatttaaccatccgggtaaactaaattgagtttattttgtgaattattgcaacaagcattcagaacatttaattttatgatttattacctcaattttagattgacatatgaattagcaaaatcatcttcacaattaaatgaccatacttaatttgtttaggttagataggaatctattatggttatattggtcatcgcctgcaatcaatcacataaggtataatacagaacaaaggaataagacgtaataaacatatgattttttagaagttttttgtaattggttattagtaataaatctaatctagttattaaaaggttaagttataccctacatatccctttagtattcttcctaactgcttatgtacatattatcatttgttgaatcagttagggaaaattcttgtccatcatattaattccaattttagttttcataatgctattatcttgtattttcgctgacatatatctagtttgggctgatactttagttgctagcgtagatcttgatgatcatcctttgttattagaatataatcctaatgatggtaaagtctatgtatcgatcagggaatcagggagtctaaattatagctcagccccttggggatgtgcgccggaaataacaaaaggttgcatagacatgacaaatgcatccagcacctatcttagtattgctattggcgctattgttggtgcgatgattacttgggtggtatacgccctgcaaaaaaagtcaattgtcaaacaggatgaaaacctcaagaaactcagggacttagatgagaggcatgatactatcttaaaactgatacaggatttccaaaaacatcaggaaaaacttcttcaacaaatacttagcctggataaaaaaattgagtctataattgaaaagaaaaattaaagatatgtcaatggataatatcccctgagaattctcaataagtaattatcaaaatgcttgcaaaactaatgctaaaatgtcaattctttacaagttaaaatttaagactaaagtccaaagataactggtagacgatataactattgttaattttttcgatgacttaaaataatttttgtcattgtttttctcatatggacttgacaatatgaaagcgataataattttctaaaatacaactaacaataagactatttattgacacagcaataatatattagaatccacgagtatacggtatggattcgaattcccaaacttcgtctaacctaattatgaaagaattgtgaagttgctataatactaggattaatcccgttcgaccaataaatccatccaacatcttaatacaaattgaaactctcttagtttttcgttagttaatttatccaaaaaaacaaataaacgaaggtaacgttagcaggacagttcaataaatttaatgagatttagagaattttctgataaactcgctccaatttttgtacaatatttgctggttgatgctctactggcagtccatacttgggctcaaaaccatggtcaataactctcagcccacatgcgagtgattctattcctttttactattacttttttccagtttgttatttatatataggatatcaatgaagaaaatgcaaaagggccgttgctaacacaaaaagcctcggatcaatatcctatatgaaatctttattttatattattgttgggcagacgaattgcaaattggaaaaaattcttttccctgaacggcaaagtttgtaatttcgttattctaaattacctccacaaaataatttggctgctttaacattaaacctccgtccacaggaatcattgctcctgtaatgtaactggcatcttttgaggctaaaaagagtgctaacttagaaacttcctgtggcttagcaatccttcctaaaggaacttcattttgcttgtaatttcgcttattttcatcctcaattaattctttatttatatcattgaatacaagaccaggtacaattccgttgactcttattcctttatctgccaactctagagctattgattttgttaaggtttccattcgggccattgaatcaacatatggatccaccccaaagttaaactgtgtatatgaattgactgattgttgggtcatgcatccttgacaggatgatatattgacaatagcgtagttgctatcattatttagtaacatcctcgtcactgctgctttgatacaataatacataccccttatcaatggatccgatgtttcatattcctctggcacaaaataggaaggttgttgctgttgaagttcacctttcaaaagagcttcttcatcattctttaccttggggttgctggttattttcccattattgattaaaacatcaattcgcccccatttttttattgctgcttccatgaattcatcagcaaagcctttttcagaaatatcgcccacaaggtaagatattctattgtgatttccagttaacactgaaatattctcaactatattttttaattcatgttcatctgatgaatttaccaaaacattaaatccaaggtttgcaaaatctattgcaattgactggcctattccttgacttaaacctgtaataacaactacttcattgccatctttattgagagacatactattatgcctaatataacaaattatatgaacagtagtggaaaggtctaaattgcaatgacattgatgggaagccaattcatgttatgcgactttgtttcattttttccccggagatttattatactgcaaggcaatcaaaatttagttcacaattcatttcctttgaacaaaaggaaaactaataggctcccttacctataaccaagggtttttttaaaaggcaataaatcaataagcctgcatatgcatctttggctttggaataaggtatttaattattaggattaaccaaatgtatcaaaataactgaaaaagaaaaaaacattccatactacagccagttttcattaaatactcaaatactcatcagtaattctatttttgagatacataaatttcatgcttctgtatgttatatagtttgttactaaaataatactgatgaatacgaagtcaaaaaataactttgatgcacagcaaacagttcaaaaatttgaggatatagataaaaatccaatagcattatcagaagattatactaaaaaaattattgagcagttgaatacagatattgcgagtcattttatcaccttttaccaattaaaaaagcaacattggatagttgagggacccgactggaaacacatctccgcagcactagacacttacgcaaaaacaaatctagaactggctgaggaattagctgaacgtatcactttgctaggaggaataccagtatcaaatccatcaaggtttgaagcactatcttatgtacagtttgagggggaagacaaatataatcttagaacaatgttagaaaatgatttaagagcagaacaaaatctgattacatctattcgagaaaggatagactttgcaaaagaaaacagagatcatggaatcgacgatttgcttaaagatgtattagaaggtcacgagaagactgcacacgagttgcatcattatctacaagaacaaagcttagagaaggatctttgaaattcaacagtaaaagtaaaaagaaataaagccatcagatgactgacaacttttacctatttgttccttaaatgataacacattgttgccaaatattaattggtatcttttttattaagtttcttagattcctttaaattaatctttatgacatttttctacaagtcgattcaactttaaaactatatcattatttatttgtattagaataatattatttatgggaatgcgagccccaccaagtaaaactattcatattatacagacaagtcatttcaagcaagagattaggtgtttatgaacgacataaattggtatagtattcctattatcttccttgcaaatcgtaaaatgtctctatgattattcgtcgccgaacacagaaaattgattagaacatgattctaatgaaagttatagatgagatatattggcatatactattattagcaattctaattgcaaaagtttatggataaataaatgtcactttagcactacattcggaagtggcgtgataacactatagcctttgccattaattagaattatcttcttcttctctgattcagaagcctattaattaacatttgaatccccctattggccaagtaagacgtaatccatcttcttataggcatctattccaattcatctcctattaaaaaatgtggatataaaaaatttggtcttaattaaaaccatctattgtgaatcttctgtactaatcctttctgcagttacttcttctgttacttgccttgtctcagtaactggttttttagtaactgtgacctcttctttgacatatggagttttgttcacttcaacttcttccttctttaatggaatggttatttcctcactagaagttactgggccctcagaagcaacttgtccctctccacctgatggagctcttctctcaatagaaacctcctcatgagtcactggtacttcgacagtctttgtttcagttacaggcttctttgttatagttgcctgttgctcctggacattttttgatacttcaagtctttcctctgttaatggaattgtttcttccgtattcacttcactctgttcaacctcctgtgttgtctgggttacacctgtggttgctgctgttgcttcaacgctatcttcctctcgatatctgcttaacaagtcgtcttctgatattttaaatcttacaatatcaccatcataactctcagctaactcttgaggtatcagaaacttttccttattgatgatgcccctctggactaatacacttccgtttgacacttcttgtacttcaccaaaatcttcaccgttaataccctcagcttcctttttaatagtatcattccaatctatatttgaactcatataatattttgttgaacatggtataaatacgtagacaaattagtacctcatatggtaatagccactattgacagatttgaaagataacatcattactcgactaactaatatccaattattataacccgttggatttaaaatatcagaagataaaaaataatactagcaatgggaccatattttgttatgattcatcgctattttaattatatctaaacttttttgttgcttagaccaaggtgctgataattgcacccacgttgactaaagttgtttgtgaattactgtgtcatattctctgcacctatggtggtctggttaaatgggactgtagttttatttgcaataacagtagtagctggaccagtagcttgcaccatagtcttattttctatgttagacaaatttccagtttctggagttactgtcatattctctaagggctgaagctgaccttgattctcaatagacttggttgtttgattaacagttacagtggtctgttctgctggaacggttgtctgattcgctaaaacagtttgaggactatctgaaacagttgccattgtctgattttcaggcagcgtaggtgatgactggttttgaccttgactttgattctgagcaaacactgatcccatacctgcatatgagacaatgaaagccacagctatcatgaatgtaaaaatgtttttcatggtaagtacgtggataatatagcttaaatatgtagtataaatcataagatagcagcagtctatttattaacccattcacaaaattctagatgaattttcttattgatttacaaattcataatatcatcatatttgactttttagattaattgcaaatgctaactttgtaattgttgtgcttatcatgattatatattgtatccttcgaatgactagctaatcataatactatgaacaagctgttgttaagattcgttgatttttctatagaatggtgtatttctatactataaattatatattaatttaacggagtgatcaattaagtctcaaatatggtaagatatgataaaaacaatcttttacttttacgaatggatcaaatcttttctcgtctgagaatataaattcagtgtgttgttagtaccaacttatctataggcagatctgctaaatcaatctatctcaaagtcattgtatgcaagcagattacttgtattgcacattactccttctctttacttctggtgtctcagcattatcaaagatatcaaagtcgtcatttttatatcctatttagtaggctttgccacccagttctatcactataaacttcaattggactctgactaattatcttacaggctataatcaatgagatctcatttatttttctatatttatatattaaatacaataatagtcagcattgtatgatttgttattttatatgagaatacttgtttttctagtttttttagggacaattacattctcaaatcaagtttgggcgtcctctataaattctgatacagttaccaccactacatcaaactttagtggaacagtgtcaagagtcattgatggcgatactcttgatgtattgacaagagaaggagatacaataacaataagactagcgttaattgatgctccagaaagaaatgaacccggatttaatgaagcaaaaaatttcattaccgaacaatgtctgaataagaatgcagaggtagacccagataatatgcaaggacttacctatggtcgaaccgttgctgtcgtatattgcgaaggtgttaacgtaaatgaagtaatacttgataataacttggccgatatttatcaaagcttctgtgacgtctctgaatttgcagatactaattgggcacaggaacatggctgttcaaacaataggagtgataatggcgacaacgatgacgtcgaaaaggaagaacctgtagagtctgatagcatcagtaacgctaatagagttgatactagtgacactagtaaagatctcgattgtaaggattttgatgagaagaacatcccagtaggaagcgatgatccccataaccttgacgctgacggcgatggcataggctgcgaaggataatagtgactataacagtggattatactgatgactatgatagcacagaatctaggatatttatgacaatgataaagtgaaattctgcaaaggctgtgggatatagtccagtattaactgtcttgatgcatcaatcgtttggcctaatgttaaggcgctctctgagagagattccaaagcagttgtaaatacatatgttattattctaaatcaatctgtctagaaggtcctggactaaaaaaggtagaatagtataacttaaaaaaaattttcttttatacttagctatcttatttgacaagtcaactacttagtccgactaaacttctcttatttaaaatgaaattataaatagatttgcaattctgtcttcataaagtaaataatgataatgtaaacggtagtttatttatgatatactaaccttttataatttgttaaacaaagggcattacaatgtctattgatgataaaaacgaaacagaatctcctgatataattgaagaaattattcctggcaagaataatgacgataatgataaatccataaaacaaaataataacaataataataacaataatcatcaatcatttattgagaattatgatgaggaacagtcggcacagtctgttttagaagtctcagaacagtctaacgaaagtattgagagaaatactgaagaagcaagcaatcaagctcattattatacacaagcaattgctgatactcaggaacaaacatctcaagcccccaaagcgttagcagaaaattatctagaattacaaaaccaggttataaattcatttcaatcggtattcatgccttattttggaaatgtccaaaagcaattttggtataatcaagattttcttaggagtataccagagatgtattcaagattgattagcaattatattgagagtgcaatcgctttcagtaaaatgtggaatgacattgcatttgcaagtgcaggtccttttagaaatgcaatcaataaaactaacgcataatcatttggtcttgctgagcttgcaaaagtaaagtaaaataaagtaaggtatttgacggattgggaaatgataataccaatttatttatttctagtttatattaattcaatcacagtaaattagtggaagcgccaataacaggatatctattacttgccattattcattaaattcaaaatagttgagaatgacaatggtcaggtgagtaaatgggatacagaaactttcaaaatcacatcctaatcatctttgttttttttctccattcttcctaaataactcctatcttaccaattaacaatgtgtttgttttttttgtttaataattgatgaaagagtgagcataagctctttccttttatttgggatatctgtacgatttgtaatactcaacagtttaactaattaattgattattatattgacattgttgaataatattcaaaaataaattatttcaaatcacaataatgcgctctaaatgaacatgggcaaggtaaaagaaatgctggcgcctataccatctttattatgttcaacccagattttgccttgatgcagatttataatgttcttacaaatatataatcctagtccggtaccataaaaggatttagtcgcaaacttggtaaatagccgtggcagaatttccggatgtattccctcaccattatcttttatctggaccatcaaatcgttttcattatttctgatagctatcgttatgataccatcttctccttcggcaataaaattaatagaattatcaattaaattcgaaataacctgagtaattcgaagcttatccccatttactatatgttccttttcaaaaccaataaaatcaaactttatttttttctcagaaatacggactattttattcttattttcaagtattgtttcgaaatcctttataacatctaaaatgaccgcggtaagattaaacttactcctcgaaatattaaataagttcccttcaatcttagttaccgtaagaatgttttcagttaatgtgtgtaatttgtgtgcacttgcaattacaatctcaagtagtcctttctgctcattatcaaatatattatctttaacgtgttctgtcaagccaattattggttgaataggagtccgtaactcatgtgcaacaacatctatgaactctctttgcattttgtcatgaacttttagccttgcatacaccttctttaaaaaatagtataattctgattggttccacagtgaatcaaaaataaacgcataggagtttgatatggggatactatttgaataagatgcaagcccggttgaatctagaggatcttctgtggtattatttttgaactctatgattattgatttactcctatcaactaccaacaaacctacttctgattgaatatcattattagatatcgctctaattttcatattttttatagcgcttacggtaaagtcaaacggcttgttattgacatcatccataccgaactttcttttgttgtcttccaaaagagtaaaatcatccttgaataactcattgatagtcttttgtcttgactggtcgattctatcggtaacaagaattttaatagataaattccttttttcaatagtattttttatgtttaggaaaaagtcgttttccacctgtctcttgaaggaatcaaaagttggaaggattcctaatatttcttgattagcagacgatatcaagtttttgatcaatctaaatgtttcatcggatttttcaatcgtttcaaaaaatggaatctctatatcatcttcgattgacttgattattgcagtagcatccttactattattccataatttgtcaaatagtaatttaaaattatttacataagcaggttcgttgctgtataaaacactatccacaaaattcttgtcagtcgattgttctatcgctgcggccagatgtgattcagtaacaccaaagttgataaagggtgtctcttttaagtggcgaatttccacacccatctcaagatactctttaaccaagttcatattatcctctgatattccgattaaaattctaagacctttatgcaaactatttttcttcctttctaaaagatttttagtgagaggtagaaaaagttcgtaaccaatttttagaccttctggagtaatacaaacacttaattcgtttgagtcgagaaaaattgacaccagttcttcatcacttaaggaaccattggatcttgttaaaattttggtttcattttttgttttaccttcctcaatttctattattttttttattgctggtactgcatttttccaaagagtatcaaaaatatattgcccctgtgcaaccacctcatctacgtcgctataaattaagtgagtagctgcttgctcttttcggagaaccgttgtagccatatactcagactcattgattgcaattcccccctttatgccatctaggtgccgtagttcactaaccacgcttaacaattctttacaatattttatattttcagaagtaacttcggtaacacatctaatttttgcacctctagctaaaatgtctttgtaacaatcgcgataggcgggaagctgaattactctgcatgggcccaaatggtccaacgcaatatccatttttgttttagtattttgtataaagataattgccttttctactatgttttcagaaccatacaaaacttctgacttaccgtcgctagtaacatcactagatatgactaatcaagtgtaatttatatctctcaactatatatttttattcatcaatagtatcgtttttgattctattgatatagttttagaattcaacgagtgcttaataaaagtaaggatgattagaaatttgaaataagtttgaaataatagtatatatttttcaacataaaaaactttttaatttggatgaataatcaaagtttaactgtaataatatataatgccacctaaaatgcccttagtatacctagatagagaaaaatacctgtccatgtaatcttaatgaatataaatgatatttgaacaattaaataggaagttattctgcgcactaacttttagtattcttgtaataccattttacagcggcctgaatttggtggatgctcagatatctgatggagaaccgataaatctagtactaactttatgggttcctaattttttggcatatgttgcccaagaaaaaggctattttgataaaaataatgttgatgtaaatgtaactttaattcaagattatgcagaggcggtacgtgcttactcgaacggggagtatgatggaatgttcatcgtgtattcagatgccataatacaaaatgctgaaggagttgatactaaagttgtattcaatgtggatacgtcttatgaggcggatgcaattataggtagcgtagacaaccttacgggtgtaaagggtaaaaaagtaggtgttgaaggaatcaacagtttttcacatatattcatgttaaaatctctggaaaatgttggtcttgctgaagccgatgttgaattcgtaaatattctgggtcaaaatattccagaggcgctagtaaataatgaaattgccgcaggacatgtttacgagccatttattatagaaggagtgaagaaaggattaaaaatcctttcaacgggcgcagatattccaggaatcataacaaatgtattagtatttcattccgatatagtggaacaaagacccatggatattcaaaacataataaaatcattgatagaggcaaaggaagattatgatagaaattcggagcaaggcatagaaataatgtcgtcaaaatccgggttaagcaaaaatttgatagtggaaggactcaataatgtcaagtttactgacctagattataacactcaattttcaatcaatagagaattaaacgatactctttcattgtactattctggaaattctattgcaaacttttatgctgaaagaggagtaataagtgaatatcccgttatcgaaaatatagttgaacctaaatttgtcaatgaattattgatggaaaatagtactaaaaatgagatatctgcaaggtaaatagtatttgaaaattagaacaaagctcatcgtgaccatgattccactagtgtctttttctataatgatactatcttatgttgcgtttcaaaattttgctgctactatacaagctcaattaattaatgaattaaaaacggtggccggtcatacaatggataatctctcacatcaaatgtttgagaggctagccgatatagaatttttatctacaggtaatatattggtaaattcaaatttaacactatctgaaaaaatggaatatcttcgttcaatggaaagatctttcaaaacatattcctccatttccttatatgataaagaaggtattaaaattggggacacaagaaatatacttttaggggagaatgaatctgataaatctttctttaaagaagcaattaagggaaaaatacattatgataccgtacctactctatctgaatcgcttaatcaatatgtaatccattttgctgctcctttgtataatgaaagcgaagagattgaaggagttgtagttacaagacaaccagtaaataagatcaacgatatattcaaagaaattaacttggaggataaagaaatagattcgggcagtagcaatcttaaattggatttaatatctaagaatggcacagtaatatattccaaccatgatagaaaatcaattttgcaagaaataccaggattccaagagatgatcggtaacaacgatcgacagaataatatgtctatgctgaatcccgcttcagcagaaactcgaattaatagtgatgaaattattgttagtgtaccacaggggaagggacacttagactataaaggaagtgattggtttctcatactaagagaaaatactgatatcgtatttggaaatttacaaaaaacagcagatcaatttctaattgtttcaggcattatgttcgtaatatcgataattcttattttgttcattgccagaactatttctttaccattatcaaaacttatgagaaaggtaattgagattggtaagggaaattatgattccagaattgatattaaaagctctgacgaagttggtgaattagcgtcaaattttgagtcaatgaggcagagtgtaaatcaggtgaaccaaaatttgaataatatggtaatggagagaacactagaactagaaaaagcaaatgaagaattaagactaaatgatgaatatttagaaaaaataaacaatgaattggtatctgcagacaaagcaaaagaagaatttatgtccatggttagccatgaattaaaaactccactcgtccccgctagaggttatgtggagcttttacttaggcaaaaaaaaacaggtgacctgagtgaaaaacaaaagaaatatgcagatattgtttacagaaatatattaaaattagaagttttggttaatgatgttcttgatggatacaaaattgaaatgggaaagtttaaaattcaaaaaagtctagtaaatatacgggatttgatgtcatcggttgtatccgatttgccttctttaattggagataaacaaattacctttaaagtaaattcaaaattaagagaagaaactactattatgtgtgaccaaaggaggatcgaacaagtattcgcaaatttgattaaaaactctatagattttgtaccagcaagcaatggtaaaataactataggagcagaattgattcaaaaccaaacgatgattcaattttcggtagaagataatggcccaggtattccagcagataaaatggataaactatttcacaaattctatcaagttgatacaagtttgataagaaaacatggcggtagtggacttggtttagccatctcaaaaggtatcgtagaagcacacggtggtaaaatatggattgataaagaatataatcatggtgcagcctttagatttacaatacctttttaaaccgagaagaattcggttataataaagatacaatgagtcctaatataccatcatcatcgtcatcatcatcatcatcggtaacacctatttcccgagttcttattatagatgataatgaggatataactgagttgataaaagactacctcgaaacagaagatatagaatgtaaaataattaatagagggatagatggcttagatgaaatacgaaagaaggatggatattatgatgtaattttattggatctggccatgccagaatttagcggattagatgtttttaacaaactaaaggaagagaatttgttaaattcaaataatgtaataatatttactgcttcatccacgcagaacagtgaaataaatgaaatgatgaatggtggtgctaaatacatcttaagaaaaccttcctccatagatgaaatactcgatgtagttacaagattcacaatcaaaaaagatgaaatataataaattttagcctgtagaacctaaatattataaggatatttagaccaaaattaggaaatgttctaattggaatgagataacaatccattaataaaatcattatcattatagattgctgtttaaactttgacaatattcctctcctacaagccttcttatcatcaatatattttaattaaagaatatggattgcacatatttagtaatacttcttttgaatgttcctaaaaatataccagttattaaaaatattaaaaaacccaattgacagattctatttcatttaatttaatcgagagttttgccatcagtagaaatcaaggataatctgttaaaatattgttgaagggtatctatacctaataacattgaaaacaatgaatcaaaaaatttatctttggttaagccatcaaagtaaatgagtttctccatgataaatttttctattttgtcttttgatgaattgctatgacgagccagtaaacccaattggtacaaagccatcaatagatccggaataaagcgattcttctctttcgatggtagaagagataaagaattcttctgttgctttgagaaattcattgatgtaattaatgttaccttgtcgtgtaaatcatcaacaatgatgttgacatttctattattagattttgcaactatattcataataactgtggagtctttgatttcatcaaatctccaaatatcactttcttcaataagccatcgtttaattcgcagtgatatttcttgctgagacaatgacaacgtattttattgaaaatcgcctctatataatcatataaatgtaaaaattctaagggattgagacatcttgattttggacgtatactcgctagatctgatataaaattagctctagttgggatttcgtcgttagaattactaaaagaatagtgatggtgaataagatattaccatggtacaatataacccataaataataccgccatttttgataaggccaagatatctactaaacattattagaatatggtttgggcgcaaggagccagcattgttgccaaccaagtaaattgctaaattttattagccatggcggaagtaacgtattaaaatcgacgatgttgatatcaagcttcttgcaaaaaaggctaaagtcctttacagaccagaaatgcaaatgagaaaacgactggcgtggcgaatatcctctaagtaattgaattctccatttaacatatgcactattagggatagttacaactaccccttttcgagcatgagatatagcttcaactagtattttttgtggatatatggtatgttcaataacttcaataagaagtatataatcataatattcatccctgccaagacttagtccgttgttaatatcttttacggttacggaaatacctctatttttggctttctcacatgctatatgcgaaatatcgatccctttaactaaagcattcttgtttttcatcaatagttcggccatgtgaccatctcctacacctacatccaaaattgtagagtttggctcaatccatttctttattaagtcatatctcactgattttccggtgtttatgttggcgtgatatttttcataatcttcaaacatttctggaaactcccagtctttctgtgtcatagtccttgttagatccctttttagttctctagataatagtagtaaacttctaattttattacgaaaaggaatgagctgcataaaaattcatattatcatatctttattaattgttaagttttgagtatgatagttatggtatttggattatggtagaaaggtaaaagtgaaggtgaaaatttattaaaaaattagtgaggatattttttcgcttctattggaacaaattgatcaagatcaactaaaagcttcagcaatttgaataagcagagttgttgttagtatgattaaaaacagaaagggaaacacctccactttatgaatctatagagtctatgaacaaaatatctataaacgtatttgttatatactcaatttaattgttaaagaatgatctaaagaatgcaaactcgttgatatttctgctcgtcattattatatcataattttcggcttgtttaacttcattcattcattcagacattcacactgttatacttaagtcgtagattctctaatatacctgtattagtaactaatttcataattttaatagccatttccgaaaaattttgaccaaaattcatgatcattgtaaaccaaaggatactctccaatttccattgccattttggctgaaaaaatgttgtgagcacgaactacccaattataatctctagagaggtattttttaatgattcttcaatgcgttccgatcaattggaattggaatttcgcccctaaatcgtgaaatcctttatattatattatagtatcaggtatagatttttttgctagtacttttttttaatgaattacatcttataaaatctcctcataagcctcttgtactattttcgcagcatttgatccaacatgatcgctaggtaactcactgacctgctcgaggttatagtttactactttcaaaccacaagcgagtgattgaagtgcagtagtactaagattagacaagacattgtcgtttacatatctgatatcaacataagttccgaactgtttgagaaacctgggcatatcagagtattttacaggatgcttcattctatcaattacctttaaattgtcgataccgcttcctttacaataatctattatccatttcatattggaaatagcctcggtattaaatataaaaaagtccttgccggtttgattgttggtatttggtgtaaaatggtcagtatcaatcggtatgtttattaggaccgaatcattacgctttaagaatttccttagatctgccgtagagtagaggactttatctgcagaccgctcggctagaagattgtttttccttcgaacacgagttgatcttgaattcctaactagtagcccagggttcaacaataaatcctgacgtttatatttttggttgattcctcgtagatctgatccatgaaaatgcatgataattttatttcttttgtttgactttcttcggatatagaataatgcatcagtcctgctatgtatatgcacaaggtcagctttgtttgcttcttgtaaacttaattctaaaaaattttcttctgggataagcgtaactatttcgccataaaattcgtatatcccatatcgatcataaccagttcttctcagaatcttaacttcatgtcccaatttttgctgattctttgcaagaacgcaagctacagccgattgatcccaaatatgaagaatattcaactaaaaagccaacctaacattgttatctcttgttaagatttataatttttgcaataggtttctataataattggtaggatcgtatttcttaagaaagctttaattaatcttcttatctccagtcaattggagtttttcttgttatataagataaacgctttcgatctgtattttggatccagcaagaacacgatcatcaatcaaattcgcctattaaatagatgggaagaggatgcaaatctagcaaacagatctttgataatattcagtatactcttagctacatcctctagatatgatcaaagagaagctgaaaataataaagcaatcgaaactgacaagtgctaacattttaattttaatctcaattttaattgaaaaagtatgctacaaccattagaaaaattaacttgcaaagttatattaatgaaatcactcattcatggtaataaaaagagatgagaatattacatcttttagatacccacttgccccaatggcggaccgaaaagtgcgcaattagcgctaagaaaaatggacatagtgttttctttggtggtccaaaaaatccaaaatatcaatctatttttgataaatctttagagataaaatggactccctctgctagacatatgtttccatatcaatggaatattgtaaagaaacatatgaaaagagtcatcgatgaggttcgtccagacataattcatgctcacaacattttttcagccaaaatggcaatggaaattggagagtatcctttggtttacaatgatcatgaattttggtcaatttatgtccaaaggcagctggaagcatataatctaacaaaacaggcaaacattgataagccatcctttccaagaggcatagtcagaaatatcgcccgagatttcttaaaaaagagatgggttaggatctggtccgatgcagaaaaggatgtggtaacaaaggttcccacaatcacagtgtctcaaaccatagtggaggcgcataataaaattagtgatagaaattttcttgttccaaactttcctctttataaagaaatagaatccattgatgaaccgagatatcacaaatctctttcttcggtctatgctggtgttgaagcaaaaggcctgataaaacctacacataggaaccttgaaggtttctttgaaacatttgaaaaggataacgtcggtaagctttttgtcctgggatgggacagtccttctactaagaacacagtatattgcggatacctagatagagaaagtatgtacaaggaaatggcaaatcattcaactggtttggttccttttaaaaaacattggtctcacaaatacattaatccaaataaggcctatgaatatgctcatgcaggattgcttgtaatcaacacttctggactgaccccaatatcagaaaccatgaaaggatattgtttagagtatgagaataacgatggcctgattgatatcttaaattatctaaatcataatttggaggagctatactcaaaacggattgggacatataaatacgcaagaaacatgttactttgggaagtgcatgagaaaaatatctttgaggcatataaaatctgttaatcaaacatcaagttagtatcgctcaatctattgtagggcgaactaagctaaaatagggaatctattaaaaaaattttccgccgtataaggtaaaggttctggaaccaattttgcctaattctactaccattggttcaaagcctatatacttttacttgtgcctttaaaatggatcgcacacctccttcttttaataaaattttattttctttcattcaaatccactcgatttcttttgctattggtaaagcctacaatgtacatgtctaaatattatgtcaagaacaatgattgtacctccttaattgtatcgggacttttgtcagtcagaatgtatttgatgcctacaggtttattgtcatcactaatatcaataaacaccgaatttccaattggaatggtgctcactattttcttgtcggttagtttaacatatagtgtattatcctcagaatcatattcaacaatcgaatcgatgatccttgacctccttcattaaaagttctcctattgtcataaatttcattgtactaatattattagtaaaacatcctcaagtatttagattctttaattacgcatgacaaatcttcagaggctacaatgtttggaacaaggattatagacctttagagaggataacattgttattggaagaagtaatcgctcttttcggaattcataagcttaaccatccattttgcatagtcaggttaactaaaaactttgcattaaaagaattatgtcatgagttctgtgataagcatattaaccaagatattatattattacaattatggtcaaagatctagacgccaaggatgacaacgacatgctcaataagattgagggcatgatattggataaattggtagccgcacatacagctggaaccaaatcattgaactatgaagagataactgaccagattagctcaccacatcctgaagatattgacaccgcccttgaagacttgattgcccaagcattgattcattcatttgatggtgaaaattattatatcaccaatgatggaataatcgaacataaaaaaagaaagacagaaggaaccttgttttagaaatcatatagcaggtttaatttcctctttaaaggtttgagctttcttgaataagaaagacagttctgtaatggaatcctcctacaaattcatttgcaggacagtgaactgtgagctactcagacagtatgaggatacttgtagaaatgctacaggttgaagattattttttttctaaaaatttctatatcaattttaccttttaccaaccacaatttttttcttcagcatataaccattttgaggagaaaatttgcaaagaagatatcatattaacttcgaaataggaacccaattacattgcatctgagtttagtcccatgatttggaaattaaaaactaatataattaatttctgttctaaaaacacatttcatttaagatcaaatgaattttgtaaatgataatcaaaagtacaaagaagaagatgatgatgataataattttgatttgttgactgtcgatctattttattattttctagcaaaacaaaaattcaacagatctaatattttttctttaacaagttcagtagtaatctcctctaaggtaaatgttccctcccggcctgctgaaccctcctcttgcatcatcttttgcatatagagcgttaccttatttggttcttccataaagaaggttaaagaaggatgtttgtcttgtgctgatgaagtatccttataagggtatatatcaagcttgatttcggttaccaatcttccttgtatcttgtctattatgtcacatttgatatcatgtaagatcagcttgttcttaatttctttaaatacaggaaaaataactgtatgaacttttttagaaaaaccctcagtgaattcatcgagattttctgtggattctatgtttgtattttggttatgtctagttaaagcaacataattatcgataaccttatcaatttcatcatctatgttcatttttatcctatattctccttggatatgggtaacgccatatataggtttgaaggaaatatattgttaaaataaacaattttaaaatttagtgacgctgatccttgtacataatctaaggaacagtgtaaattattacatcaaactaaataccgtgattattatcccaaatcacgacaaatattcattctattagataaattaattatcgggccgagcatagctaatttaaaactttacaaggtaatagaaatgaatcatgttatgcagctgtaactatgagtatctacacaagacgtacagaccgttattggccagattagacaactatctacaagcgaatttgagtgtatagattaatgtctctttttagatgtggtcgaagatttggagattgtagcggtatagaaaatcgtaagttactttagtagataatcctatggatcaatgaatgaattcgaaatctatagatcttctatctactatcaaatattttttcctctgttcattaaataatattaggtatgataaagggtcgttgaattacttcatgaagaggagaagcatctcggatttgctttcctattgatcttgctgacgccagttccaacagatgaggataaaattccgataccttcatctctctaagctcagtattttgataaactttgttccagaatgctttcactaaaatccagattgcaaccatcttgcatttttatggattgctaatatttctcaacagctcttttcaaatttttctacctctctcgtcaaaaagccgattaattttcacgtattcttggatcccccatgaatcctggtccataaaaagcaatgaaatctatcccccatgctgttaaatatcatgggttttttgactctagccatttcgattgatctttaaaccaaggctttataatgatatattgccattcaaaggtagtacgcaattagttcagagttatccaagtataattgcctactagcaatgtcggtttgggctcttaccttctaaaaagtcgctataggtacggcataagacacttcgtctatgctagacgctctctagttcaatgatgtcctatttgcataccctgctgccgaacttgatccctaaaaatactgtttatctcgacaattattcttcaatagcttaagctgaaaattcctaccaagtcattgagccccatcatatatggtttatgcaataacaaaaattttggattagaataggaagcaagtccattagtacagggtctatccttcttgcggcttactgtcatcgcctcgcaggggagtcacaagcgcttacagcggtgctatcagacttaccttaataaacaagtaattatccatggttatctttttacacttcaaggttagaacattcatttcataacaaattttatttgttttagatagttgtggatagctgaaactttgatctccttttttctattctatcttttagatgaactactaatctaaaagcccaagtcattgcatcacttggatttgcatgacaatgttggataaaaatcctatatctttccttcaatctgccttgagacaatgaagtaaagaaaaaaaagagatgataagcccctatatttttgtctagttagatgagatcaaattgcatttgaaaagactatatatgtgcctatatccatgagattagtctttttatctgctgcagctttgattgacatcatctcttctattttattatcacagaaatcgtattttagtactgtcatagatgtggaccaagtggtattaatgatgataaatgttccttttataagtttctagtattttttatccaaagtcaaagataaagctttcgttagatatttttcaaaataaaatgggttactatatcaaagtaatatatggtgaagatctttcaaaaggtgcatttgaaatcaatagtcgatctaaagctcctcaggttgtgagtattgcaataccctaattgctttttttgtgcataatgatgcttttaaaaaaaatggtcatatgtgctttcaaccctgataatcaacaggcacagaaattcatttggaaacacgtcccacttatgtatgtcatagttgaatacaatttattaaaaggaattacatccgtgaaatcaatttctatctgcattatttgtcacgaccatagatagagctgaacgcacttcgtttaatttcttaattttccaattaataatttcttttagtgtttccatattgtcggaagaaattcttacaataatatcataaaccccaaacacccggtacacatcaactacttcaggaatttttcttattttctctgtcgtttcgttctctgatcctaactcacagtttattagtacataggcagatggcacacttaatagaatcatacaaaaataaaaaaagtttctacatggtcaactgctaaattcatccttaggtttgtgcataatcatataactcgaagactggtaaaaatggatgttctaattttattaatgtatagtacattcacatgctcctatgcaggtattatttaagaaatcgttagaataaggcatactacgaaattaagaatattttttctaaaaaaggtattataactcccaaggcataagcagacacatggaagacgaaccaagctatttctttcactttacaagtactgattaaaagcgtagactcggcatgtgcaataatctataattggagtaacctgtgtataaattaatattaactaaatctaaaaaaaattcagatggattttggtcttctttgctctccggttactcctgctgaaattatttgtaagcttgttattaacagggcaattccaatcaatatgccggctaagactagacctattccgggataaacagtactgctaatgcaaaaacaattgatagtactcctacacctatgccaaaatttttcgaccaccctctgctagccttatctctgatcccatgaatgattctagaaattccatccacaagcaaagcaatacccaaaagtaaaactacgaatgttcctgcctggataggaaacgcaaggacgatcaaagatactattataacaattattcccaagccgatgcttgcaaatcgggatttccctgaaagcactaccccactaactattttttcgataccagtaaataataacaacaagccaagaaagagtacaacagatattgagcctataaaagggttaatcagtacgattattgccaagattaagataacaagacctaatcctatctgagacatcttaacccagttaggtgatttttcaatacccactatatttacccccaaaaaatacctttagggcagatccaggaactgcatcgcaactaaaagatttttctctttgaaattcgtcttccctaaatggaaagcgtttcagatttatcacattatttaattaggcacgtcgtatttaattttttaaaagccgatctcgattgtctgagacaacaatttcaaaacaatatgtatatctaagttagtcatcaaacagcattagtctttatatcttataccaaaagtgatttcacagttccttttttcaaaaaagtttatccgcactatcaacttattctatgttctcacgttacctcttgttaaagccatttatttaagaaaatgaaaatgtaaatacctttgcaagaatatcattaggataaattcatttaatagcttgctcaggatgttttgaaaactgcaaacgaataatgataccaagcaaaattatgaaaccaatttgaagagcttcgataatcactgcagtctcgccaattcggccacctcttccagtaattggattatcaggtatcctagttatgacccagatcactacaaaggtggcggtcccaacaatacctatcaagtcccacattttaccccatctcctaatagtaggaacaatccagaagacctgcgccaaaccccctatcagaaaaaggatcgtagaattggtgttgtttgaagtcaacatgtatagatgcaagattccagctaacccagtgcaaaatgccgcggctatggacagtaccataattaacttcatacgttctttatcaaaaaatcataataagaatgtatgatacccaagataaatttaaaatctatacatatcataaatggtaataggtaatctaaaacagatttgattaagttgcgattggcgaatcagtgtaattaaactcaaaacaaacgttatgataattatcaagaaattcttttataggacaacaaacactaattgacgatgaaaaaaaaagctgttatatctaataacccctttttggccgttgtaattgctacgagtcttctgattactctgttatcatctggagtagctcagggtcaagatagtaattcaatccaaaatgaatccttaaaatcaattggtaatgtaacaaatggaagtaatgattccaccttcattagtattcctgtggaaaaaggctttgtgaatggaaatatatcatattttataagtactgatgcatcagaagaaatgattgtttcctcagtcacgaatacaaccggatttgatgttaattacgcaccaactctcagcgatacttcgcaaatttcccgtcaacagggttttgtatttacaaatggcgtaataggaaacggtacttttgaacatcaattgccagtggcgacagcagcctctggagatgagggatatagtcctttatttgaaataaattatgtaaaatggaataatgattctcaaccaagaattttaaaatcagcagctgaaataattgaagcacagtcaaacggagaactttctatacaaaaatcaaatatagtaatcaatagtcccgctgtgaagattcaataatcataatttttttaactatgaagtgaaaattttttttcatttcggttaagaaaataaagtatttgatctattttcagtctaaaataatcttttcttttcgcataaatatttgtcttataatagataatttttaagattacctgaataatttcttagggattattctcaccttattagaacgaattaaaatcagactacagaaagggtataaaaatttttagcatattcagttttgttaatcttaagacggcaatatggaaattcttttaaaagtttaatagacctttcgaatatccaaagaaaaagagaataattgcagcctttgtatttttttctggctttgttatttgcaataacaattgcaaatcttgcaatcattcttgcagattcagacagtaagataatttattccagctggatgttgattattacttcatctatcgctgccggattatccatactaacgctattaaaggataggtcgaaaataaaaaaagacaagacggcaattcatcttacaataggactcatattttggtgtattgcaaatatgatttggggatattatgagataatccttgatatagtatcaccagtaccttcacttgctgatttattcttattgtctgcttatggatttttgatctataggttattggtgacttacaaaaacctagaagaaatagagaataagaaaattatctacattgtgtctataggaaccggactatttcttatttatatactgaatttgatgcttagcctgacggtgattcctaattttaggggttttatgttatttgtagtcaccattgcatatcccgttttgaattcaattctgactgttttggcattgactattattctcaatattaaaaatgaaacgcatctgtctattccttggatatgcgagctaataggcctgctggccatagtgattggagacagttggttcgctataatagtattgactgcatttgtagaacagatttggatatctgctattttgctctctgctcactatttactgattgccggcggccttgtatggtatctgcgtttccactctacttgggatctaaggatatctaatagtacaacaataagaaaaattaaagaaaaattttcaattagggcattcatttttttcctcatcccttcagcctccattgttctaatcattttgtttataccaataaattttgcatccttagcaaatcaggcagggctaccatggctatatccagaatatcatgaaccgctcccgtccaataatacttacacagagtatataattggagcaatcgttccacaatctggatcattgtcctctataggaaaaccggttcaggcttcattggaaaaggcagagaaggacattaataaatactttgatcactataactcctcctctagggctaagttaatagtggcagattcaaagaccagtccacaggaatctctcgcagcgatcaagaaattatacgcttcaggagcgacagtgattgtgggcccggccactagcactgctgtttcggcggtccttgattttgcaaacgaaagaaatattacactattaagttatgcgagcacttcgccaaagctctccgttggcggagataatcttttcagattggtaccggatgataagagccaaggtaaagttattgctgaaaaaatgatagatgatggtatcaaagttattgttcctttctggagaggcgatatttatggtaacgagttggccaatgctaccaaatattactttgaaaaacttggcggcaaggtagaggaaggggttaattatgaaccacacactggaaaatttgcgactagtttgcataggattaactttatcatgtggaatcaagaactcaaaaagatgaatacaatggtatccgacgcaataacaaaatacggtaaggaatccgtgggggtatacatcgtttcttatgatgaaattacaccaattttgattcaggcacaattatttgatgatcttggaaaggtaagatggtatggaagcgatagtatagcggagaaccaccatcttactaaaaatacagaatctgcaagtttcgctgctcatacacaattcataaatccgttattttctgttggcagtgatagccactcaataactgaatcatcacatgacaatgagattgaattgacagaggagggaagcgaagatggagaacacgatagttctatgacttattcatccgttgcatatgacgctttatggattgccgcaaaaagcatggacaaaaattttactaccaatacgaaagatggagattttagcataaaggactttaatgaaattttagtagacactgcagaatcatttagcggagtaagtggtgaaatcaagctaaacaaggccggtgatcgaataagcgaaaattatgacttttggcatgttgccaaagatgatatgactaatgaattcaaatggcaagcgaattttcaagattataattctgatcactgaactgatcacaaataaataaaattgcaaaatggcttgatcaagtactaacaatacattcctttatcttgtagtaatgccacctaccacagcgatcttatatatttgaatcttctatacattcagcagttatgatgtcaaatatcataaaatgcaaatgtggcactagagacattataaaactaaaaaataaagagactgtagaacatttcatgcttggtaagagatgtcctagatgtggaacagttggcggatggagacaattatctcaagatgagtatatgtgggaaaaagccaagggttagagtcaacgttctttacaataaatacatcaacttcggcagagaaatagagagtttatttaaatgggaatttatccggaagatgttaatctggttgcgagagtaaattttgaaaacatttacataatctagaagcagatgttcattttttatacgagtggttcattcgtatatgatcttttagcttgtccatatctgagaatttacctccacagttggagcaatcatatgaatagttatctgaatgaaataatagttggtgatgcattgaattttcaatttttctaaatttccttccacaaatatcacaacggtatttcttgaacaatgatagaaaatccattaatatctttaagcttgttcttttaatccataatatttcttttaccattatagcagttgagatattgtattagctagcactctttatcgtgcatctgtaatcaaggtatatgcaatgaattaaatactttggcgggctccatcccgtattatcgaaaatttattgttagtatgatttgcagccgagaatctaacccgcaacgtagtaataacattctattataaaaaagatggtaggcttggtgagcctagttagtattatttaaaattaaatcagttttgatccaaggataacagtatatgctcaatggcctggcttgagttcagcataccgttcttcttagcatattcctctaatagttttatttgttcaggcgtaaaacaaatcggcatagaacgtctttcattatccatatatttttgtaatatttaatccgttattaaaattttattgcgacaagatagatcaacgcctcctactaaccaaccatcatcatcataattgtcgtcgtatcaaataagattgcatccttctatctctttaagatattaattactaaagactcacccacctgaggtttaccataagtttcgtaatttcgtttaggcatggtgatcgtaatgcttgtttgagggtaagattgaattaaggtctgtggttgtgcttttaacatagcctccattatcggctgtagttgatccttcatttccttatctggaatggccttattaatggcttccagcatcatttgttgctgtgaaaccggttcaagttcgatgtcctctactaatgtgagagtaacagaaatgccattatcactcaaatttctaattttataaacattctcatgaatttccatctgaatttaataaatcttctttttatttaatcttaatcatagactaatcgaaaaaagacggatttgataagaaaaaagttaaggttaaaaagatgctattttgaccgttatggaaatcacatctaggctggtggggcctgacaaaactctacaagtacaccatttagtgatttgggatggatgaaagtaatcttgcgtccatatgatcccgttctcagttctcctaaaaatttcataccattctccttagcacgattaacgtcactttctatcccatcagccgtaatcgctatatggtggatgccttcacctctctcctttaagaatttgctaattggactagtatcttctaaaggctcaattaattctaacctagtgtcctccaaattcaacattactacctttactttttcatttgggacttcctcgacatcgattttatcaattttcaagatttttttgtaattgtcaagggctttatttgcatcattcacagctattgctatgtggtccactcgcatatttggatataataaaaaaagtagtatatattataaccaatatttttggaaggtaattataatagcgagtcaaattttttaacactaaaataaggatctgattatttaaattatccttatgaatcctcaaatcgaacccaaataacattggagcaagaaatctagttagaatcttaaataaatcacgcttgtccatttgctccattctatttggtatgtactcgatgttgttatcacacttcagacggaaaactttattgttatttaatctatcgaaatcaatctccacttagacaggctagtcaagattcagatattattgatagtaaatagatgccataatccaccattttgagaaaaaacaaatttatctaataattaatagaacctagtatatgaaaagaagagcaatcaatattctagtctttacattatttgcttctattcttatgactttttctctgagccaaactggtcagtcctcagtaaacgtatcaaaaccttttttagcaaattcgacgattcttccgggatatatcaattgtctgatagactatacaacaaagcaatgcagcgagtgtccgcctaactgtattacatttaagactaataacttcatcatagataacaaggatttatcttctaatttagacaagatatatgaaaaatccttaagacaaatatcaattatcaaatctgctgatataagtactaattatacaaaaacagcaataatttatttgcaaagtctattattaaaaaataatatcaaacctcttgaactaaccctaataagtgacgtatttaatgatattaaccagacaaattcgactacagaattaggaaaatctcttcatgctaaaatggatgagttagaaacaaaaaaagattctagcccgatcgctgtttctattatgaatataactacaaagagtattgatttacttattaattcagatagcatcatccatagaattcaagaatatcccgatcttccatacgacatgaccgagcaaaaacaatggattaccggtatactttcaagtacaattgtaggatgtgaaatttcaggtgttctgggttgcctaatggcatctatagtatcttcaggaatagtctaggcaatattaattcataagtatgtagataagggtattgaaacatagaagattttgtttggcctgatctttaatattactcttttttcttctggtttctctattggatatttgtctagattcaaatatttttttgatagtttattgaaatgatggttactccaatcgcgggtcttttcgaccacgtttcccataatagttacagtctcataagggtttgacatgctaaataaggatacacctactttatcattaatggtagtatatctttcctttgcccgtcccaaggcagtgtttactaataaatcatgatttttatcataatcaatccatacgggagtgacttgcggaaagccactaggcattacgatgccaagagtagcaaaattttttccatctaaaaggtctattatttgaggactaaacacaagattcagtatcaatctttaaatataatccttgcaatcaactaaattctaacacaatattatattctctcttaagtatagtaatatggcagatttaatatgactaaaaaacgtccctgagagatttatcgctttataagaatatttaataattctcagttctatatataatataattggggattattataactctaattctaatagtaatagtagcactcgtaattttggggataggatggacaaatttcttttctgctttgatgaaaggcgcagataaggtaaaagaaattccagtggtcagaaacataactgataccgcccaagttgagttgaataaaatactaaataatgtatcaaacaatgtggtaaataatattggaaattaagtccggtctaaatcttaaattagaataggccattttacaaaatcaatatttttttataatcttaataattaaccaaaaaaaataattaatggctatggccacaaccacaaccagaatgtccactagcactattacctccttgttgttgttgttgctcgacacaagtaggacatttagtttgttgagtttctgacataaacatagttccacatgtggaacatttcattttttgaattccttccatgataaaaagcggttttcaaactaattaatagttatctatgaggaattaacactaatatcttaataaaaaattagtgataaggaattatttttgcgtttgggtaggatactgattatgtgtatatctccgccggaatccaaaaggtttgaacggtcttccattaccgtggtagaatttagagaaaaattctacgtagagcagcctcgcaccctgaattccaggttcaaaaacacctaaaatgatattgaacaaatgccctacaatgaggattataaatcctacaagtgcaaatattatcccgttatccaggaccctgaggaatacatgatcaatcacgtccgccaatataatagaagccatcattatgccaacaagcctagtaaaagaaagtatatgacttataattgaaggtaattccatcatggctcttgttccttcaccataaaacattaatgctattcctccaaatatcagtgtaaaatatagagcgccctgtacgctggccataggattaatattttcctggcctatcaatcctaagccaataaataccacgccccatccaaacatcaaccagccgatttttccaatagcatgtctcttattgccgtgattatagtcatttattataccaaggataaatccgaatgataccattcctaatcctacatatccacttatcaacaataatttacgtaaaccgaacgttgacaacggatcgaatatggtaccatcttctggcaagtgaagaccaccaatactattcaagaatgcaaaaatgtattcattcagatggaatccgaaataaagattaaagcagaatcctaggacaattgctactatacagcctggtgtaattgcctttgcaattttgaccatttgaacaggctgtaatatggtcttaccaaaatttctaaggaactttggcataatagtaaagcccttatgtccaccctcaacacgccaaattacccatcgtgaaactagtaaaattacaattgcataacctacatcagcaaacatcatgccgtaaaatactggaaatacaagtgcaaatacaagtgtgggatcaaattcattgcctgatggtaaagagtaaaatcggatgaacgactcatatactcgcagacgctttggagttttctgtaatgtaggaggcacttcatttgtacttaaaataaacatcagagttcccttactatgcatttcaagtgcagcttttgtattttcaatcatagatttgggaatccaaccttcaagtgtaaaagtgtcacgggtgacgccaagattgtcgattacttccagtttcttattctcaatatcaagttgttcctccaacccttttaacaaagaataatttgcctgagaaaatgccaataattgactgttgatattttctaatttcttttcgagctcttcaagcttatgttttaatttgtctataacatcttttggtttaccttttaaaggtggaacagcctccatgtgaacattataaagattaataatggaagccaatgcatttgaaggataatgtggtaaaacaactaaaacaaattcagtaaccttttcaccctcttttgaatacagtattatatcttggttgttggattcaagttttttcttgaattcagaatatttttcactagcaatgcgaccaaagaaagaacgtgcagatttaagttgcaatatatccaggtcttctgggaaaaaggaaaaatccccaatcagtttgatattattctgcgtatttcttatttcagtgagtatattttctctttctctttctagtgaagccacatttttatcaatatctaaacgtaataacgtgttattcatttcctctatggatgaaaatgtgattttttcccccaaaggagttggaggaagggtggtaagcaaacctcttattcggattagttgatcagcaatatgtctgtgagattcgctttccttctcggtactcaagtaagatgagatttctttagaaatttgctcaatctgaataacgctcatctcttgcaaaattgaaataatctgctgtctatatttttttaatcctaaaacagcaatcttagacataggttcaggtcttaataacgtcaagacaaagacctccttttatttaattcctgaaatcaaaatttccaatatttctttcatcattgtctggtcgaactgaaatgtaatgctctttgctttgttttcagcctcagaaattattttctgtgcttcttcatttgctttcattctggatttctctatattagtttcaactagtaaccttccttcgcttgcagcgtttgcgatcgaactttctgaatcggcctcgagggctttaatctgactttgaacctctgctttgcgatcgtcaatttccttttgaactttatcctcaatctgtttaatttgtactaatgactggatatattgttcctgatcttgaatattagacattctttagtttactccaaataaatatcgtacaataaatatcaacaaaataactgttgcaataacgtttccaattttgataactcttgtaattcgataaaattttctttgtttgtcatttgaaaaacctctataatcattacctttcatatctttatacatgtagctctggttcaacctctcttaattcttgtatctctctttcacccatctttctttttactgtttttaacattataaatgtgtcacgctctatttcgtccaatctgaatgtaataaatttaacagcatccattagttttggaataaaaacgttctctattgcatttgatttccgtttcgttctctcaatttcataaaggagtttccttaacgcagtttctttctcagctacatctaggacgatcttatgaattctattgaaggagctaattgcttcattgattgaagtgggtagttctaacaaatattcctcatataccttatttttacccccttcaagccttgggatatgcacacccattatgctttttgatttaacatttagtttgcccatcattggcaatttcattgattcattctctaatctcatagacccagctaagatttccgccatcctgattgattcgtatcccttaattagttcagtctgtaaattttctcttaaagctgcagcggttttacttgtattaaaaaattcaagaataagcgcttgacgttttaattttaacaattttaggcccttttttgctataaggattctacgctttgtacgtatatactccaatcttgtaggcctaatatcagaagtagagggcattttttctctatcgttcctctttttcagtatcttcttgagctattgatttttttctatattttgcaataaattctggtttaatacgtttcatctcagattcagggagatcagccaatagttcccaaccaatagaaagagtttgttcgatggacctgttctcatcaataccttgatttacaaattttctctcaaaattatttgcaattgtcagaaactttctgtctatctcacttaatgcttcctctcctacaattgcagagagagcacgagcgtccttgccttgggcatatgctgcgtataactgatcggccaaattcctgtgatcctctcgtgttcttccgcttcctattccctgattcatcaatcttgataaactagtaaggacatctacgggaggttgtatgtttagcctatgcaattctctgctcatgacaatctgaccttccgtaatatatcccgtcaaatcaggtattggatgcgtgatatcatcagcgggcatagccaagattggaatttgggttactgagccctttctaccttttatttttccggccctttcataaattgaagcaagatcggtatacatataaccaggataaccccgtcgaccaggcacttcttcccgagccgcagaaatttctcttaacgcttcgcaataattagtcatatcagtcaaaattacaagaacatgcatttccctttcataagctaagaattcggctgtagtcaacgctagccgaggtgtaaggatacgctccatggatggatcggaagataagtttaggaataacacacttctccccaaggcgccactttcctcaaattgctttataaagaaatttgactcctcgcttgtgatgcctattgcaccaaatacaacagagaaggactctgaagaaccgagaactttagcttgtctggctatttgagaggctagcaggttatgaggcaagccagcacctgaaaaaattggaagcttttgaccccttacaagagtattcataccgtctatattagacatgccggtttggatgaattcagatggttcttccctagaataaggattaattcctgaacctacaagatcgtatctctccttagaaataatttttgggccgttatcccgagggtttcctaacccatcaaaggtccttcccaacatttcatcagaaactgaaatcattgcggtctcacctgtgaaccgagtagaagtattatcagttcccagtccatatgtttgcccaaagacttggacaactgctaatccttcccttgtatccaaaacctgtcccaaacgcctctctccgttggctaattttatctcaaccatttcaccataagcagcatctttgactccttcgataaatattagaggaccagctatctttgctagattcttataagctattttagacattttaatgcgaaacctccatcaacaattcttcaaactgttttttcatatttgttctaatttcctcgactttaggttcaacctcgtcctccttggtccattttatcatagacaagtcttttcttgtcccgatagtgcttattttcatggaggttacgcctttcttaattgcatctgcctctgatcggccaaattctaatattgttgccagcatcaagaattgcttttttattgaggtgtatgtgtcgacctcatcgtatgcactttgttgtaaataatcttctctaatggaacgcgctgtatctaaaattcctttttcaggttcaggaagcgcatcatatcctattagttgaacaatttcttgtaactcggattccctctgtaaaatccctagagcctccttcctcaatgcagtccattctggcgaaatattcttcttataccactcatccatatcgtcggcatacaaagagtaactggttaaccaattaattgatggaaagtgtcttcttgatgccaaattagcgtctaatccccagaatacacgtgtgactctcaatgtattttgggaaaccggttccgaaaaatctcctcccggtggtgaaacagctccgactaatgtcagtgagcctattcttttctctggtgatatgacaattgcttttccacccctctcataaaattcagctaaacgtctacctaaatatgcaggatacccttcttctcctggcatttcttctagtctgccagaaatctctcttagtgcttcagcccatctggaagtactgtcggccattaatgcaacatcgtaacccatatcccgataatattcacccatggttatacctgtgtaaatgcttgcttcacgtgccgctacaggcatattagaagtattggctaccagaatagttctttccattagaggcctttttgattttgggtcttccaattcaggaaaggtagtaagtatctcagtcatctcattgcctcgctctccacatccgatgtaaacaatgacactgctgtctgcccattttgcaagttgctgctgggtgactgtttttccactaccgaatggaccaggtatagcagcagtccctccttttgcaacaggaaagaaggtatctaatacccgttgtcctgtgagtaatggcgattcgggtggcaactttctaaagactggtcttggggttctaaccatccaccagctagacaatcccacaggtgatttcccgcttgttgtttttatttcagctacgttctcatttacagtatatctaccttcactgatttcagataatttgccattaattccaaaagggaccattattttatgattaatgagcggagtttcttgaacttcgcctaatatttcaccttcctgaacttcatcatttttattttttgttggaatgaattcccattttgtttgttgatctagggctggaatcgtgactcctcttcctataaaatccccactcttttctcttagaacatctaaaggacgctgaattccatcataaatagattttaataatcccggtcctaattgcatggacaaaggtcttttagtattaattattttttcacctggtcttaatcctgtggtgtcttcataaacctggatagtggccttatttccttccaaccgaatgatctctcctaataatcctaaatctccaatacgtacaacatgatacatctctgcatcctctacatcagtagccataactactgatcctgaaatacgtgatactattgaatttgccatatttccctacctttcactcttattgtcccgttttaatacttatcccaagcactcgttttgccaaagcggcaatagactcctcatgaatagtgccgtgcaatgcaggcataaaaataaccagtggatcaatggatgattcaatttttgatcttgttaattgagaaagagaatcttgtacgaattgacttgctattataagattatatttatgagatgtgaaaagactttccattttttttactgcttcatttttgtctgtaacggtgaaagtatcttctacgcccaataatcgataccccataactatttctctttcgccaattactgcaatagatttaacattttcttttttcttacttgacatcctggcattctactccaaaaccaacaaagagttaatacgctctggggttaaattatatctcttaccgtatgcaatccttttaatattgtcccattcgaactcagcagtaataataaagtaaaaaattgtaccaatcgacaaggcaatattctttagttttcttacataatgattgtttatgtatttatccatagcaacttcaaaatctatgaggttatgtgtttttaaataattattcaataggtcatcaaattttatgtgttcattaatcctgttcacaaagtcttcaatgctgtttgatgaaaaaatttctattaatttttcaatcggaactttgccctcctcgataagatgcttcttgacggtatccctgtcaagattggagtcttttccctttagcagggttaaaatattctttttatcaatttgagtacgaaacagatctcttgctattccttcgtcaccttggaaaaaccttatactttctaacagattaatgtaataaaaagataagagttcagtcatcatgggacttatatcagatgtcttttggtatgtatcgagattctgtatcaaaatagttccatacttgtactttactaattgattaacaacgccttctacagtaggctgtgataatattattttcatctcgtcatgaggaatgttgcctgcagtgattccagcgggaaaattccgactagataccaagaatggttctgtttctgtaatagtccttcctatgaccttagatgaaagaatcaactcaatattatgtatatcccatttagagaagtaagctcggattgcttgcttcccactaaaaggagtagcctcgagggcaatcttattgacttctactaaatgtcgattaatagcaacctctaacaattcaggtggggagtaaagtgcagcagcccggtcaatttcaggtccataccatgttgattccaacattcttgcgacttctccaacgtcctcagctttaacaagattttgaatagcctcgtgcgaaagaaaattagtagatatcgcctgcaatcgtccgaatgcagaagaatacggggatgtggtcattttatttaatcattttttcatagaggaagttcttaatttcgtcttcttgattttccaacaactcctcaaaagtaagatctatttctttggtctgtgatttatctactgctataattccgcccatagtagaaatactcgatcctacgatgaccttcatatccttaatgtaaggaatatcagactctctacattttattataatgtcgtcacccaggtgtctttttgcatagtgaatcatcttttccaaggtctttttgtaatcagcctttttagtataattctttagttcatgttttatagcatctactgaagtgctcatattcttatttattgcatcaaacagaattttctttgcttccagtcgtgcactttcagttattctcgcatactctctctgagctttgttctcggcttcattttcagatttttcctctatttctctcactttttcgttttttatttgggaaattctattttttttatcatccaatagagaattaaggatagctaactctttcttttttctatcctgaatctcttgttcaaatgtattgagggccgacatttgatttatcttatgttaaagtattcccagcaataggataataccaaggacgaaaccaatgatccatagagtttcaggaatgacaaagaagaataaaacttgaccaaatttctcgggtttttctgcaattatacccataccagctgcgcctattccttgttgagcatttccagtacccgatcaaccctcctgctatagcaattgcagcggcaacagctaatagtgatttatttaaacccccatctcccgtcgcattttcttgggcaaaagcttgaggtgtcaagagcgtaaaagccaacaatgcagcgcctgctattacaggtatcataaacaactttgaataacgagattgtttcattaataattaaagacctgcagtggcatattaataggtttttttaagataacctcatctatttgaattctttaaaattctatatttatacttaaatgatcttagaatttatgtattttatggttctaatatttagacttaactagagtgaaaatcataattttgactttgagaaaggtgagaaaaggtaaaaattttactcagcgatctcaatatactgttgttactaatgttagggattggatgaaaatggcaatcaaagcaaagcgctgacttgcagtggattatagaattaatacattatctattgttatgaatattttcatatttcaaaagacataaattaaaagtttctaaaattaaacttttacaataaaacctactatcacaagtatgacaaaatttctcagattttctgtttaaatgagagccagtttggacaatccaattttgtggtatctaaataatctcaatttttattactgggcaaataagtactaaatggaatgacacgaatagaataatcttttataaaataacttagtttgattatttatagaaagatattgttaagaagtatcctcggacttatcattctctcatttattagaaggaatgaacgcgatgttgtgaatgtatacgatacattctcaaatttgatgagaattactactggaggcaaattactaaattttggatactggacaaaggatattaccaacccgctacaagctcagattcaacttactaaactattcggaatatacggttcctttgatactgctcaaacaatattagatgtaggaagtggtttttccattcctgcattacaatggattcatagatattctaatctcaaaatatattgcctcaacattagtcttaaccaactaaagactgcaaatgccgacataaatagaaatcaatcttttgaagatgtcaatagtcgtacgaattcgaattcatatattagtaatagaatatttcacattaattcaacttcaacatcaatgccatttagaaacgagagtatggaaaggatagcagcatttgaatcagctcaacattttaagccgatggctcaatttatacatgaatcaaaacggatcttaaagaattcaggacagcttgtaatggctatgccagttatatcctatgattcgaatctagaccctttttccaaaagttataatcttggaatacttgcagtaacgtgggcctctgaacactataacgttagaatgttaaaatcattgttgctaaggaatggctttgagttatcaaatatagagtatatcggggagaaaatctatggaccgttggccgaattttacattcagaatcgcgataaattgaggattgaaataactaaagagtatcccaagtttcttgagctaattctttacaaatctatgataaagatgaagttggcatctgatagaaattttattgattatgttttaatacgggctattaagagataagcaattttgatttcaaagttgatgttaaaatgattatttaaataatgtatatttttattttaaactatgtctacatcggcacaaaatgagtcatcaaaggattttgtacagctccccaaaagtaaagatgagcaagagcaattagcgaatacaaaacaatccaaatttgcagagttaattgggtggctccagagttggggatatggagtagtagacaactccaaatatgttagaatagccggtattgaatttcaagccgagataacaccacaaattccgtattcctcagggttaagcactcccttttatctagaatttcaggacgacttgagagatggattcatactaagaacaacatttgaacttgacaagaatatagagatccatttaaacactcaaaccagggcaagagaaattgaattaacctatattgaaataaaccaattagttcttcctcttaaagtttccattttaaggaatcatccttttatcaaactatacaaagtagtttttacagatgggctaaataaacaatattttttggaatgtgttactgatttaataaattcgatgtcattgatcattggcaagtgggatgaaaagtactacagcattccccataaggagaccaaaggaaaaacggaaaaaaaaactgatgacctagaattagaggaaatactaaatggttgataggttaacatacatagtcacaagccatctatataattttaaatttggaaattttgatatattgaataggattttaataataggattttattaaaagttctgtcatttaaaggaaatcattacttttccgtaaaaccaaggcattatacagttattatccggttttccattgaacctaactcaaatgtcggattttcatatcttccataggatttatcgactaatgtaagcagattcggatgaattaaacttggactattatggtgcaaaatgacaagtttaataataatgctatagatttgattataataagctgctttggaaaaaatggatcattataatatattgggagttgctagtaacgcttcatctagagaaatatcatccgcttatcgaaggctagcattgcaataccatcccgatcggaacaaaacccctcatgcgaatgatatgatgttaagaattaacacttcttatagtatactttctgatcctaacaagcgaagagaatatgattcgtctagaattagagctgaaattcaatacgaaagttacaattctaatattaaaactgatgtttttaataaatctaatattaaaacaggtgaggaaaagtcgaaaggattttttgaaactaaatatgtaaagtatggaattattgcattgctaactctgaaatttgtaatcttagaacttaaaaaatggatgcagcgaatattctaaagtcaacaaataatacctgcatccacaatttgctcaaagctgaaataatctcttattttccaatcctgcattcacaattattaaacgaatactgaccactcattcacagacctggataaatatctctttctaggccaatggggttatgagataatcatagttcctaaaatcgcaaatgatccttagtatttaaaattcaagtctcctcattaatcatatattaccagtcgagttggtttagagtttcacatatttacagaataggtctattttctaataaataaaaaagagacttactatttacttatggcaggtaaaatgttggttgcgatgtcctccaagtacatttggatatgaggctctatattccagatcttctcactctcaaataaatgcccataacgttgagaactccccatcaattcccttttctgtaatttatctaagtaactgcttttgacactggtttcgctgaatccgttcttcctagcgagagaatctaacagattgtgaatccctgaaccatgttgagctgcctctttaattctatatgcaatttccttaggaatacccaatttttcggctaacctgcggtgcactctttttcctaggttgtcatatagatcaatacctccattttggatatttaatctcggatcgattcttaaaacagtatcaattaggtttggatcgagaaatggttcccgcaattctacgctctgtgacatagttatcttatcttccctttccagtgtttctttgtataacaactttacatccttaatcatatattccaggatcttgtcgtacccatatttttgaactattttagagtaccatgaatagcctccaaagatttcgtctgcgccctgccctgtaagcataaccctaattccttgctcgcgtgctaatttgactgctgcataaattggaatcgcaacctcaacctgacccatattatcatcctcaatcacatttatgatttcaggtatcattttttcaacgtcatcttccgataattggttaatctccaagtgtaagtccagtttttcggctatttctatagaatttgtaatatcgtttgaattcttaattccagaggtatagcatatgacttcaggaaccatttgtttggccaaatatgcaacaataacactatcgatccctccagaaaagacaattcctattcgactgaaatctcttacccgtttctcaacagactggatcagagcatcattgtaggcatccaaggcagaattaatatctttgtacgttattgaatatttagtacgaatcgacttgctagtgttaacggttataggatgcagagtagtgttgtagctatgctcgtctccggttttagaaatagccaaggcatatccaggtaatagcctttcaatcttgttaaacatattgatattccacaatgctttcttttctgagccaaaagcgataaaactatcattttcactataataaatttgccttacaccgataccatctcttactagtataatattgcctgttgattgttctcttatggctagaacgtaaattccgtcaatttgaaaaacggtcctttttacggcttccaaaaggttacctttcgttttttcgtaatgatcctctatcagatgtatcacaacttcactgtcagtcgaagtcgtaaatttatgacggccctctagacttttcctcaattctctatagttatatatttctccattgtgttctaagaccaattttttgttacagctaataaaaggctgtgaaccacatgagccaccaactattgctaatctcgagtgtccaagtacattgaatgcatttgcctgagcaaaaaataatttatcaaatttattagagtatactatctcatcttcggtagccaatccaacaccgtcaggtcctctgtttttcatacaagttaacattttttcgatcaaaggtgctacattctcccctcttttacttaatattccaacaattccacacattttaaaaatttcctaaacaattactattgtataacaagatataataataaccccattacttaaatttaagtattacaatttatatactacatataatttagaacctcaatcaaatctggattacgaataatgtttttgctttgtttaataatgtcctgatcttttggcataaatgcaatacccaatcctgcttgctttatcatgcaaatgtctcctcgggtgtctccgatagcgatcgtatctttaatttgaacaccatacttatcggcataatgatttaagtgatatcttttacaaatagatattttacatggacaagagattttctcccatccaagcggcataacgatttcacctgtgactatcccatctttaatgattaattcattggctgaacaaaaatctaattcaagtttttttgcaataacttgtgccgctatactgtaactatctgttatgatgcctgctctatatccattttttttaaaccacgttacaattttatctgcattatgcataataggaatagaatcaattgaatccacaatttccttctctttgacacccttaagaagggaggctattatttgggttttctgatatcccaataaagataagtctgattgaatcttagttactctctctgtcacttttgcttttttagaaattatttctattaatctgccttgaattaaagtcccatccatgtcaaatactacaagttttggtctaacagtcattgtcagtaatacataatataatagaaaggggggattattatgtgctgagtcataagttttatggaataggtattattatgagcataattataattagatatgaaacttgatttcccccctagattttctgagaggattggggctattagcctccatgcggttcagaagatctatgaattggattcaggaaagtctcccgagtttcacggtggacacaggactattcgagcttttgatcatgatgaactttctagcatatttagagatcttgcaattgttatacccataaaaaatgaaagattaagactaatcgaaggggttttgagtggaattccaaatgaatgtatggtagtaattgtttcaaatagtcagattacaccagtaaacaggttttcaatggaggtggaaatgatcaagcaatattctcaatttgcagataagaaaataataataatacatcaaggagaccctgatcttgcaaaaatatttgaagaaataaaatatacatcaattctagattcaaaaaaacagatccgtgatgggaaagctgaaggaatgataattggcattctaatggctaaaatgcataataaaaagtatgtcggttttatcgatagtgacaattactttccaggggcagtaaacgaatattgcaagatctacgcagttggatttgggatggcttctaccccttatagcaatattaggatctcgtggctttacaaacccaaaataaggaacaatatattgaaattccctaaatggggacgaacctcagaggtgactaacaaatatctaaacgccttgttgtcttatattacgggatttgaaacagatattataaaaacgggaaattctggggagcatgccctatctatgtcattagcagaaaatttaaattattcaagcgggtactcaatcgaaccatatgaatttatcaatatcttagaaaaatttggaggattgctccctacagattcgccggatatcgttgaaaaaggaatggaaatatttcagatagaaacaaggaatccacattttcatgaagagaaaggaaaggatcatctgacagaaatgcttcaggcatcacttcttgcaattagcaatagtaaagtatgcaacttggaactcgcaaaagaaataaaagaacatttactcagattagacacactatataaaaaggataaaagtggaaaggcggaatcaaaaaagtatttcataatggatccaataaaaacaatacctattgacaagtttggtgaattagtaaaaaagaatgtaaaaacattccacaagatataagaaaagcttttatctgatcacctatcgccctggtgtatctgattatccttaaaattggatgaggggttttttgaattgatatttttacttaaaatagaccaaaaactggtcatccatctgtggttgatataatatcccacgatatggaagaaatgtcttcataaaaaggtagtctaaagccgatttattaaaataattataattttttgtcaaataacttccgttagaaaacccactttactttacactgcactaaccgccactactattttatttaaagcggtgcttctgtccacctgcaagtatgactgttcatctgcactattcattaaagagttgattgtttcaatcaagttcaatttatttcagcggtgttgaggagtttacaagatgtatattactcattgtttatgaagaataccatcaaataagatgaaatgatatcccaatataaaatttaagtaagattatttcggtaattgatttgagactaaaggggtagacaaggagctgagaaatttacaatctatcattatacctggaataatcataggtctcatatgtggaattctcttatttttcgctgcatacaattactatcctcaaaagaatgtgaatattaatttaaacggtaaatgctatgagtttttagatgtagcttatcaaaagtatcaacatctagtatccatcagggaacgggaattgttaaagatgcagatagacgccataggcaaatcaaactcgtttgttccaattacattcagcggttcaagtgttgatatagaacgcataatagactactatggtattaatgtgacagacattcaaacattaggtgatctaaatacacaagtcgacaagatgatagtaaagggcatagtcagctttgcgattcttgagcaaatattaagcaatattactgaaaataatattggtgctacaatgaactctatgcctaaattcggcattttacccaatagtggcatttccacgtccgagagtgcagcaattagtgataatactcagcaatttatgactagtgggataaagaaaatcattcaagaggaagacggcgtaaaggaaacagaatgtagaagtaccataatctataatgattcgtaaattcaaaatatagttgattataattattcctccagtcacaagtactactctgtttaatacaatacaagatgctcaactacaaaatttatcggcatctaagcgaatttggatgtcacccagagtgaaaatttcaattgcatagtttgatttttttatttatttgcttttcatatcataagaatggctatttgattatccaacgatttttgaatccattccaaggttaggtaaaacaagttccaagattcaaattcttgttattaatactacataccaaacggaattcttaattttaattgaatcccaaatcatccacattctatcatccagatttgcactattataaggggttttaggatcgcttaacacccctttgatggtatcaaaatgctcaaatgtctcgagattaacttgctgagtcatttcactaagagagcgtgaattaggttcctttttaaaacttgtaacattaagtagttttaaattatatttcttggtatctaaaagctcagttccattatgatcaatcaaaacgaattgatctttagtctgaagagatagactttcaaaaatgtcttgcagagagtgtaaatctattatcccgacccagtatccgtttagagtgcttgaaagtgtttgattaccaagctcgcttatcgatgagtaaatagggaccgcaatggctaatgctggggcatttatcgaagaagatataaaaattgaactaatataggtttgattacttttgagaactcctttataccattctcgatctgcaaagttaattcttggaagttgctcttggtcactaaatggttctcccatatagatatctccattaggcagaacaaagaaaatacttgcaagatctttgtttcgttggaggatatctttacctagatttcttttgtccaagtctaagctcgatgaaataccgttgtattcgtcagtaacattctctataaaaggtacgtccataagggattcgtctttacttgagatttcaagaacatcaactatattagatatcttgtctttgatcaaactggcaaaaaggacaagtattgtagacttgtcagtgaggtttattggaggttcttgtaaataatcagattcctggctttcattgttatatggctgagcaataacatgttggatcatcaacgaaaagatgcatacgacaatgataaagatagttgagaatagaaataatattccgataccatggaattgaatagaaatatgctgattcatacgatcagtgatgaccaagataatctgctaatatttgtttcgcttatacctaaataatatttttatcaataatcttgttacattcgagttagtaaggtcaatagtacttttttcgatttattctattcatcaaacaattctaattacttgatatcaaacatgattgaaagtgaatgatttgattttcccttcagagtatacaaaaacaagagcagtatgatggactaaattagctgatgttatcttactagaaaaaattattggggatttgatcctaagaaggtagcagcatcatctagcaccttattaatttcagcaatactctcttttaattcttctattgatgcattcccgtctatttgtacacgaagcttttccctaagtagagcttcacccctatcagataattctttcccaattggtgcttctgatgtactcaaaattatctaagtatgcggtagttgctaattctttggcctttgttttatcatttgattcatatgctgtaattacttcatttagtaaccctctaatagtagctatatagtcctgagtagtttgagttgggctgtcaattgaagtcgtggagttgtcctttgggcttaatcccatgttaatttcctgaattatttgatcaataatggagggatcatgtaggttttggactgaatctgtcaaatttgcaaaatgagataatagtaccgtaattatctgagtttcatttgagatattttgtgtattattaaacaaagtaaatgctctatcaataaaagcagaaccatcctgatattccaattccaatattatattacctcctgcaactccttccttatattctgaaccagagatggttagtagattttttattacactaacattgtgctcggtagttcctaagactgtggcaggtattactgtggttattactttattagacaattcaattgaatatttggttttattattaaattcgtcaagtgtactattaccaggagaagctaaagcaggcaaatgatataaatccctaaaatatgtatcatttaggttgttatctgttgtagataatgggatagtaataagcgtcaatacctcttgaatagggtgaagtgcgtgacctaaagttaatgtgtcattattagaaattttgttttcttctgccttctctatatgaccaatgatttgttcaacatttgaatgaaaaccagtataatccgtctggttctgttgttgtgtaccattcatctgacctataacttggtttggcaaggataaaccaattatcaaggtggtagatatagcggtcattaatactaagactatgttcatgcgtttgcaagaatgcataatgaaaaccttgtttataatgcatttatagtgttattcatttatcaagattgagaattagatacactaatgtcacctaggtcatcaaaataagcaatgaaattaatttttcaattatctcttgttgtgattaatgattgaatgaacaaagtgtgcatttgaatggcaaacaaatttatcatatttaatggaatccacaataaataaagtcttttatcgtttatattttttcatgctgcactgatactgtagagtcaatatggggtgaataggaacaattcccagtttcccagtttaatgtttcgaaatacttcgatgtacttcaattttaaatatcaaagctttttagaattacggttctaatatagttggaattgttggaagaagacaagacaagtttagagaacgtgttgatacttcaaggcggtggatcgttaggagcatttgggtgcggagtatacaaagcgctagtaaaaaatcaactcaacttaaacgtaattgcagggacttcaataggaggaatcaatgcagccataatagcaggcagtcgaaataaagagcggaccgatgaaaaattagaagagttttggctcgagctttctgaaagttttgttagcaatgagaaatcttacagtgctttgagctcagaaataataaaccaatattacgaaaattttggatatccacttcctcacattgactcggctagtacatttttaaagctgagggaggaacaacagataaaaagtaaacagcttaactcattccttagctctgctgttttcggaaatgtgaaattcttcaaacctagatggtttcctgaatatgcagtatctgatcctgaatacttcacaccaatgaaatggacttatttgtatgatcatcggcctttactcaaaacactggacagatatattgattatgacaagttaaagccagaaagaaaagatattcctcgattaatattgactgcagtcagtgttttggattccagagctctcatatttgacagcttcaagcaacagatctcaccgaagcacattttagcaacttctgcttatccactttataattttccatggatagaagttgacagaggagtttatgcgtgggacggcggtcttttaagtaacaccccacttagggaagttctggaggcatcaccgatcagggataagaaaatattcctagtagaaaattatccaaaagaggtagattcattgccgagcaacctcgctgaagttcaccatagagccagagacattattttttcagacaaaacggaacataatataaaaatgtcagaagtaataacacgatatttagatttcataaaggatctttatcaaattattgagaataatacagacagattgaaattagatgcggccattttgagtaaaattcgtcgaaaatataaaaaatataatcaggatcatggagctgaaataaaagatatctactatatttcccgcgaagaaaagcatcctcatatatttgaaaatgccgatttctcacctgataccattaaggaatcgattagagcaggagaaaagaaagccaatcaagttataaaagcccataggagaaagtaaatcttgaatgagacacatacatatactaatcatttgatactcctaaggggaccaacaagatagatatgccacaccatatttcagaagctattttcattttctccgatgggttgcagaatcaatgtcggggttatcagtcgctctacttttgcaaattagcattttattttactaaagttagaaaaatccaaatcaacggtcaaggctgtcttttcctatcagcaatgaaaccagtgtcacaattgattatcgttcttagtttgacaaaagaacagtttctatctatcaaagcttaaactatttactggtgtttcagattttattaaactgactattacaaagtgatcctaatttcataatagtaatgtttcaatttcttttagcaatagatgaaatattttgccaaaaatctacaaaatggactaaaattgagtcttatacttgtatcttagccggaactggtcctttcaaaataaaatctaatcattttgtattcgatatagataaacgcttacacctggcaacctaatccgttaatgactatgaattttgttaaagtagtatcagagtctatcagttcacacctctttgcgaatctattttacttttggagaaatgctgtagatctctagtacgcaacgctctaacgaactcaaacatggggtgggaaaattccattagtaaaatccttaaatttcttttttttggatcatacccatcaacacaatattattacgacagtgatttatcaaaacatttgatagcttccttaaattcgttcaattgatataaagaatttcccttcatataccaagaatgaaagcctctcaatgaagatagttcgagggacctatcaaaacatttgatagcttccttatatgatttctttttatataatactactcccatcgaataccatttatctttaacaccacatcgttctgacataccaatagtatttccaaaactgtttctaataaatcttttgatgaagattggttcatattggctttatttacaaattctttacaatattttgcttaaatcccaatatttataataaaaatgatgaatcgatcggagaaaataaatctaaatgaccatgttaaaacccatttgataatttacaagagaacattataatcaatttgttaaataactattaaaaagaggtttttgtaataatctaaaaaatattccattatccatattcctcttccatgtctaacagtcaacgctattgcggtcgaatgatatttactttaaaaactactccttaattaaagtagttctattcatctatgatacatatattctctattttctactgtgaggtatttatagtaagttcaaattgaataaaatctaagttaggatatgtataaatgtttaaaacgtattagaattttaacactaaggactttttaaagattcaaaataatgcgttaaaagaaccttcgttattttactaacaaataatatcataagcatcagtaactatgctttgataaattgaattgttaaggtcaattctataataatctagtttatctggatcgtatttttgtataatttcaataatttcgcttttcttcttgcgctgcattattacatctctatgagcataaccagtaacgtaactataagcattcttaattgcttcactcaaaaattttatgcgtaagtaatgaccaccggtacctccccaataaccctcaagaatgctaaccccttctagatatgcagtgttagccaatcctttattcacatctacagtacctggacgcaattcatagttttctaacggaccgccttttgcatagcctattacatcaccatcgctggtgttcagcctcagtgttatcaagatagatgattcatcaaaaaatgtttttctgaaataatcctcactttgttgcatcaaagtagatactcggctattaatgtctaaaatggcctttaaggtattttcgtttattttgttatctagtctctcagtaacaaaaatcattttcgtacctctcttggaatctcttaatcctacttccttattccaagattctctaaaataggcaacgttatcatagaaattttttctaaattcagatggtatcctcggcataataaaatcgaacatctctttttcttctaccatcaagtaatcaaaatatttcacagaatttttgttaataacagaaggatgccatcccagtgcatgagcattacgtctagccatatctcttgcgtgttcataatttcctaatgcatatccggcaatacgctcagatactgacagaaaccagcctaaattccaaaaacggtcccttgtctttaaatcggtctttgaaattccagccgcatcgaataattcattaatcttcatggcagcatattgcgcaatttctcccttgaatggatatgctgtcctgtggatcaacgtcataaccaaatcaatattgagatccgcgtttgtgataaattctctgatcttaggatcatttctgatgaaaaattctacgcaatcctcgttaggtttatcaaattccttaagaggatcataatcgtgaaatagcgcggctataaataaataagcagattctttctgagagattttgaaatcttctccgttgttaataccagatattgataatagcgtaaagtaaactgattctagttcgtgttgtatattatgataaccataataattggtgcccaatcctttctttgaaaattcgaatatggtgtagcgtagtatattttttacccatttatcgtctaagcctaaggatcttcccaaacctatgatattatttttaaggatagattctgtggtttgacctttttgatactgtagccaccagggaaataactttattctattataaaattcgaaacccattaaggtgaatttcgtgggcaaccgggcagctgataacccattcgtattgtttagatcaccgttcttatcctcaggtcgaaaaattgatgatctaaccacaagtgtagaattagaatcccgcgatataaaatttacttttctatgtactcacaatgatatttaattaaataaattgtgctttttagtgtaaactataaaatttttaaggaatagtctaaattacattattcattatctggttaattataataccggggcaatagaaaggatgtatgacaaagacatctccctcgagaaaaaacaacattcagaaagactaatgataagtgataatcccatcatcggttaaacaaaccactatagcaacatgtttctgctagcgaaatttgaatttcaagtatagaatgcaattaatagagaaaagattgtaaataaatatggggtgaatgttctgaagaaatttattcatagtcctctacattttctcagagtaccgtcatcctcataatgtggttaaaaagccgaatcagatatcagattagctccaagatcaattccggatagcatttttgtttaatcaggtgacggaatctaaggcgtctctgatcagtgatagtttacatctttcagagcttgtcgttaaatgttgctaaaaaccacatgattccaaaagggtccgctactttagccactttgtctactgagtatttgcgcgtaggcggttcaattgatttacaaccaacttttaaggctttctcgtaagcagaatcgacatccctaacatacacccataatgaaggtgaatctaaatggcttttttgatggtcttcctctatcataatacaagtatcgcctattctaacttcagcatacaccccattgtcttctttaatctgcttgataagaactgcattaaaaacaatttttaaaaactctacaaattcccgtacatctccgattgctaaatacggatttactgaatgataaccaggaggagacgaattcaggttgtccatggaattgtcatataatttgtcatataattagacaattattttagaatatcgtctcaaataacaccaacaaagattctgatttttcaaatcacatatagagccgataataaacttagtatactttccttggaaagcttttgtttttttcttttgcgtagtggactaatgatctacttatattattgacaatttgaattcatcgaatagtccacaatatttttatctaaatataattttgaatttcatctaaatagggaagaatatcgaccaaaaataaattcgaacatgtaaaaatgcagtatggtggataaaaattcagagtaaaattaggaatattcatttttattctgtaacaattactttccccaccattcccggatgaagtatgcagtagtatggatattctcctgcggatttgaatgtatattcataagttttaccggtacttgacagtgctcctggaccagccaatccagagtcaaatagacggactgaatttgtatcgctcacatcacccgaggtaacagtatgaaaagaaaagtcttcatttgtccacagaactgtttgatctacattcacctccacaggattcggataatacgcggtatcagttagaaatgtcgcttcggatacaatcgatacttggattttctcgtttggagaaattgtgacgttgttagacattggagcagtatcatcaggaacttgttgaccaattatattttgattatacacttcaatattaactaaagttgcaaccagcatcatctcagccactaaaaaaagtggttttagtttcattaagaatataaatatatttgtccttaatatttcatattaaaatatcacttaataatactatacactattctcacacgaaaggaattccaatttcatttaaatgactttgaaacaagtgtttgaatgattctagaaaattatttcagttattagataggaatggtacaaaaaacacctaatattaattacaagtggttagaatcagaattggcttattagtcgatcgtttccataatttgttacttttgggtcaagatgtattctgtagtcataaataattacgttccaaaccttcttaattaaagatctaaatatttcttctattgggtatttacataaacatggaaaatatggatatcaaattcacccttctaagaaatatggagtgagctttttttccaaataataataccacagactatctcaatactatatatccagaaaatactaaaaacggaaattaccaaggtaaaggtagttttaacctcagctcatctaaaggagtagaattagacgagaatctaaataatatagatttaatcaaaaatgaaattaggatatactaataaagaattcagttaaagaatatgttgtaacccgagacagaaacgccttcaatacgatactaataatacagcggacaaaaggagaatctatggaaatttatcattgtaaacattgtgctatggaatttgataacgagaccatcgtagcaaccatttacggtgcattatttcatttgatactcccgaaatcagaggataatactataaaatattggataccgactgctctataatatatccatgctggaggataaatttttgtatgctcttttaatatattataatgctcaagtttccataataaagtatctctcaaccaaactgtaaggcactaccagcatttgctaaaaagttatacaaacctatccattactaacacaggttaaagcaccgacaaatctatagaagatagacaatgagtcacaatgataaaatcattttataaaatagtaattcttaatccctttgagaatcagccgactttattgattactaattcctttttggaaatagatctgctatgaattcataaaatgcaagctcaattagatacattgcgtttgacatctcgattacactgtcccataaatattgtttacattctatcgaattcacatcaataaacaaatacttttccacgctaatcacggaattttcaattttgcagagtagtctaattggtgagagtatcttatgcagccggataaaaagatcattttgaacctcctccttgaggtgttcaaagtcacttctatcttttgggttaaacgctacactcatacgaagcaagaatccatctttaagatcagcgtctgaaaatatttcaaaaaattttatatcttgatttggcggaaatacctttgcgtaatactctgtagtacttgttttcagtttctcctcctttatagaataaccataatcctttaaccattgaattattgtagtataaacacggtctttgttactatcagtcaatatgttctgttggaagatcaaatatttaaagagattgaattgcttggttcaggctttagatctagttaaattaatttggatatcttgataaactacaaataatccagcctatctatcttatctctttagcaaaaatactaataacaaacaatcgagggcttatattgtacttctttgtctctggacatcaggatgatacaatgatatccattctgttccttctaatagacaatatctgaattacattttattatagaataatagaacatattttcttttcttctttgttagaaagaccatagtttatactgaccttaataaataacgaatttaacaaataatgacgaaaccaaatcataaatcgggtagatgggtaattatagttggattcgtgttggtaattttgggtattctatttcacttacagagtaactcattgattggacctgcttcttcattcatgtatgcaaatcccgaatggacatttaatggccttatcattatagctatagggataagcatcatagtaattggcctgtctatgaaatcaagaaggaataaaaatcagttaatttcttaaaattttatatcaacttaaaattataaaatatttgttctttaaactagactggatctattaggtttaattttaattcttaatgaagtatatagttagaattttgattctttgttgatcgttactaaataaatcaagaaattgcgatgtgtaattagtgggtaccccatcaattatattgccaacacaataacctaaactggtaaatgtagatataatccactctttccaactcttatattcatcatctataattggtgaaaatagctcatcagtaaattcagtcactaataacaggtgcccttttctcttaattttgcatagtatggttcggtatattggtttccaatatttctcatttttacggtcaatatattttggatgtggtaatattgataagatttcatccaccgtataatcgggtaattcgttaattgcatcttctaatgggcagttaacaaacaataaattttcctttttactagatagtaggagacaacatttcctatattgagaaacatccaattcgattccaagataaaaagcatttgatctcatatccttatttgctaatccgtatagcaatcttccatcgccacaacctaattccattatcagtttgtcataattgttcaaaaatgatatgtccatgccaggattcatttgatcaagaaattcatcagatttaagtaaattaattcaacatttttggtatggttgcgagtaatggctggttaatgcatgtagttatttttcataaaagccattatttcaattagattgattttcaatgcccgcagtaggattatttaatactaatacgagatagaaaagtaaattcgtaactaggtttaatcttaaccatggaacgtgattttaataaacaggttatcttgattactggtggcacgggtgcgttaggctctaaagtatcagaatcgtttctgaatttctctccaaaggcagttattataacatttaggtctgaaaacgagatgcaacaattaaaggcaaaaatacttgatagagaaaacgcggaacaaaaagtaactcgtcaaacacttattgaattcatgaaggttgatattactcgtgaggacgaggtcaaaaaactaatctcgaatatacttgagaaatttggtcaaatccacgttttagcaaatgtagttggtggatattttggtggcaaaagtgtgagtgaagtgagtgaagatgaatgggataaaatgatgtccattaatctaaaatctgctttccttgtaagtaaacatgttttgtcatctatgaaaataaatcagtatggaaagattgttcatgtatcctccacgactggcgcaaaagcaaatggaaatgattccgcatatgcatcatcgaaagcgggattaataagattggttgaatccatggcagaggaggtaaagggtctaagaataaatatcaattgcgtccttccaacaatactagataccgaaagcaacagggcagcaatgcctacgtcaaacttttcaaattggatacaagccgaggaattggctaaggtaatctgtttcttatgttcggaagattccaagattattagtggagtggccctgccaacccgtggaacattctgattattgtaaaatcctttttgatggagggtaataagatcaatagattgcacaatattagcatacaaaaatcctttagtattgaaccttagtttataaaattatggataatttctgcaaaaaatctttgtcaagttattcgtcctctgtctaattgtaacaagattagaatatttcaagatttaacctaatttcactctaattgaataacattaatgtccaaagaattctattaggatcatagagctcaatcttttcggtatctttgtcaattgaaattacataccgaaatgaaggatttatttaatgacaatcatactatacttatttgtcataattgaaatcaactcaagatcttaaaaaggatcatattaccattagaagaattaaagatattgcattgaagtgctcaaatagcttgtacgaaacaaagcttgttcctatagaagatatagagattatttcagtcgtaatagaggagtttgtagatcattttcaccatggaaaagaagaaaaagcatactttcctgaaactaaagaaaagggcgaattttctgaagatatacgaaaattccttattgaacatgaattcggaagaagaatagccattatacttaggaaggctataaataattggaaatccaaagtcaatgaatcctatcaggacgaagaacaaaaaagaaattttatagagcctattgcaagattcttgaaaacatatgccatatttattgaggatcatacgggtaaagaggatagattttttgatagtattgaaaaagataaaattatttcggcgagcgaagaccaattgttgttaatgctttacgaatcatgtatgaaccaagcagggggtaaaattagaatggatcaaatggtcaaattaatagattatcttgaaaacagagaatggatgaaagaataattcagttgactgtgcagcgttactaaatctgatctcaacaatcccaaaaatttatttctgaaaatcattgtaactatcccagagagtgtcaactatctttcaaccgcgagaaggttaatttgccatttccttgatgaaaatcacaactactgtaaattaattaagagttggttggggtgcatatttgtctaattcattaaggcaagataaagaaatgagtcttaactgaaatcaaaataagagattctcagttaaagcttaaatcgataccgacggatctcatcgtatcttctacgttgtctaaaattccttctacaccagagttcgatgatcccgaactgtcatcattgcggtcatcgaaattatatccaaagtcagaatcacctattctatttgagaagccaactccatcatcgtcatcattactgttgctgctgctgctgctagaggtagagtcgccatcatcgtcatcattactgttgctgctgctaaagccactccagctgctagaggtagagtcgccatcatcgtcatcattactgttgctgctgctaaagccactccagctgctagaggtagagtcgtcatcatcgtcatcattactgttgctgctgctaaagccactccagctgctagaggtagagtcgtcatcatcgtcatcattactgttgctgctgctgctgctagaggtagagtcgccatcatcgtcatcattactgttgctgctgctgctgctagaggtagagtcgccatcatcgtcatcattactgttgctgctgctgctgctagaggtagagtcgccatcatcgtcatcattactgttgctgctgctgctgctagaggtagagtcgccatcatcgtcatcattactgttgctgctgctgctagaaccaccgcttcctgatccggtagaactgcttgcagttgttttacaacagattggaccatttcctgtatcttggttaaattgttgaatttgtgcaaaaggttgctgtaatccacctgaaacctgactcatattaccaccattagctgtcgaattggaagattctaacatcatgttatagcttgataactgtgcttgtgtaaagttagtagcagtgatgtttaccgagtaataggcttgtaatgtttgaggaccacctaaacataagattttagaggttatcttgttatttccttcattgatgtttgtataattgcttgatactgtgtattgccagttagaatagtcgttggctccttgagcacctgtgggttgaacattctgatatggctttatattatttatgataacagaaacatcacaatctgatgttgcattatcctttgaaataccgtgaataacaagtgattggtttgaatttaatggaactagatctcctttatctggagacattatctttactccgcctgtaagctttgtaatatttgacaccacatttggcgtcagaggcgcagaagtgtttgtgttaaccgaagtattttgctgtgctaatacttggatttttgcattataattaatacttgataacaatagaactattaatagtcctgcaaaaataacaccaagtctttttaccataatttattttgctattgatgtatatattaaagtttgaatagatttttctatatgataaaaccagttatatgttcctgccctagttcatcgatatcttgagatacctatcaaccttgtactgccttagaattaatatagacatttggggccacagcaatattaacaaatagaaatcacaatagacgttaaaccagccctgatattccttatagcaatatatctctattaatcctttttgggggtaaacaaaaagtcaaattatatttaatagatatttgaggcaaactttgtgttagtactatagtcttttaaaagttgtgaatattaatgcttaattttggatttcatttgacaagaaagaaaaaactgaaagaaaaccaaaatttgtcttttaatatatcatttgtaattaactttcaaactttagactattagtgaaccctaatagttaatgaattttctagaaataaaaatcggactacttataaaaataattaaataaagatagggtttgatctagttatagtttctcaatatccatttgtaattctaagtcaactacctgtccttggatttcactattcggattctactctgtatgaatatttgcataagtagtgccttgattaaattcatctatcaaatccgagacttgcattccttgaagaggtcccgtaagattctcagccatgattgtccctctctctaatacttggttttgaggattgtcatacttaaacaaagtgacagttatagggccattttcgccttctattccgtaatgaatatgcatgtagtagtgccttcaatttccgtagcattaatagtatacttaatactgttttcagctgaggcgaaatcagcaattccaactgcttgggtgtctaccggatgaactcccttatcgcctgaatgaactgcactatactgtgtatcactttattgtgctttggcgaatgcaatcaaattttgtgatgaataacagaataaccctattgtcaaaattatagaaattgtaattaataaggaactacaaattgttcttttcgtggaatccaattgcaagcttgtgatatttaagtcgtactgaatagaagaatcacaatattttctttgctaacttgagtcacttcaacatgattccaaaagactattgacacaaaaacaatcagattaaataattcacataacatactcatgaaaatgactgacgacaacaaggagctaatctttgacagtattattcgatggttaagggagtctaattttataataagcgaggaaaggagaaccatagttacgtcggaattttatgccaaggcttatttccagtccgttcaggaaaaattttttgaaataatatccacatcaggtatagaaaaacgtttcatactatctattagattaaatttatctgaacaacaactagacttgattaatgacctcgagcataacaagaaactaggcctctatgacaaaattaatcctgcgactttacctcaaagtcggtctatggtggtaaaagataaacaggctttattgcagaaaatagtctcaatcgatccaaaagcgatctattctaaaggaatattcatgcaagatgtctcagaactgttagaagcggcgaaaaagttggaaatcaattttaatgaatatatttctaaccatagtgaataataaagtaaatcctagctcacgtacgaaagagttaagcagaagatataaaaatttgctacacagattctattatgctgtacctatcacaacattaatgcaggttcattagttgttttgatattctattctagacgagcctttttgttggatcttataaagttaaaatatgtttaattattagagacgagttatctgcttgtacaaatgattagcagaaatgacgatttgtcactaatttttttcttatattaacgttgtttttatccatttttgtgatgtctaatcatctaagaggtccaaaggatcatccattatatcagttcttggatctaatagatattccttacctaaattacattttaaatccgtacacaacataagatcagattcctcttcagttgtactagtagaagtagtttcggtattagagtggctattatactgctgatgacaagtcaaatttggattttcggttccctcacatagggcaaatgttactccgttattattgagtgtcgtcattaatgcagatatactcaaaattgaaaatacaataactatttttaatagtgttctcatattaaagtatattatcgtaaataatattagaatttttcatctaaatactgtaagaatttatcctatttttttactgctaatcctaaaaataaagcgatgtaaggaactaacgcgtccccggcgtatatctgggatcattctctgctaatcagcgtttaaacatgaacttgtggttggcaccgattaaatattataggttgtacaaaagaaaaatcagtgttattgcttttggtttacagtcgagctctagccgtaaataaatacgcgaataatatttctcctttgatgaaactagatgagagctgctagatataattgctgatattgttatctaataaggaactcctatttttcgttgcttccctagagcttcgatgtaccattcaaattcttcaaagaatctcataacccttttattgtatgactcatccaataaatttccgtcatcgctaaatactgtgtgcacacgtggtattgaaaaagaagatggaatagatggtgcacctaattcagcaaatacaagtctcagctgctgagtcgcatttatcccaccaaaaacccctggagaatatgaaacaattgcagacggtttaaaataatattcttctaaaaaataatctaatgtatttttcatcgcactagatgtacttctgttatattcaggagtaatgggaagatatccgtctgcctcactaatttgatttcttagaaaacggagcttttctgatggatgagacatctccttatacatctgatctaatagaggtaaattcaattctagaggatcgataaaaaataccctatgattcctgtgtgctaagcttttctctatccatcttgccacttttattccctgtctctcacttcttacggagcctacgattacagcgatctttgccattatgaatattatttatgattacataaatgcgtagatccaataaaaaaaattattgcatagtcatttagcggatatatcccatatattgctgagcaccaaacaagatcaattttgttgatctttctaaacggaactgtagtaggaaatcaaaacataaaaaatatgacaacttaggctttaatgagaaggccagtactctcggacgattagttctatcgaataagagcgtatccaacaaagtttaagttttgaaatattagagtctcatgtttggaggataatcctgtttaatgcaaatcctattggatgtccatttgaattatttaataaaaaaatcatagttaaaagaaaatatgtttaataaatgaaggcgaaaaaattgcatttcaaactagtaacaggccgataaatgggatatatcacatttaacaaacaaataacattaaacaatcaagttgttccaggataagagtgctcctcttcagctcctctaatttcacgtatcaaaattataaatagttttaaatataatattgtaatgagtttaagatgttcaaattgcacatcagaaatgaaattgaggaacaaaaatgagattaaaattgattcctgcctcaggtgtcgtggggtttcgcctcgttgagtgaggctggaaaatgttaccactatgcagaatcaatacgatgacgaccattatcatcaatattatcatgggaaagaatataccacgatgacgattgttattatagaagaaaacgtaaaaaagggctttttcggtgatatgtttgattttgactaatcacttagcggtaatttcatatcatacaagtttagtattttcattactttatgattaattgtttttgattgatatagataaaagattcttgctcatcttagtattaatgataaattcgcatcgtaccaaaaaatacatattgagttaaacatacaaattgttctacctaaggcccagtttcgcttaatcgttaattccgattttatatatcgatttgctttataccggccaacttgtatccagtctatttcatgtaatttcagcctaattgtaaaggtatacatttctccgcttgatcctccttggttaagaaacgaagcattattttcaaaaagaacgaaaagtaaatacttaatctttatcgtagccaaagaaatttttacatgaacatatgtaacaatggtggtcgtttgattgatttgaaatgtatttatgagaaatcctcaggtgaccgcagcttctgcaaatatgatacttacgagaatccattgtgcaattctatctaccaattaaagatataagaattatttcctatatacaaaattatcatttaaaattattcgcgatatctcagattgaattcatttaattattttactctttaattcctccatttaagaccagtaataaaattttgaagattaaagttacttcggggcctattttttagttctaaactactttgaaaatggaaagataatattgatttttccatcgtctagatgcctgttcaaatgactgatatcctcctggacacactggaacagaaaatcaaactaaaaatgcaatatacattaaaataaataaaatgtcagattatagcaatttttgcagtcatgttatcattaaatactttgttacccactgttttccaatgtcagaagaaaataagaagaaatttgattgtagatgtggcgctgcttttgatactgttgaagaattagataagcataatcacgaggcacattagagaagacctctttgataaagtggtcggcaggtaaatcggtcaaaacaaatcattttttcctacaagctttaattttattcaatatcgtatagaacgggctataatttctttattatggatattattcgaactcacagtaagttattacttatacaggtcgccagtgtgtgtatgatttgctgtcaatgcatagtttacaaagaaagttaacaagattgaaaacattcctaacctttgtaaggcttcacttggttataagggtttgaaaagcatcaaggtttctatattttgttaaccatcctaaagtctttgtatgtttcgactattagttaacaatgatcagtaatttctttaggtttttcaaaaggatagtcatcaaatcatgggtgctaatctaatagagtacatcctcattatttcttctcgaatgctcatcaatcccatttaatgtaatttgatattcgttattacctatccgggaaacaaaaccatctactattagattttcaattgctaaatcaaaatttgatgaggcgatagaatctattgcaaactcacgtaatttactatcacttatcaatggagtctcctgattagatagtgtaaataatttctccaatattttaccttcgatcttacgaattgctgatccgtagtcgtcaggattattaactttagccataaatttaattgatttatctatttatataattgcatgcaaattgataaaatgacttttttttatcctgtctaatacatccaggtaccctcttatacctcgaaagtaaaagatttatactagaactatgatattgttaatatgtgtataaaatgtgaattattggatattattcgcaattccacgcaatcgcagaaacgagaattgtccctgttgatgaagactcgatctcatagtgcatcatcaaaccggcctcagaagtttgattacaacaatccacaaaattaactaattatatattctccgcgacctaagtatataatttgtaaatataaaaccatagtcaaatcaaagagaatccatccataaaggctccaggattgcaaaaaattgattaatttttcaaagtatatttatgatctttgcttcagtcaagtcttattttttactttggaattatcaatgttctaaaaattcaatatcacatactaacactctgaaagtgtcttaaaggctgtataaccaatatagaaagtatgaacggcatatgaaaattaattttgattaatttttaggtaaaaatgtgattctttgattattgcaaggatttatttaatacttgagtaggctatagcagttcaatacatccgtaatggactagaggaaatctgtgtgaaacaatttaagaaaataagaaaatgataaattataataaatttaagaaaagtaatccggtatgtcgtttagcttgaaagatacattttattctcaggtaagattgttggttcgtatgattatgaggatgtaattggactaggccatagaatttcagcaattatcataaaagcgctgtgatattatttttgtgtatactaatttataaaaagtaaacaaagaaatagctcctcaaattcaataactggatttggctaataccagctcccaattattaattaagataaagtgaataaccataatagttatttttttaaataaatatcaaaaggatgcgataatttgagtataatactcttgtatatggttaaatactttataattcatctaaatttactagatccacaactagtacaaacatgcatcaatagcacattatccagtgttgaaaccaagagcagcaagctcttcaatgagaagtaacttcgttgaagagcttgccatgaaataatatctaacaaatctataaaatttctaaaattattccttttcccctaattggtggtagctgataaagtatagggatatcttatttgatactgagtaaatgcccatttaaacgtcttaagtacttgaggtatgtttataaaaatatcatatgtcaaataatattggacggcgggcaagtccgaaagatatgccagcacacgagttgccatctacaagccctattggttatttagagcccatagcgttctttaatgatgccatgccaactggggtgacagtatcgcataaaggacgggtttttgttaactttccaaaatggggagatgatgtaaaattcagtgttgtagaaattcgcaatggtcatatgatcgcttatcctgatgagtcaataaatcaggctagtcaagaagatcttgcttcaactttagtgtctgttcaatccgtggttgttgatcctgcagaccgattatggattcttgatacaggaagcccattatttaaacctacggaatatggaggaccaaagttgctgtgtgtagacctaaacaaaaacaaggtcattaagaaaattgtttttccccaagccataacgttaccaactacttacctaaatgacatccgctttgatttgcgaagaggtaccgaaggtatggcctttatcacagattcggctcagaacggaccaagtggaatcattgtcgttgaccttgcatccggcgagagttggcgacggcttaatgatcatccatcgactaaacctgtagatatccacgcctttcttcccattgtagaaggcatcccttttatagagtatcaacaagatggatcattgaaacatggtgccaatatgggtgctgatggcatcgcaattaatgccgacggctctcgcctttattattgtccactaggcagtcgcaatttatttagtgttgccaccaatgcacttgctaacagagatacgtctgaacaggaggtcgctactaccataagtgatcatggagacaaaggaggggccgctgacggtcttgaatctgactctggaggaaatatttacgcaaccaattatgaacataatgctattcttcgccttaagccttacgatggaaaatgggagacgctggtacatgatccaaggctgttatggcccgatacactttctcttgctactgatggatatctgtatgttactgcgaatcaattgcatcgtcaggcacgttacaataaagggaaagaccttcgagtaaagccctataccttgttccgcatacgcgtagacgctcagcctgtcttattaagataaatttcagatcggtaaataaaattacatgtttaaaagtataaattctctacattttcttgtttgatctattaaaaggattaatttcgaaaataaggacagtgtttcatcaaatccaaggggtgtacctgcaatttttcctgattaacaataccgccttaaaatttctactccttccatgatcaatgaactttaagttgtttgttgtatcagggcctatatgagtgaaggaaaacaacaacacaagaatccaatccctaccgtagataccataattcaaaaggattctcaagtactgctagtcaagagaaaaaaggacccattcaaggaaaaaatggtatttccaggtgggtttgtcaacgaaggcgaaacggtagaagatgcggctatacgggaagtaaaagaagagacatccttagatattgaaattgagaatattttgggagtatattcagatccctctagagaccctcgaggtcatataatgtcgacagtatttgtaggaagaatatctgataggagcactaataaagagcctatggcaggagatgacgcagcagcaataaaatgggtagatcttgcagccatagaagaagaaagctttgggtttgatcataagaaaattttaattgattttaaagaatggaaacaatctaaacaaacttattggtcatcaaaaaatgaatagtatgactagttttttaaatgaacctgacaaagatatcatctcatatatattttagatctcaccaataagcaagtcgagaatttgttaaaaaaaatgaaatgacgtcgattctgaaacaaccatctgtttttgactagttctaacatttttttctcatccatgagtccctaaaaaggataattaatacgttggaataaagtctttttaattaaaataaaaagttaaagtaaatatatttccatgtcacaaagactaattaatagataaagaaatctttgacaaaatacggttcaacccgtagatgatactaaaattaattttgtttcaaaagcagccgaaaataaaacagtagcaaagcgatgtcaagaaaaataatcgattcaatgaaagacctacatacaggattcaagtaagaaaaagttcaaaaagatacaaaagattatagcaaagctatattattatttctatactcttttttgaaatttattctaaattatttttatattaaaaaatttgaattgctaggtagactttgacaaaacgatataaacatgtatgggctttctataacacatcctgtgatgcttgttgattcggcttctaaattccaagttgattagcaaattatctgcgaaatctttgattttcctctttacgactgttcaaacaatttcgattgtcttatacttttccggattttatccccaatttaatcttccaaatatcttggcatcggccattaacaccactttaatcatgatttacttcattaaaaatactagttctctcaataaaattgacaagagtacattactttttcttctaacttttgttggttggttcactgcagaattcttatatggatattatgatggttttttggggatagaagcatatccctctgtagcggatgttttttacttactggggtatctgttcctctttttggctttaggctttataagtaaattatacaagatagaacttggatatatcattagtacattggtaacgttttcactttttgtgttttatgtcctttatatctcgatatttatttttgaaatttacactttcggtggtgacacgatagattttatattattatttgtatatccgattttcgatttgtttattgtggttggagctgtaatgttttattttaggggaaaaacgatatccatagataaggaatataatttttggatttttctagccgcagctgcttttttcttttttattgcggatctaatatttggatccaacgatctttttaattttctagagaatgttaccgaagtggacatattatatagtgtgggatatttgctttttggagttgcatttatagttaatataaaatatactttaaaaaaaaacagttatgattaacatacaaaaaaaggaaaatctaaaaatgaattgaaccgagttgagattttgtaagattcgaatctagggtatcaatctattaaatggtttctgttgggttgacaagagttcattaattgtaaaacagttaccttctttaattgacgatccgtaaatatttagatatgtttacttgttagtagtaataattttgaatgactatttattaaatcaaattaatctcctattaatcaatttaagaaatttgagaatagaaaactttagttatggagtcataagtttctttcaataattctaagtaccttttcatatcgtatctaatattgtgtttattaattaattcaattggtattgccctttccaagaaattctcattataaaaattcgtaattatgtatttaatttcttctcccgcattcaaggatttcccattgtctgatagtcgttttaaaacgcagttttcaattgtctttctatctgtatattcattactttcttttgatatcctcttgctaaatatcagatcggtgtatgaaatttttttagaacatatcaaatttatatatttttgatatatattctctaaaattggtaagcttttcgtaatttcgtaaatgttattatagttagacattatcttcattaactcctcttgaaaattaacaaagagttgaggagtatcatgtcttcttgtttcaattcccctcatctttatggccccatcttcaaaaacgccaaaatatctatttagcgcgggtaagccaggattgatcttagatgaatcgaaaacaatccatttgtatactccttcgaaagatatggaaaaacctgtatgttcctctatgtctttctttaagttaatatatcgatgtgtagaatcggctacagataatgaatgttctgtactatcgactttgcttatccagatagaatccacaataccatgaattacatcaaatccgtgtttctctgctattttagacgcttttattagtatatctctagcaaatgcgcatacagtgacgtgggcatctattctaccaaactttgagttgctaaatccaagatatccaaatgaggtaactaggatccattttaatgcagtttgtctgttatcgtaacagttttttaaatactcatcattcttaaatatacatccgttttttctttttttgtattctaaccgcctatctagaactgttttaagagataaaggcactattcccatcctttttttgcacaagtgataaagatgttcaagttctggaactttgttatctgtttctgatttacagcatttacaattgattgtatccgaagaaacatttttctttagcatgatatttggataaagagatacaaaatcaaattctgctactttgtcatatgctccaggttttgactcaaaaataaatcctcctttatctgcctgtaataaatcagaaaatgacttgaagatttccgacgttatgggcttccagggtatcaatacatcctttttatgagcattataaaaatataaactgcttagacatttccctatagtagatcttgatgctagttgcaatggaattctacaaactctggataattctgctaatccatccaatccattatccttataaatgaatgaattgttaatgtcgatgtgaattcgtccgtataaaaaaaatggtcgtggtttaaaatatacttttccgtaagagatataggatgttgagaataagttattagatctgatacttttatttggaaacaacttatttttttttagcaaatattctagattcgattcacgattcaaatttaccaacaactgattttcaaccttgttggctttggctctgtgaagtaaatgtggaaacaaaatttggtccccacctttagttaaaataatatcaggatctattcggttaatttcataagcgaattccaatatcgtttcaagttcattttcttcagatatcgaaaactcttccttgattatgttatccttttcaaaagagataatctttatctttagaatccggtcattgaaatcatttcttattgattttttctccgaaattaattcaaatgaaagaaatctaaaatttggaataatgtaatcaaatgagtcaatattgtcgttcttatcgttaactatccgatatattttagttagaactgaatcttcggatgttgctttctctatattgtataaccccagtggatagagatccttttcatataagaataactgttcaggcgatatatctacattgtatagtcgatagtgtccaaatcgagtagagagtttttcaatccgtcttgctaaggttaatatctgtagtgaatcagacaaagttaatctcagagattcattccttttatgccgatcgacagtaacggaagaatgatactcaaacttgtattcaaatcggtattccttgattgaggaagaaatttcactattccctaccaagtctattaattcggattttaggtctgacgctacatatattgaaggagaccatacgtactctagtctttttacattaccatttttattttttatccataaaattattctatcctttagatgataaatatcaaatagccaaccattcatgattatcagcaagtcaaccataaacttataaggataatagaaaaattttgaatatatttaatcaaattaatttgtttttggtgatgcaggtaatgatccatgcttaatgaaataattttacgcaaacgggaatagaattctattttgtcatttgaaccaatatacaaaagagaagataggcttaagattattatcatattggtaaatgctaaaacatgtttatatctattacgctgcgtattatatgattacgctatatatcatcagaaataaccaataggaaggatatgaaataacatagtatcttacatttttattaactggtgactagattcgtcaattaatcagaataaaatgtctaataagctgcatgaaatcagtccaaattcactgcagtatccacagaaatagacgacattatatacatatgcagcaatcgtactgaaattttatcgtatcaaaatgactattccatctaatcaaaagattctaaaccaaaccagtcaagataagttcaggatccatagatggattcaccatttatcactagtaaatatagggatttgtatttagacccgttcaacaatttcaaaacttatatcggattgcaccaaagcttatagactcttataaaaagtactatcctatacgagaaacattcataaattaattgccaaatagaaatcattttgccttgattcttttattaatggttatgatatttcataattaggacaaattaagaatactgcttatcttcaaaaatagggggttactaatcggttaatcaacatatgacttttaaaagaggattcagaatttcaaatcaaattctcaagatatagattgtaaggatattttcaaaggtgttaagaaattacacaagagttccgtcgagtcaggatttaagaaaaagataattagtgtaataaagctaaaagaattcatactgtcttgtggtaaacgaaaagcgggtcacatattctatgaaaaaaatattatagatgtatttattttccaaaatacgctttgacattaggtctgtacagataataaatgacaataccattaattattacatggaatattgctcctgtatttcccactataatcgatccaataccaactataattcctatcgcagatactattaatgttatagtccaagcccagtttagccctttccatagtccataagccactgcgaaataagccaatccaattataatgagaattacccctaagactataccaacgaatggtactactgccattaccgcaaatccacttaatagtaatccaatacctccaataacagcaagtattgcaattattgtaacaccaaacggtctatttttctgcatttatagtgtttagcgagattaacctattaaacttacatcaaaatagaatagttattttttacactagaattatgatttatgaatgaaatattcatttgttcctaacgtctttgctaattattcattttgcgattgaggttagctgtagagaaggaagggtaatgtttgaaaaagcatgggataacggatactatcgaccatcagataccttttcgcttgataaattagtgaaggaggtaatcttgagaggtgttttgtttttaggtgcgggtctcgaactttgtataaccctcagagtattggaaggattaatctccacacaatacacagagtatatcatacgttctacttcttaatagctgtttatgttataatcgaacagaaaaatgttgaattaaaatttaaattttaagttattatttgaatatcatactatattcaaaggaatttaaatatagtataaatggtcttacctatgagaagttaaacccaaacctcttctcataggtaattgttagtctttaatagattcagagtattgaagctcttaaagctcaatttatcgtatatatgatatcattcttggttacacattagaagagctaaaggaaatggcagaaaggcagttcgatatacaattagccttgattagaaaactaccaactttgacttttcaggaatcaataggatatataaattagtatattaatcactctctcaacatagaaatattgtccaaggctaacaggttgcccaaccctacagaaccttaatacgagatattaaaaatatcaactgaccattcttttttatgagtagtaatactaatagggttgatataatagacgaaaattcaccattttatggattttataaatttattgcagataattcattagccgttacgacagctgtaggtaatactatagattggattgcagaacggattaaactgtaaattaaatactggacaacacaaataaaaaatcaggtgtacccgaatcgaccgtattggaattattcctattcttatttcacaccaagaaccacaaccacagcgacaactacatagaatccaactgatgactttttacaatgctaatttaagcatggatgtgactgagatttcacagagcctcacaacctaatctatttatagtatgatgtacacttgacgctatgaactttggtttgatcttattgcccattcttttggtatctatagtgcaagtcgcccatgctcagagtcttacagattctataaacagcgcagtaaataataacattgagaacacattcgactcgatcgataggaattctaataatagcaataattcaccgtctggaaataatacagattctcagtctactactaccactacgacaactacaagcggtccggataattccaattctactaccacgactatgaaaaccaatagtcaataatagataaaagatttattttgaattaaatcatttcgtatcatgtgggcgtgaccatcttcccttccttatggctccgccagccatggagtcagctagattccagcaactaatttgtcaatttgaatttttatggttatgtcaatgccactagagaggtaagtttcaaccgctcgatcagtaaacgcttcagaaattatgtactttacaggtattttatgattaatttgttgtgcttctgccccttttatcaagtccactttacccctaattagtataccctttaaatccagtccttctaaggaattattcctcgatattcttgttattagagtccatacaagactatggaaactagtctagtgataaggacaaatatatcacatcttaatgctttcctattatcttgttgtcagaagtatcattgttgtaatatttcaaatgattgaattttttcctgtttaatcggcctttatggtcagtgaaataagcaatgactttaatcctttgaaatttacaattaacgctctatatgtaattacttgaaacctaaaatatttgataaatatatgcaaggaatgcaactgacattagaattaggagtaacgaccatcatatagtcatataatttagtataatgtaatatatcattatggcacagaagttattcaaaattaccgaggtgctaatttattaattatggcaaatgatctaatgatttataacaaaaagttatcagtgaattcattaattatcattattactttaacattaggaagttacatctatctttttgatattgcaaaggaagaagcaattggattacccaataagaattggacacaatcatatccgtccgcactacaattatcatccaacgaggtagaaccattacaccctaacgtatcttatgctccaaattttctgatactatataatattaaccttatagatagtgatggcaaaataagacctaacagtacaataattattaaagaaaatgaaattgtggatttatcttataaaggcaatattactaaattctatttttatgaaaagtatccaaattctactttaattgatctttctggaaaatatctacttccaggcttatttgatatgcatgctcatgtggcaggggtcttaaaaaattctttcaaccagacatattcggaagaaacgctccataggcttttagcttatggtattacaacgatcaggaatcctggtggacctactgaccaatctgtgagtttaagggataatgtatcccttgagagaatcataggacctcaaatatttacagctggaagcttattaaattctcctgtcatttcaataccttttgtagaaaagaaagtaaattcagtatcagacatccatgaagagattaccaatcaggcaaatataggtgtcgattttatcaaattatatgttggtctaactcccgtgttgacaagtgaggccatagataaagctcactctcttggactgggagtcattggacatctctatttaacaagttggaatgatgcagccaataacaacattgattttctaactcatggagttccagtaaatccctacatgttatcaccgcagaatagagaaagatttatggaagaaggaggtggtccgtttgaacatttccgttggttagaactagtaaatattaacggcaaagaaataactgaaatgataaaaaatctagtagaaaacaatgtctttgtcgatcctacattgagtgtatatgagtcgatgataaaggataatccgttatatgctaaaaacatatggacaaaagtcttgggattaacaaaaaaaatgcatgacaatggtgtgaagcttttgtcgggcaccgatattcctaactttgatcttgtacctggaaaaagtcttcatcatgaattgcaattgttgacagatgctggtataccaacatcagatataatccaaattgctacaagaaacggtgcagaagccttaaaaatagtaaattctacgggtacaatagaagagggaaaacaggctgacatggtagtgctctcatcaaaccctattgagaatatcagcaacaccaaaaatatagatatgataattaataacggtaaaattattgacaggatcagtttactctcgagatgaaatattctattaagtttacccccatacgaaaagtagacttacaaggttaaattcctcaagtatcatcgtgaacctgcatacatttaaagactaaggtatataactcgacggttattcggtttgatttttataacattttggagataataaagtcgaagtttaagattatttcgataaatatttgttcaaattttggtccagaggtcattaagagaagtgattaccagaaatttctcgcatacaatattgaatatgttattttgattttgagaatgtgataaatgcagcaacccatcaacgctttaaactatatattttttctgtagggttttatcaataaagtatttgctattgacttaatttgctttaaccaaaagtgacatattgaaaactggttttaatttaaatgccctttccatacgcaacctacttacctaagagctatttttttctccttgataattttgttagtactcccttaattgtccgtttgaggtcaagaacttttcagattcaaaatggtgaaacgcttcttagttaccaaacaaatgatattcgggatttaaaaatgaccatgataggatctagagcacaatacgggttagtgcaactctgtctgctcaacacatacctgatttgattcatcataataaaaaatacgattacctgtcaaataattcattaattgaactactgataaactgggtatctaacctttctcagatatccttttataacctcatcaaagtggtccagtccaaagggcttttttaggatttctttcactcccacttctatataatctttgaaatcttccatcttcaaatctaatgcggttaatattagaatattttcatgcgtcacaccttgtttttttaattgctttagtaaatcaaagccagtgtaatctggcattgcgatgtctaatagaatgaggtcataatgtcctttttgaatttcaaacaatcccttttgaccatcattgatttccttgcaatagattccctccatattgcaataatccgtcactactcctgtagtgtcggtgtggtcgtcgatggtcaaaagcctcaaaagtttcaattaatgttatagtatttatcaaacttataagtgttaataaaattttaaatatattgaaaacatcttgaatacttgaatattattttaatattcaatttttattttaaatggcgaatgctttgacctattaccctcaaattttcagtcgaattgagttagagtcaatatgagagttagaaattatataaacaaaatgaaggtcctgatatattgcattttatactttatctatctgataacattatcctttgtaactatcttttctgtctatactctcagcgcgtcaaggaaatgttaaccaagcaatagttcagcataacgtaagcaatatttagatgggacgtatgatcttatagcagtcaaataattattatgcacttcgtaggagtgactaacctctgacttgtgctgcagtaattaatgttttttattcttttttcttgaaggctgaaaattaaacaatcagatatactgaaactaaaaaattagtctaattatgtatatttatctacttatggcttggctaaagggttaccatacctgtcgttgtccaaagcgcccttaaaaactcggtcataacatgcttctgcgccatccatagaaaaggtggaatcagcatttgccattcttgttgtacaattaaagtatcttgtaagcgcattagccgtatctacgatggttacctgagcaattataatcaggacaagtcccatgcaagatattttcaataattttttgctagaactgttgatattcatctttttatattcacccagtaaccccaaatagcgaattgaatctttcaatatcgttattctcggaattatcatttgattgtacttcggaattatcatttgattgtacttcggaattatcatttgattgtacttcggaattatcatttgattgtacttcggaattatctaaaaacacttcattataacatgtggtaacctcatgttttgttggttccttttcaaagtatggatcttcttcaacacccttacttaagtctattttttcatcgatacaatcataaaattcagggagaccattatctaaagtggcattcccagtttgaattggtatcaaatctactgcctgcccatacaatatgtttccttggacaaatgaagttccaaccatcatggtaacagttgtgaaaagcattgaacagaataataattttcttaatccgtcattcatgcagtgttaagaaggagaagcaatttaacttattctacaatttcataaaattattttattcataacaatttgataatacaatcaagaatcagaatgtgattaaagtttatactataatactgatgttttatttcgcatcctatcataaattcgtattgtaggataataaagttcatcatcaaatttccgtcatatctataacaagataactattatctcatttgtattcaatattccaaagttatgagacttattgaatgtgttcatttaaatcgaatcataatgattttcatatccatatcttattctatgacctctgctaatttctaatcaacaaatgaagaagaatctaagaaaagtttgttagaaaaatattcattatagatgatatagaattcagtttatgctttcctcttaaatcaatactatactttagattgctcattgttattatcacccgtgtaataaagtagaaaattatcatttgtattttttcgctggggatattggacatttttttggattttctcggcctctataattatgacaaacagacagatagagcaaccggtcagatcacacataaggtcgtataatttttttattgaaagcctgtaatcaacttaggggtgctaattgtttcataataacgttatttctcgatctggtattgtgtgctaataattctattttaaaagtatttttttcatttttgcttttatcagaaaaatgcttaatcttgactgcattactaaatttagatcctatggaaatatccataatactttcacaatcatcacaagtcagaattacaaaatattttactgaaagactaatcaaaacatctatcatttggtttactatatttatattctcttgaagagcattacatgatggtgaatagccgttgcttttgtaatcttttgttttgctaatagaagatgaggaaaccaatgtatcaaacaagtctacaattataatctgtaactgattatctatttctctagtcattttaggaagttgatgaattaatatattagccaattgataaaatgtaaatgccctcgcaatagtgatcttatcaagaacgttatccaagtctacttctttctttatcgcttgattaactaactcgaggtagatgcaacctagattatttccatttccagcatctatcaatatcgtttttttcttcagcattatatcttcgttgtcctttttttttgatttatggtaatcaatacatatttttgctataatacgatttaaaaaattgcttcttttttgggattgattttggatataaatatttttcttgtctgaaaaaaatagaaattcgtcgatttcaggaatatcaaataactttctccttatatcattaaattcatcaaatgcaataataaaatcattatttaaaacgtgttgattatctttgttattatatatttgcatattgtcgtgtttaatctccttcaggttattctatgctgtttcctttctaaccgatctatactgagagattttcctaattgaattttgtatgtcagtaacaggtaattctattatttttttttgtttatccatatcatcctatgtcataacatgtttatatctattacgctgcgtaatactatcagctattatgtacaagcaatatgtcaaggtatgaggtattgtaatgacgaaatgatagtaaaaacaacgaatgtcccaatctaatttctggatcccatccttaaacatagattctgttctactttaatcaatcaaccaactgaaaactataggaatttttaccatatgaaaataacaactcttgaaagagttatgatatcgaatatcggtagttaaccaaaatgagatgcttaaatgatggataaatttacttttattgtggcaagtatatgcaataataaaaatcaaaatataaaatcactatcttcttctgcaaaaactatttaatttactccaggagctcggtatcaatgccttttaccaattgaattaccctatttctatttcctctttcaaggtactattaattttatccattataggaatgttccagctaaaggtatccttttttatccaagtattttgagatttttgtatatgaaacgaaatcgcaaacaaaagtcgctaggggaagttcgatctcataaattgaatagtttagatgatttcagtaaggatctagttatcttactcggtttggcaagtgctcttctgtgaccaagggaactgaattctttgaaatataggcttgtaggtgctaattgggagcatcctcaattatatggatttaattcttaagattaaatattctagagcctttgaaggaagaataaaaaattactttgaacttgaagctcagttatttctttaatctattttttcttttgatatttcttgaaaaaatttgcaccaagtcaaaagatcggacagaaggactgagtaacatgcatcctacgattttgattgtctgaatattttcgtacatgcctaaaacatagcatgttacctaaactcgtaaaataagtcaattatcgaccatcaatatctgtcattactgataaatcccaaaaatatattattataatagttagtttacggtcgctcctcaccaactaaagtgtatctctccaaaatttcattttctcttgggagtgcatgatattacttattaatataagaatttttgatggaaaatagattagaatttaatgacctaaggtcctagggctctggccccgtgatcaaccttttaccacaatatggacaatatactaaaggcgcactagcaatacagccttcaaatatcaaatagtaaactcctttgtgatctcccgaatacttaaaaatctctgtatcgcgtcgaatacattcacactcatattcttctttaaagctctcacaacaaaattgttctatcactattcgcaccttactcccgaattaaggacaaaataatatctttctgtcacatcatatctcaacttcatcggctataactttcaagttcaaagactcataaatagtatcaaatctccattgaaactttcgttatcaatatcactatatcttttcaaggaagtagcgtcaaagaaaggcataaagaattgaccattaaatggtactaaagataggttattatagacattccataggcatcagttagtttcattaacggattaccataatagcacttgtattcacaatcaaatttcaattttttggatcattctatgatattgaacttcattctaacaacatgcaataataacaataataaagtatgaaattcaaagcggttcaataaatgatatcaaatttggaaatatgactgaaaagcaaagtaatcatggaatgatcaaaaataaagattctaacaaaaggtaacttttttcaaaatagaaaattaattgaattgttttaatcatttttcttaagaattctaatctgttgttattcttcctcttctaatttgtctctcctttcctcttcttcattttcatgttcttcttttaattgctctatatcttgctccgtttccattctctttctataattaacccggtcctgttaagcatttcattctttatatttaatctgttcaaagctcatttcaatattgggtacgttattctatattataattagatattgtaaaaatttaaggaattattcctgcgataggacccaccacctctaatttagtaccaatcgttttgtacaatcacagaatagattcacgcaatcaacatacatttaacaagacgtttacattttatacattggaccgactaatgaatttgtaataaaaaaatagaaacgatgcacaaaagtttaggaatgtctaactaggtttgattattattaatcatatcagcaaataaaatcggattattttagataatgaccttgcatttgatactttgaatttgttagtcctaaattggacatattaattggtaactaagttttaactaaataaaaaatatgttgtatgtggttatttgcagctaccttttgaccagccgacttcgtatcccttggctacctctccggtccctggattatattttttgcaattgtcatggtcagcccacccagtcttacatccatctatccatgcactggattttcctttctcgtctgcacaatagtgtgaagcagcacttgaaggttgattcattatcaggggagtcatggccattgatgctactgctatcgtaataactaataaacttattttagtatccatcagtttttagtatgcgaatgtttatataaacatatgtttacattttgggataacaacattcatagacttttatttccaaatgccgtcaattacagatagaattatcaactaattgttacttgactaatagttagttgcataattagacacaaaaatttgtaatcccaaagattgaaagaacattctgattataggtagctagttaatcttttacaaataagattagatactctctctctctctctctctctctctctctctctctctctctctatgatggactttaacttgtattcagaacctaggtagatttctccaaagatcctattggcagtaggaaggcagttcaacacagatcaaatgtgtctaaatagtaaatagcggataggcacaatgtcttgtgctgagtgccaaatattggctggcttccaaaatggttatctataacagatccatccaattttatactaattgcatggtcacctaaaatattgatttgcgttggaacattatttacaggcccttctctcatagtcacagttgatgtgccattatacagtgtggagttaatggtgttgtctacagttggttgcccggctaatttaaaattataaatcgaatgagtatggtttgcagtaccgtcaacttttgccatgtaaaatgttgagttgaacgtaggtgacactgtggttgaattgatgttagagaacttgaatacgccgccaagtatccatgctggatcggctgaggtgccattattagtggtactagtaatggagccccttattgcgtcatcagtaggattggtcagattctttgaatatactgtatgtagagaaccaaatagaatcaacaatgaagataataatactattgcaagtagaggcaaaagtgtgaagaatcgattgttcatcaataacagggtaagaccatcttatataagcaatgatgattttgttattctgctcaaatatacagatacatggaatggatatttatgtagttggattatgttatggcgttgtcagcgagttatcagcacagtttccttttgatgtcaaatctaatcttctagggtttttgattagaagtaaggatcaatttataactatgactattattttgttgaatatccatttcaccatatcatttagataatcggtcatattttgaattacatttcatgtcttttcattttccaattagttctcttttcgtttagcttctaagaattttcatatatatgaggcattgtttctctcaattcatctactatgggttttgctttatgccaaaaggaactatgattaaaataacaaagtacatgtctggtgatatcaaaccatgactaattagggtgactgataactcaaagatccacaacttcaataaaatacgatttttcttacgaatctgcagaatattttttttgatactctttgtaactattagtatttaattcatctaaaaaccagagtctcaaatctctatgactgtggacatccaacttaatgcacttggctcttcagattcttacccaaagagggaaagaggattaattccattagaccttaaatatacgattgtattcagcaaatcatccagatatcagtcccctagaggaaggttactaatggatttgggtctatctatgtttccttctgcttttcagacttttcatataatcaataaaaaatgtcgccaagactccagctgccccactgccgagaattactagcggggtcccatatgtattccaaaaggccataaattcctcattaacagttagtggaggtattacctctattgttaaattacctttacctattatatcgccagtagtaggatattttttggacacttgaaattcttggtccacaatttcagttactgtttcattaaacatagacgatgtcagtgatgttgtttgtactaacattgaagcctcaaacggtattgtatacacacctactggtgatcgcggagaaacctctacctcaaataatgggggatgggttctttgggtagatacatttaagccgttagagctgaaattacggccatattcgaaacctattctagtaacattattagagaggggtgtctctatttcagtgggtattattttcttttctccttgtcttatgactatgttctcaggatgtgttaatatttctatgacaggtggaggaacagcaacccagcttgtgaaatccctgacttcgcttgagttgaaggattctgctgtataaaacgataagccataattacttggagaatttatggaatctaggtttaatcgcagtttgacatatcctggccctaatgtgggattaccgaaaggttcagtatagtttttcttggattctataagtgcagaagtacccgttgatgataattggtaaagatattcattccattttccattaactgcctcaacataatagttataattggctccattatatcctgaattttgaggcaaggaaacaatggcaataagcacaccatatctaatctttttgaaaggttgattgtatacagaagcattttccgaatttgatttcacccaaaatgtaatatctaggatttttccatcactaatataatctactgccagcaggtctgcatggtcagaccttaaattggcactatcattaccatatgtttgaacccaatcgtctttctgattgctgatttttttatcatgaataaagacttgatcaaacacaggcggtgcagcaaaagactcatgaaaaggcgaatatgggtttaatattaataacaacacaaaaataatactaactaaagcaaatgctatgaatgagtatttttgtgattgcaagtccgtattttgtaaccttttatacaccaaataaaatcatatatagataagctttttgccaataattcgcatgttttaagcacattaaaaatactaagtttgggaagtagttttgttttttctaaagtttttgtatgtcttgatctatttacatgaaacttgactttgaatataggttgctctggctggagttatgaaggctggaaaagcaatttttatccaaaaaaaatggaaagtaaagactacttatcttattattcgaaattttttaaatttgttgaggttgattctacttattatcgcataccctcgagatctacagttagaggttggaaagacaagacccctgaagatttcaagttttctttgaaatttcccaaggtaataactcatgagaagaaattagaagatgtgataaaaccactgtctatattattctatgcgatagaagcactaatcgacaaaacactaacgttattaatacaacttctaccctttctttcagaaaagaaaggctttaatcctttgcaagacatggtccgacatctagataagagattcagatattctttagaagtgcgacattcctcatggtttagtgataatgtatatcattttttaaaagataataacatctcattagtttggagtgtaagggatgaattggaatctcctttaatcataacttctgatcaggtatacattagattcataggggatagaagcatttcagagatggattttgataaaatcgtcaagaacagaagaaatgagatgcttgaatatgtaaagcaggctagagatttgcagaatgaaagttcaagtatacgcgatgtattaatagcatttaacaaccattttgcaggctttggtcctcaatccgttaacgattttttgaagctgatggatatgtctgaaatggattggaagactgaattggagcgatacgaaaacaattccggtcaatccaatggacgtcatcaatctagtttatctgatttccctaaatagctaactccttaatcaatttccgacaaataaaactatcataatatttttccatttaatcaataaaagattgatttatttcatctgaattaccctcaataatttctatgttgtctggacttattttgattgattcagttatatcccataagctttgaaattctctaataatttgagattcggtgctattgcaatttttacacttaaaggaaactagaatgtcaataccctcattcgtaataatattctcaatattttctgttataatatttttcgaactacagttggggcattcagcgtgctccatgagagccaaaggaattattttccattccgtccaccaatttgatgggttattatccggcctggatttgttgaatctatttttcccattcattgtttttcgacaatagcggcatgtggccctgccatacacggtaaatagcccagttcgatttttccaatttacttgtgatacttctatcttcatttcactcttaacccaagacttgcaccaaggacacggtttcccaaaatttttatacaatacgtaatagaatgtgtgatgattattattatttatattaaaatggctgaaacctaatggatcagtctacgtaattggaggagaacagccatgtgggacttttggtcctcttaaaacgaaaaatccaatttaactattgaatccagaaattaagtcaaatttgacatgggcccaagggggtttgaacccctgacctaccggttatgagccggtcgctctaccaggctaagctatgggcccattcatttttgtttaaaaatgaaatgagtgtataaaggttttgtttataaacacttaactttgcacattcttctttacatatttgtcgtgaaccgaatctaatagctcattttgagcggtcaaagaaatttttacggcattcataactttttcgtgcatagtctctggacattcatttagaatattctcccagactttagcatgataaatatctgcttccttatggatatcaaaataacgatgtgagtcatcatcaaatttattatagaattgtctcagtccgttactcttcgtctcgcttatctttggcaattccttttcaaatgcataaagtgcggcaactccttcttcaaacgatgatttagagatcattgataaatcacttattgcctttctagtaagagattctccaggatattgattcaattcttcgggtctcacatttaatgaagtagcaaatcttatccatggttctacatgctctctttcctcagcaagaatactctcaattattttatcgtacctctcattttgattatttgctaatacattttcagcaaaagatggaacattcttcactagatggtagtactcctttgaatatccgctcaactgatctaaggtaagctttccttcttgccacatctggtaaaatttgtgcttcaacaaactatctttttcaatctctgcattgattttatctatcaagagggtcatacatccttgttgtcatttttccaataataaacattttgtatttaaaatctcactcgactaaattaatcggctactaactttacttaggatttgtttagataactaaaagaagattgtcattcggcaaaatcatgtttaattattaattctgcgaattaaagacaaattcctcacagtttctttgacaaattctattgcttcatgaatagggatatttcttgctatagagcaatgttttgcgatttctcttaacataatgtttggtcaataaaagtcagtaatttcactcaacgaacttgtcggattatgagacaatagtgaaaaggtaaaagaattatctaatattctggccttagtttgagggtccatactacttaatgaggattcaagctcccgatatggtttgaacattcacctaaaattctcactattttagaatcaatgttggtctcatcctccaataagagatctatgtaatcgtcatcctgttggaactcgaattctgattgcaaatatttgaatttatgaaacttattgttgttagaatattttaattcttttgaccgatttgttggacgactcgaattagtggagctattagagtatgacactattttgtccgaattattatggacaatgagattgtgtcttaatgtatactattttctactaaaattagccttacatctcatacatacagatgatttggatttcataagttatttcaacattcaaaatatatttgattgactcggagtgactcaaaacgacaagtttgacaaaaatagttagattgacaaaccataacttgaaaatctatatcgctatcaataagaatattactattaacgactggctggcatcaagtagaatcagatatcacaatccaaaattttgtatccctgttaatatttataaataagttagaattgagtaaagaactttctatatgaattcgctatgaggcaaaacaatctgaaagacgtgatttgcaaacacacttttcaaaacctgtaggattctaaaaatactatctgtaatacaaataattactactatttggacagcaatctatcaataataataactccgcaactatgagaatctaatttggtagactagatcagtattattatttgttccaacagaaggtgaagtattattgattgaagtacaaatattcacatttaacgcattgaatttttttgggtttgttatagccaaatggctgtaatatggtgcacttagctaactcacagtcctgacataatacacgacatccgaacttatccttaattcgattgttttttttcatagatgttatagtaagatatctcttatcatcattcagggcctcttctaaaaatcgtatactattttcgtcatattttgacacgactatgtcagaatctatttgtggaggttccagtctcttgctcaatatttagatatgaaactacatatacttgagattttccttctcagcggaaaatgtagtcaggaattatttactcaattatatctagttcatgatgtcaaagagtatttcagaaaacaacaacctcaacatcagaagacaaataaaaaggattttataatatctttaaaatactcaaattgaagctccggtggtgtagtagcaataaaagctgcacagtccggtcaagcattgcggcctttcgagtcgcagatcccgggttcaaatcccggccggagcattggtgttttgccaatagaattctaagatcaataatgtaattctgaagataaatttgaatactttaagtttagtatctggaatcagttatgtttaattgataacctatgttataaatctgactgtaatttattgtaaatgtcaaatatcccatgcttgttattaaaacgggcctttcttagataattaacttgcagtataaaaggtctcattctcatcgtgcaaggcgggtctttcttaatacttcaagctctcgaaatagcataggacatttctcttcaggttttgacaaaatattaaatggtttgaccgcttgtttaagaaagcttaaacctattaaaatattaaggttcagaatattgaattgcgaaatagttgaacgatattgttcatcgattgaactatcatgtgaatttatcatatttttaaatatattaaatttataattaataacgaatttgaatactcaaccctattcaaattagagtatggctcaacaggaaaagtattgcttcagtcatctacttatccatcattctcgctcatagggtccaattaaatattgaaatctagatattcttgcaatcatctactagcattgctattataggctgtcgtagaattcgcaactgaggcattatttgaaaaagcacctggatcggcttgattcaaagatatttcgcctagaggctgaccataggtatcggcgggcatagaataattatctaatgatgacaataacagtaggacaagtatcaatgtaggaattatggtcaaagaacaaaaagtctttattctcataatttttattacatataatcccttaaaaatttattgtggagacgggaatttgagtattatgatatacaagattcattcatcaataaaaccttaatggcaattttaagaacctatggcgtagccagactaatcaaataataattactcaaattaatgacctttagccgccccatttcagcatattaatcatatttaaaataatactcatcagtaagcgatttacttatcaatttcatcgaggtactgacctcatatcacaaaattgctttagaatcaagatttaccgtattcttcgaatgaaactagttcatgcatagtcaatctattcttcttttttgtcttaccagttattttcctttttgggtatccaaatcccactacaattaccggtttataatcaattgggatagcaaaatcttttcgcattcgatcctcttcaatcccagtaaatagagcagaaccaacgccgtaattccaagcagcaagttgcatattctgcactaccttgccagcatcaataagatgaaatcgaaaatagggattagttagaatgattattgcgaaattagccccagaaatccacttaccactagtgctatcatcagataatttcatcagattatctttattctgtatgactataaatctccatggttgagtatttagagaactaccagtaagcctagccgattccaaaatttttaaccttatttctgaagagacactcctctgatcatcaaattctcttacctcgagtttcgttaatatacaatcataagcatccatattatatcatccataattaatcatattaataatttcagataattttatagattaaaaattatgaaacattaaactaaagtaagataaagatgaagccagggtcttcaaaaaatttggtaatgagaggtgcttttgttgctattagatttattcgaaagtagaataggtccggtcggtaaaattatgggtactatgttgacgatacaatgaatattcagatggttctagtgcaatttatctttggccataaaaaagaatccagactgtatgtcatacatttcaagacaacatttgttttttcctgtttacagcaagaagaataagtattaacaacgattaaagatatgatgcctttattcgttatttaatcaccttatgaattaccaatcatactacaatacaaagattgattcaagatagttcttagaatcaatgaaaaattctgtctaaacttctgggcactaacggtaaaagaaaatgaggtttattccagatagaatggaactgttaaacgttgacttcatttttcctggttctgttcataatgaggattaatccattctatgaagcctgcatagtctaacgagcgagcatcatcaagataatttgaaaggattttaataaattgaaatccattgatgaggtcaaaactcaacacaaggtcgtgcaatttgcagtttacaacttccagagcatactctattggtgttaatttttcagaatattcacaataattgtagagtctaccacccgcaatcattcttttcaaattcattctcatggtgatatcctttctcccttgatacaacttatggcctatacccctatgcctaacttttgggtgtgtggagatatcagctccatacagagtatcaccacctggtaaatgtgttgtgagcagtccattcccagtaatctccgtccaagtgtggtcagcataattaggatttaaatgaacgattagacttgtagcggatcctacaattttaccctcaagctcagcaataagttgaccctctgggaatatgttcagatgacttttcaattcctcaggatgccaaatattacctagctttgctaactcagcaaaagattcttcctgtaatcttacaatctctggaatatcagcaacagtagttggcctaattaaaaccgaatccgaatcaaggacataaaaggaattcattaatgcactatagaattaaactaatgatttaaattttttttgcatgatttagtggtattagactgaggaaaagctttagtagatttctgcatcaaactatatagagtctaaataactaaacatccattattggcgaggttttgttaaatgagaaagaacaggaatgaatccaatcagtctcatattttgctgttactagaggaaaaaattgcagggtatatccacaaatagatagaggtctgacataagaaaactcctaaattagttaaattgtcattttgttagtacctgacagcataaatcattttagtttctgctcagcagatatttttaagctcccctgtaaaatgacattgttattcgaaccagtaaatggttagactgctaacttaatgaaagtaatccaaaaacaaagtcaaacttcaatcttttcaaagaatctatttctgagaaaatttcctaatagcatcaattaatactagttttgtctcaggtaaccataatagtactaatttagatatttgaatagaaatcacttattttatcagtcatgtcttcacatagggaatgtaaatatcctttcctcgaaagtatttatgctaaatcagcaatttcttcaattgatccattgtcatcttataattgtaaaaactagcgctttgttgtagaatactttttgcaatttctaattagtgtgactattactggtccaatattattatgaagacaaatcatataaaatcctaaatatatctccttaacgataaaaacaagcattaataagttcagaggaaattacttatgtaggctaggaattattattgaatgaaagagactttcagttaaatccatttgttgaaaggtttaatgaatatattagcaaaattaatgaatccttatcgagagagatagagtcttattcttggtcagagttttatcttccactcaaatatgcatgtcatggtggtaaacgaatcagaccgttgattttaaacctcgcagctgaaaccattaacaatgacaatatcagctctctaaactcaaaggctatggaaaatatttttgctgtttcttcagcaatcgaattactacatacagaatcagtgatacatgatgatattatagactcagacaacatcagaaggggtttgccttctttccatgtcaaatatggttataatgcaagtatccttacagcagattttattttaggcatcatactaaatataagtgctaaaactaaaaacaatcgcgttactcaagaactatctaccgcatcgatcaaaatgagcgaaggtgaaatgcttgagttacgattagttaaaaatcacaaaatatctcaagaggaatatatcaccgtcattgaaaataagacggcatcattgtttgaggcctcggctaaaatcggtgcaatattggcaaatgggaatgaagaccaaattaatgctcttgcaaattttggccgacttctgggtatcgcttatcagatccatgatgacttgattgattataataatgaagaaagattgtttaacatactggtcaagcagaacgacgaagataatatatttattgagataatggagaacacttatcttacctattcacaacttgctaaaaaggagctcgacagcatagagagtaatcatcgttcaaaaaaaatactgcaggatttgaccaatcttggttcattttcttaaacatagtcctatgacattggactttatatgttaattaacctgtaattaaaaatctttaaagtaactaattagagttagggctttgattttcgttaaagaactagacataatgatttaatactaattaagatttttgttagtaatttttcgttattgatcagtcgttactctatttgcttgcagatccaccaatttgtttcccagcggtcagcaaattgatatcgatcagctgtacttatttacaggataggtgactttactagtttatagtatcaaacagatctggataaagcatgaaattaaaagatgacaatttggaaaactgctctatttcaacacttttcttgcaaatcccaagtatgtcgtatgtcctatcattctcatagaaggacgggttttgccttctctggcctcgatttttcgaataaaggtttctacacaatctgaatcaacaaaaccaccgcggaaaaaatgggtcgccaagttttccaattgattcatcgttgggcatatacacactacggatgcaccgctcttcatgcatggatgaaccacatctaaataattccatggatcacctagatcgatcacgactagatccacgtcatggatttgatctattttcacgggttcaaatattgcttgggttacaaaagcatccatcccagatttttctaaattcttctttgctatggacatgaaatcctcattaacatcaaaggtataaacatgacctcctggcatgactatacttgcaaggaaggtagagagagcagcacttccagtcccgatctctaatactttggagccgtttctcaggccagttctagccgcaatatacccatagtcctttgggtatacaatttgtgtcgttctctgagatttcattacaaagtcgtatgtattaggtggtaaaaggaaaatctttttatccttatttgtcatgatgtgagaaccatattcaaggccgatcgttgaacctgtatcaataatcccaagatgagtgtgtaattttttttcattttcaattcgtattagccatttcttgtcactattaaaaaaaaataagacaaaagagccttctgatattatcaaggatttcttttatctaactatgctcaaatatatattattttgagattgccaaaagttaatctaagcatcccctgcaaataaaactagtgaaaagtgtgttctttgtttacaattcaaattacttattaggaaacttatgctgtctaacgcttggtgctttagtcatatggggtatcatactaccactagcaaatgatgatgcagtatttggtctaaaattattaaaaacatctttgagtcaggaccaaaatgaattccatcatataatcggtttagctcaaaatgatttgaatatgactctagacaacatatttgttcaagtaaatattttagacgagggtaatactatattgggtaattatagcagtcaagttgaggttcatcctttaaacccgttggaggtaactccttttgacgttatcatatatgataaggatcacaacagtttggtcaagaattataccatagactctacctatgacaaagtaaaaactaatataagagaccttgaaatacattctacgaactctaaactcgatgcaaccggattttactatataagtggtagaataactaataatatgaatattacttcaaacagcacaactataattgctgctttagataacaaaaatggtgatttaatcggaatttggaaagcccagtcagaaccatataatatacccccattttccgtagcttcattcacaattccagtaactgatcgttcgctagggtttaatatcaataattatacattgtattccaataattcataaaaatctttaatgcaactagaacaacaatgtactattataacaccgagaaaacagggtcactccgttctaggattctttagggagagaacatatttttcaatttcattaaatcttagtatggcattctcactttgcaatacaggagcaaaagtctcatcatttttgattttgtgtaaaacctgaactacctcatctattgtaactccatgtttaagatcgtagtcaacctgtttacaacaatttgctatagtgccataccttttgtgttgtcgtttttcccatatactcgcagtttctgatagtcctgtaataaatttttttatagttttttcaacatgttccaaatgccattgcttcatgggaaaactattttgggtcaaaaaaatatcattatatagtacatcatacatacatataagtgaaacttgtattcttcaggttttagatattaaccaattaggacccttatgatagaagattcaaatattaataaaaataagtgttttccactttaccctcatcccattctattgatagagaccacaggttctaagaaatttctggttatttcagatgtccatattgggatggaagacagaataaaaagaaatggcatattagttgattcgagaaaaaatactgatgaattaataaagctactaacgaacatttatttggaaacgggtgtaaaagaattgatcatccttggtgatttgaaagcatctattaggattataacaaggacagaatgggataacgttccttattttttagaatcattgtgtaaattattcaaaatctaccttatcccaggcaatcacgatggtaacattaatcaattattacccgaaaatattaatataatgcggtcacatggtatggaaatagataacatattatttacacatggccataccattcctcggattggaatgaatgtagaaaagattattgtagggcatttgcaccctataatccataaagaaggaagtatattgcatggtaacagaatttgggtaaaaatccgtctgactaaaaagaatttgtctggaagaaaccacaacataaatgccagaaatatagagctgattataatgcctcatttcaacagtattctagattactatagtaaaataaataggaacatttcaggtaggatgccaggaaaatctcgattaccactactggataaaatgatcaataaattggactggtcagtagataaagcatttttgttctccatggatggatcgattattggtttggaagaacaattaacgggattgctttactagataactgtataacaatataggtttagtagctatccattggtctaacagtaggctcgttatgcttaatccactccaaagttttcacgaaggaaattgtactttccaccgtagttagtactggtattcccatttctaccgctttgcgtcttatttggtattcatcataaagcattccaacgtatttttcaattgttgatgttgatggtatatttactataaaattaattttcctttcagttaaaagcgataatatgtttggatgccttccgggttcgctaattttgtgtactaactccacattttcaattccagatttcctaaagtattctgcagtatgttcagttgccaatattttgaaacctaacacagatataagggagacgagcggaagtagcttttctttattctttgttcctcctattgtaattaatgccgctcctgcagttggtaaagagtatcctgcagccagatatgatttcgaaagagcatcatagaatgagttaccaaaacaagcaacctcacccgttgattgcatttcaacccccaatacaatatcagctccttctaattgcataaaagaaaattggggtaccttaatgccaaacccagatttcttgagccaatgctcattatctattgtcggaaaatcgtaacccagaatggatcttgccgctaattcaattagattcaggtcatagaactttgatacaaatggcattgaacgagacgccctaacattagcttcaatcacagatacttcattgtcctttaccaaatattggatgttcagaggaccttttacattcaatgctttacctatcttaactgtgtattcaattattgtctccattgtttcccgatatagacgccagggtggaatgcacatcatagcatcaccggaatggatccctgcgttatcaatgtgttcaataatggaaccaataacaatttcgttagtgccaccgatggcgtcaacttcaacctctgatgcgtcttccaaaaatttgcttattacaattggatagtcaggacttatgcttgatgcctctaaaataaactgctcgagttgaccttcgctccaaacgactttcatggctgcgccacttaaaacatatgacggtcgtaccaagacggggtatccttcttcgttagcaaaattttttgattcttccaaattggtaaacattttccaggggggctgttttattcctaatacatccaacaaatgactaaatttagaacgatcctctgcattatctacgtctttactagacgttcctaatatttcgacatcatatcggctcaatttggaaactaaattgtttgcactttgtccaccaacacaggctactagacctttcggagtctctttttcataaatatctaaaaccctttccaaggtcaactcttcaaaatataacctatctggtacatcataatccgtggaaaccgtttcaggattacagtttatgatagatatattatttaccccattctttctaagaccaaataccatgttgacagttgcccagtcaaattcaacactactcccaatcctgtacggaccagccccaagtacgattatagatcggttttctttatcgttactagaggataagtcatcgaatttaccattatatgtaagatacaaataatttgtttttgcgggccattctgcagctaaagtatcaatttgctttactacaggtgttatcccgaatttttttcttaattcccttacttgatcttcttggagattcaaacaacgtcccaactgtttatcagaaaatcctaatttttttgaatcttcaattaaatgcaaatcaaactttgagcttttcaattcattctctttgtcaattacattcttgattttaataagaaaccaaggatcaatagctgacagtttatttatcctttcaatactaattccgacctttattgctcttacaacattgaaaattatttcatcgtcggggtgaattaatgaatattctattttttctatcagagaagtgtcatgattcgccgctgaattttcaatctgtctagtaatggagacatattccccttcatctccgtcgttggccaccagcccgtccttgccgatttcacacattctaatcgccttttgtataacttcttcaaaatttttcccaatagccattacttcacccacagacttcattgcactacccaatttccgctttactagctcaaatttcctgaaatcccaccgaggcatttttactaccatataatccagtgaaggttcgaaacatgctgaagtcacttttgttattttgttgactagttcaggcaaggtgtatccgagtcctatttttgcggccaaatatgctaaaggataaccggtagccttgctagcaagtgctgaagatcgtgacaaacgtgcgtttatttcaatggcacaatactcatcggataaaggattcaacccgaattggatattacattctccattaattttacaatatgttgtagctctcaaggcggcgtctcgcagcatatgatattctcgattattcagagtttgggatggggcaacaacaatattatctcctgtatgaactttcatacccaaaacattttccatattacatatgatcacgttgttcccgacagaatctctcattacttcatattcgatctgcttccattctccgacgtacttttcaatcagaacttggtgtaccatgcttaacgatagtcctcgttgaactatttcgtgcaaatcataatcattatatgccacaccaccacctcttccacctagggtgtatgccacccttattattacggggaaaccaatttcctttgatacagttagtgcctcctcataagaataagcggttgcactatcaagaacaggaacgttactttttaacattgcatccttaaatttttgtctatcttcagttaacttaataccttctattgaagtatttaaaactcttatatcatatttttggagaacctcattgtcataaagatcaactccgcagtttaaagcagtctgaccaccaaagctgagcataattgagtcaggtctttctatttctataaccttttcaacgaatttcctatttattggtaacaaataaactttgtctgcgaatttcctatctgtttgaatagttgcaatgtttggattgattaagatactatctataccttcctcttttaaggcctttaagcattgagaaccagagtagtcgaaatggcggccagatttttgatctagctttcgcctgcttctccgatttttattgctccgctacctagtaccaggaccttatgtatatccctgtttcgaggcattgatattcatcacaactaacattttgactaaaactatgaacattacgaattaaatttatatcttttctatggtgccacgattccgtgagtctttactaggtctctaaatttatcaaagacatacaaacagtcgtcaggaccaggtgaagcttcaggatggaattgtaccgctataattggcttttccgtatgtcttatcccttcgactgtgtggtcatctatattttcgaaccaaatctcaaaatcagtcttatccaaactatccgactcaatgccatatccatggttttgactagttatgatcgtttgatcggacactaagtccacacagcttttattttgacctctgtgtccaaattttaatttatgtgttttagctcctccagccaatgcgagaatttggttgcctaagcatattcctaatgtaggtacggatcgtcggattaattcagaagcagtctctatagtctccttacagactatggggtctccagggccgttacttaaaactacgccaaccggcttatgtgccattatttgatcaatcgaggaatcccaaggcatccttactacatggaatcccattctcaaaagatttcttataatactgaatttagttcctgtatcaattaatgcgatctttggagacgatgagttttttccataatatgtaggcttactaattgaaacctcaggcatgaaattataagaatcataatcaaagctctcctcattctgggtttgagacttctccattacgattttcgagttcatgacaccgttcgacctaattttttttgtcaattcccgggtatccacaccactgattccgggaattttctcgtcgaacatccattgatcaagagtttttttacatgaccagtgacttgagacattcgataaattattaactattatgcctcttgtctgaatccgatcagattcaaaatattttggcaaaccaaattcgtccaattccttctcagaaggaacaccataattaccaatggaaggatacgtaaagcacaatatttgtcctctatatgatgggtcagtaagtgtttcagtatagcctaccataccagtgttgaatactatttctccagacacgcttgttgggaatccaaatccagtaccttcaaaaatagaaccatcgtcaagaattagttttgctttataatctataattctgtttaaaagagtcggaattttttgtccctcacaaaccaaaatttagaatcatttataaatttttgtaaatgattttttagcaattaatcccctttgctataattatattccctatctcgccattttatctttccgttctttttggacgtcaatacagaccaaataaatgaaagggatacaacgaaacaaccaattggggcacctagaaagtaaatcgctttatgcgtttcggcttttttcaattgataaaaatttgttgcatatatacacagcacgctaaataatgcaaacagtatcaaaatattatatgaaatatcttgatctgcgagatacacatagtatgcaactgaggcatatatcagaactaggaatggaaatggcattaaaaagaatatcccgatggtcataaggattgagtttaatcggtcggtaaagtataagggaataatcaatctttttagagaattccacaaggtattaaaatcacgcgcccaataggcttgtagtaaattttcaccacggaacatttttagatgatatccttcttccttcaatttcttacctaaagccccgtcttccactatttctgatctgactatggcatgagtgcccacgctttcatagcactctcgagtaatcacaaaaaagctaccaaataaatatccaatactgacattaggatcatttactctcataggagagtatctagaaaacatgaaaactgataacactggcaataccatttttacgattaaatttgggtatctcaagttgggaactgcggtaataacatccaacttttgcttgattagagtgcctaatgaatctctgacacttctttttgaatggatcgtatcagcatcggtaaacatcaagaatttaccttttgagttttgatatccaatgtaacagggccagttttttccaacccaacctgcaggcttttctcctgctttgaatattctaactctaggatcttgcctaaaactttccatcaagcgcaatgtagaatctgtagagttatcatctatgagtaataactcgtaatttttcatattttgatcgagaagacttagtatacattcttgaatatatttttcttcgtttctagccggaataattatactgattaattccccttctagatccaaactatcatctgaatatatttttggggataaattaaatgatcttcttagtacagaaaacagataaatccatattccaaaggagcctaacatgattacagataatgatatgttgatgaatacggaaatttccaccactgaatcaactttgatttttgacatataaatataacatagtactatcatggaattagtaaacatttttaagtaaaacttttaataagcttagataatgctaaaaattaagatcgataaacgtacctttactttatttttactcgtaatttcaacattatttctatctcaaagttacaatgcagcaattttatttgctcaaactgagtcaggctcagtcgacggagtaaatcaaaatcctgctggctcgatacttgtttgcgaatttgtacaattttgttccgacccagtggaattcactgggaatgacaatgagacatctgttattactccagttacacctgagggtgaagctcaaacaacagcagagggtgaagctcaaacaacagcagagggtgaagctcaaacaacagcagagggtgaagctcaaacaacagcagagggtgaagctcaaacaacagcagagggtgaagctcaaacaacagcagagggtgaagctcaaacaacagcagagggtgaagctcaaacaacagcagagggtgaagctcaaacaacagcagagggtgaagctcaaacaacagcagagggtgaagctcaaacaacagcagagggtgaagctcaaacaacagcagagggtgaagctcaaacaacttctgattcatctgacctcttacgagatgtcacatcaaatatttcattgataatgactcctgatttgcctggtagcgtgacagaagaagaattacaaagctcgagcgatcaaaatttattaggtgttaatgaaaatcttcaaaactcacttaatgctacagatgatagtcaattagtagtacctgaaaatgcgacggtgattacacccgacgtcccaatcccatctgaaactataggtgaaaacatttcaatgacattacaagatgataatgacactctaagcacagaaagtagtacaaataatcaaagtgaacttgcagaaactttacctctcaacaatataacaatgtccacggacgatagtaatatgtctcaaaatacgttagtcgatgagaccgttgattcaacagttgcaaatgagaccgttgattcaacagttgcaaatgagaccgttgattcaacagttgcaaatgagaccgttgattcaacagttgcaaatgagaccgttgattcaacagttgcaaatgagaccgttgattcaacagttgcaaatgagaccattcaacaagatacacctacacagattgaaaatcagagcggtataacaaatgaaaccacaagtcaagccacttcaaccatagatcaacaggataatacatctatcgtaaatgaggtccagcctagttcgagtccaacggctgagaatcaaacgaatcctaccgccttcttagatcccataattaacccatttaagcaactatttggactgaagtagaggaatttttttctttttgactagttgacacaatatgaacgaaaatgagaaaaaaataacatttgaggaattcagtaaagttgaactcaaggttggtagagtcttgagtgcggaaattttacccggatataagaaaatactaaggttaattgttgatttaggcagtgaggaaagagagataatgtctggcctggcaaagcactaccagccagatgagttagttaataaaaatgttatagtttgtaccaatctagagcccagaaagtttggagatcaagtttcagatggcatgatacttgccgtaacaaacgatagcggtagacccatattattgactgttgtagaggatataaatccaggttgtcaaatatcctaactcatatgaatacgctgaatattttgggcctaacgctattattttatcatttattacttcccaatcaatagatccaacatccttgaggccacgtagatctcatttcaggatctgatttgtatctttatccatttgttcatttatttgttcgatgaggagtcctcaatccctatgaagtattagtagagaaccatacaaaaccgcgtccataaataggacataaaatttccctatccaagaccaaaaatacatccaacttgaatatcagctctactataaggttataatctatccaaataattgataagtagtggataccgattttgttgatgatgatgatttttctgatagctctatagtaactgaaagaatcacagttacaaaatatttatttttaccgtctggccatttcttttgggaggtccagagccgaaaaaataaaacaagttactatgtggataatgtcctagcattttgttcttgtaaggggttttattataattacaatagaaaaaaatgctatcatttatctgaagtatctacttgtgttggaaaatcaaattacaaaatctctctttatggagacgaatatcttgatcaggtctttagaagaataattcttcagatcatttctggctcatagaatgcaataacttaatttcaaatatataatagataagaattctatccatcatgcatgattacgagaatgtactgatcgtaggttcgggtggtagagaacatgctttaggttggaagatttctcaaaataaaaaggtaaaaaaagtaatttatgcaaatggcaacggtggaacgtctccaaatattcagatattgcctactgaaatagacaaactggcacagtatgcaaatgaaagcaggttattcactatcgttggaccagaaataccattatctttgggtatagtcgatgcatttaattcttataatttacctatttttggtcccacaaaaaatgctgccagactagaaactagtaaagaattttcaaagcaatttatgaatactcattctattcctaccagcgagtttaaagtatttactgattcaggaaaagctatagattatgtagagaggattgattttaatgcggtaatcaaagctgatggactggcagcgggcaaaggggtctttgtgagcaacaacaaaacggaagctatagatgcgattgatcagttattaaacaagaaaatattcggtgaggcatccgaaaaaatcattgtagaaaagaaaatcataggagaagaggtttcaattatggccatctgcgatggagaatctttcatacttatggattcatgtagagatcataagagagtttttgatgatgatttgggtcccaatactggaggtatgggtagctattcacctgttcctgaaataaccgaaaatgatttaaattatatttcagataaagtctttaagccagtcatcaagggaatgcaggctggaggcgatccatttcagggttttctatttgcaggcattatgattgaaagacacacaggtaagccttttgttttggaatttaatgtcaggatgggtgacccagagtgccaaccacttatgatgagaatgcaatcggacttatttgaatacataaaagcagcagaaagacactcactggattcaatgcagccttttctgtggaaggataaattttctacatgtgttatgatgacatctaagggatatcccgataaatacgagacagggtatgcaataagaggtttgagtcaatcaactgacgacagtattatgatatttcattctggaacaaaactaaaccaaaccaatgaacttattacctctggaggtagagttttgggaataacatccttgggtaattcaattgatgaagccacgagtaaatcctatgaaaaagtgcgtgaaatatcatggggagataatcagcagcattataggagcgatattggcagaaaaggcttagaattttaatgtttggtctattgcaaatgtacaagccttttatctgaaattactgtactcatttttgcatcgttaggattacaggttattttttccaatattaattggaaatcatatccaagacctactaaagtcatggtttgagatgcattagaattaaagaatttgtcataatagcctttgccatatccaatcctgttaccggtggtgtcaaataaaataccgggtgttaccacagtatcgagaaaatgattcatattttcgcaagatggctctggttccattattccatatttgcctaaccggagcctctttgttggatcatacttgaaaaaattaatttgctcgtttacaattgtaggaagacatacggtctttgagttcataatggcttggtaaataatctgaaaggtttggacttcgtttaaaataggataatagaggccgataactttgctatctgtaaaaaactttgaacctagaaatctttgttgagctgaccaactttttattaaacaatcataatatggcatgttttttcgcattaggaggtatttctttcttaagacctcttttgaaggtaccattttttttacactgtgtgtgattttgaggcctcaacggtattacgcaaaagcatgcaaatggtcattggacccacaccaccaggtaccggtgtaatatagctagctttctcgcgtaccctttcaaaatctacgtctccacatagtttgccatcaactctatttgttccgacatcaattattattgcgccgttattgaccatatcaggtgttaagacgaatgaattcctgttccccacagcagtaataactatatccgcattttgtgagaaaaacttgagattgttagtatgggagtgagaaatagtaacagtagaattcttgctcaataacaatgaagccagaggctttcccactagattactcctgttgataatcaatacattggccccatccaattgaattttataaaaatggaatagctccatgattccaagaggagtgcatggtataagattagttttattgttcagtaacaaaccagaattgatagatgttagcccatcaacatctttcatagggtccaccatgttgatcacatgatatttatccagatgttcaggcaatggtaattgtattaatattccatgaacagaagaatctaaattaagtttttcaattaatctaatcaattcggtctgtgaaacagcagtatccaatcgataatcaagggttcgtattcctatcgagtttgcagctttttgtttattatttatatacaccaacgatggcgggtctgatccaataagtatcgtagccaaacatggtatcacacctttggttcttagttcagaaatttcattttttagatcattttttatgtgatttgataccgctaatccgtctattatcttagccgtcaatctatccatttaattataaaattgatataattttagttttattgaacatgaataactataggaacaaaaaaagtacaattcaaagttataaagtgaacgcctacatgctcacttaattttaactttgatttttggagagtcagacacatttttcaatttggctactgctagttcgccagcttttcgtcccgataaaagcatcgatccaaatgttgggcccatgcgcggcaacccataggtttctgtaacagacatcccagcggcaattaatccagggtaaacctccccagttgaatggaccactccatcttcaccgctttctacccacatcggattcatccctttccaatcaaccagacctctttgcatcaatcgttttactgctacagaatcatgacctgtagcatcaattacaatcttgctctcaaatgcaacggggtcaacacatgttatatttctaggcaaggcagacacgggcatccagtttacaactactccgccaactttttcatttttcaatacgagatcatcgaatttagttagttgcaagaatctaactccagaatcgcatgctgcggatattaatttggagcaagcatcagggccccaagctgcatataaattatcattgattttcctatatggaactcctaattcatcccaaactttttgggctggagctctcaccgtgacagggttcatcatatatccgccaacccagtagccgcctccaaggtaattattttgttcgattatcagtgttttaacaccactttttgctatttctctaccagctgataaccccgctggtcctgcacccaagattattacatcagaatcgctatattcttgaatagtttcaaaaaacatagaagctatggaacgagttatttccttttcactcacatcagcaaatattttcttgtccatatgagaagttcattgtcgtaatattaatacatttttcaaacccattaatgttcaattagatttacttttcgaatatcatatcgtgttagaaaccttaactttcattagcattataaaaacccatgtctttcttatacaatcataattttgtctgatttggctagatttaatgaattatcgatttgaaaagaatttagtccggatcctatttttttattctattccttcttttaccataatatgcataataaaatattactatagctattgataacaaaactataacagaaataagggtaaagtaatcggaaagtgtttctgacaagctttcccaggaatttcccaaaaagtaacctgaaaaaaccaaaattacgctccatatgagagatccaaaaaaagtaaaagttacgaatttcgcgaaaggcattctggctatacctgcggggacactgatcaattctctaacacctggagccatccttcctaaaaatacagcataaataccatatttttcgaaccatctttctgccgattctatttttttttcacttacaaatacatattttccaagtttgacgattgcgattctacctattttgaaagaaactatataaattacaatagctccaaatgtcgcacctaccgctcccgatgaagccattaaaaaggtctcaaaataagtaaaattagatttgaagcctacgaaccctgcaaggggaaatatcaactcgctgggaataggtggaaatatagtttcggcaaatgcggctatgaatattccgagataaccataagtggaaacaagagatgttataatatttataatatccacctttactcacaagagaataacaggattgatataattaatttttggtatatttgaaaatgaaaataagattaataaggtaagaacgctgtttgaaattattgagcgataaaaaatgtgctctttgttcgacaattcttctcaaaggatcacctgtcagtatttgcagtgactgtttaaagtgcgctgactgttgtgtaggtctggaaaagttgtagaatatgatcaagtgagttctacgatcttcaatgtatcagttaatgtgattattcctattacattccctttctcactaactaatacacatttagcaaatcttactaaggatactagtgcctttgcaggggtagattcatctacaagaggcggtggaggttccatgacagaaccaatttttactaagtgtatatctttatcattattttctatcattattttagctagatcatcttcagttaatatgccaaccaatctgcttccattgaaaaccggcatttgactgatactgtggtcacgcattttaagaatagctgtgctcaaagattcttcactttgaattattatgagatccctattgcatatatcgccagcttttatagaagcattgctctccatagagagcaatatttcgaatattctcttcgcagtatcataactaggcttacatcttcctgactcgatttgatttaccatagatgtactgatcccgcataatatcgctaacttcttctgagtcacccctaattttagtctggcttgtttgatataatcaagtctaggcagcatacctaatattatattgttctaataggttaataattttataaacaagtaaaaaatttacaatttttaaccgaccataattaataattaaaatgcgacggccgggatttgaacccgggttaccagattggcaatctgatgtcctagaccaaactggacgaccgtcgcattcgtgactttttataaaaatgtaggctatattaattatatggtaagtcataatatgcatgctagcccactaaatagaatttcataattttatcagtgctttctaggctgtaatgccaaggctcaattctctacatgaaaaatataaaatttaaaattaaaagatatacaataattagtaaagatttggaaaccggttaaacactatagttctatctcatgggtgggttctaatatcttctctgtaccggtaggttttttcatgacattatattcttcaaatagtgcatcaagagtatctttctttacaaaaaactccttttcaatgaattcggtgtcatgattgtcattgtattctcgaattaagactttaaaaacgcctttctttatttcccttaccaagaaatcggcattttccccctcataattaaagtaggtcacatattcagaaataggtacttccaatttcccccaagtaaagtcaaaaattaaccaatatgagtgtatcaaatttcaaatgataagatatataaccatcttttagttatcacatagtcataaacatttctgaattttttaaattttaaatatcaaatgcgtcttgtacaattatgcataaaaaagatactggaaaaccacaaatggtattgatttcaggatcatgtctcaactttagaaaagaaagagaacatattatggaattagtgggtgagttggagtggggctgtcattatgaatcaaagtgtgaatgctcctctgctggaaaaaccatgggctgggatttctttaacttatattttgaaatggaatttataactaccttgtcacaggtgcatcctaagatgctaaaagaggagggaaacattttggaacagcaattcctgttgtggcttgagaagcaatttagaaagatgaaaaaggaatatcatctcaaacttgtagaaactccatatgaagaatcaaaagggtttaggatagatcctgaaagctatagaactgaggagaatttatgggatctcagataatagatccactttatggcctgtatagttattattgaatgagcacataaatttgcagaagcttgaactcaataatagtttctcatgaatcagatgtcgatggtgtattctcagcttccattgctctgatgaggtatccgcaatcaaagatgttttttacgtcatatggtaaggacagctttttaaggatttcagatttggtatataagcaagtcatttcaagccaaggaattggtctggtcatattcaccgatttgggcctaaatgatgaatcaatctcatctatttcggacacatttaatttccttgaatcaaattcatggtcggttctttggatcgatcaccatccttggtcagagaatgcatcgatcctttttgagaagcataaaacgtttcaattggtacttgacacaggcgggaacaaatgcgcatctgaattgacatttgaacatcttctctatggaaatgatatagcaaaacaattagcaagtatcgcacatacgtcagattatcttttaaaagatcaagacatacctcccttacccgagttaatagtctattatagaacactttcagatttctactcaaagattactcatctggctaagagggtttctgaaggagttttatgggacactgagatgcagtcagattttaaaacttatgtcaatcttcggaatgaagcgaaatcaaattcacttaaaaagattagaatacaaaatttatcaggtgggctcaccatggcaattataccagtttcgtcctatattcaaattagtttgttttcggaagaaatattccaaaaaacagctgtagacttggcattcttctataatgatgaaggtaaagttagcattagaagaaataatcctgtgatcaaatgcaataaaatagcgcatgaactcattgaaggtggtggtcatgaatacgcggcaggtggtaagatgaaatctaatccggctcaaattgatgaagttttagaagagcttcaagatgctactaaaacatggttagaacaggaatacagagagaaataaattaataaatattttttattgagttagagatacctcaatataaacatcttcgggaatcttaagccgcattagttgcctgatcgacctatcatctgcacccaggtcaattacccgtctgtgaactctcaactcatacttatcccaagtatttgttccttgtccgcatggagactttcgcgtaacaactcgcatcttcttagtaggcagaggatgcggtccctttaaacgtattccgttcttttccccgatatccttaatttcagtacatacattttccaaagtcaatagatttgtgcttgtgagcttaattctagcttcttgaggcatctaacttcacttacttcttgtttggatcatgtttttcagtaatattctttactattcctgccgcaatcgttgttcccatgtctctcaatgcaaatcttcctatttcagggaattctttaaaggtctctattgccaaaggtcttactggtctgatttttactattgcggcatctcctgttttcaagaacttgggtttttcttctacaattccaccagtttttggatcaatttttgctacaaattccgatattgtcgcagcaacttgagctgtatgagcatgtagcactggtgtataacctggtgccattgcagttggatgatgaattacaataatttgtgcttcaaactcttttgcgacactaggtgggctatcaatattacctattatatcacctctgtggattgcctttttatccacacctcgtagattaaatccaatgttgtctccagcctctgcataatccatctgagtatgatgagtttcgatagactttatctcgcctggcacgcctgatggcatcactataactttttcatttgtcttcatcttaccagtctcaacccgtccaacagggactgtaccgacacctgtaattgtatacacatcctgaactggaattcgcaatggtttattgataggtttttctggaggggtaaaagaatctaatgcctcagctagtgtaggtcccttgtaccaagccatattttcagatttttttacgagattatcacccttccaggcagaaactggaataaagcttactttcgatgtattatagcctaccattttcaacattttttcaacaatttctttcacctcattgaaacgtgcttcagcataaccaacgtcatccatcttgtttaaagcaactacaatttgccctacacctagtgttctagataagaatgcatgctctcttgcttggcctcctggttctgttgcagcttctgtttctccgggctttactgaaactactagaatggatgcatcagcttcagaggctccagtaatcatattcttgataaaatccctgtgtcctggtgcatcaatcaacgtgtaaaagaatttaggggtttcaaatttttgaaacgctaaatcaatggtgatacccctttctctttcatcttttatactgtccaaaacccaagcatatttgaaagtatcacccttcccagttgcttctgactccttggcaaaagaatcaatagttctttgatctataacacccaaatcaaccattaaatgaccaacagtagttgatttaccattatcgacatgtcctgtaaccaccaaattcatatgtggttttttacttgcgctcataagacataaaaatcattcaggggtttatttgtatttcgctatcttatttttaataacgttttgaaatcatatttacatgattatagaacagacctgagaacccttcaaacgattaaaacctttatgtgttgctcttgattcattgattctgcgataattaactaattaccagcgaatatgacaattggtagaatataacattctgtaaattaaaaaacatatttgatatgtagtcaaagaaagtagaaattgataggatcaaaagttaaataatcatttaactggcgtcgttactttctattatatgcatcctcgagtctgattatatcagattcatcaaaatcccccatggagatctccagaatggtagaaggcgattgcaagtttttaaccctgtgctttgaacccctgcttataaaaatcacgtcgttttcatacagggtgctcttatcatcatcaagttctacagaaatagagccttttagaaccttccaccattcttctcttttatgatgatattgtaaactagtttgagaatgtggattcaaatgcaataacttgaccgtgcatttttcattctcaacaaatttttcaaattttccccagggcctatactcctcataaacctcaatcatatttctaaaaagtaatagcattcatgttatttaaaaataaatagggctcaactaaagccctagtgattcttggataattctatgatcttgactgtatatttaggtagtttgtaagggaatttaatagaaacgtataattttggaactcatggactatcggatcgatatcaatgaatcttccagagtaccaaagcattgtatgaatagattattacttcttttataaatccagttggaaaattcctcaaaggtaaatactctctgatgctgaattgcaataggaacatagcctccaaatgtgataacttggatcacgacgaaatcttcattcactattgcaagttcttgttcgccataatcacttacctcatcaagcagcgaagtgtatagtattactggcttgcctgtttcagcaacggtctgagaaagatccattaacttctctctgaaattgtcaatcagacaatcttcaaaggacagttgtttactttcctgcagtctccgcatctttttcaagcaactttgttcaattaaaataatttatctacattaaagatcattacatttgacatttagctaataatttttacacatgcagtccgagtggttttcaatcacataaaaaaattggctaaaagggtgcaaattattgaataggtaatatccctctcatatagccagtagaatcttactctttgtaacatattactaaccaagggatatgatttctggtgtttgttttacgatatgataggaatgagttttttcggagttcagtatactaattccttcagtcataaatgtttattttgacagatagagttagacaaagtagaataattatttttataaagcgagaaaaaagaaacatgaatactaattgcaatagaataaaggttcatttttgttacaatcagtatttatcgaattaaattatataaattaaaatttctctaccatctaattctatctttttagaattttcagcctcatcggttttttctgtaaattcaatctttctgacccgaaccaagttctgcagatcgaactcgaactcacgtaattttccaatttcttctgctggaagattggaaatgtgggctctatccaatatttgggttggtgaatatcccaactcttttctaagttgctgaatgtttcgagctagatccttaactatgcctttcatgattaattcctcatttctagacgtatttaataggagaactatattctctttgtccccaacaacataatggttcattgggacaaatgtaaaatccatatctgcaatagttaaatcaatggatttgtttggatcgtagtcgaaatgataaaaccctttctcctccagttcttttagtatgttcagtttatcttcgctatcaaatctatcagataatataccaatatcagctttaactaccttagcaacactctttctattcacggtaatagaaggtattataggggcctctaaattaattaaacttgttaccttttcgaaaatattatttgccttgagcgctttaacttcaatattttctacattcatctgttcttttaacaattcttttattcccgctacttttagaaattcagtttcgtcaacgtagatcaatgctgattccagtggccacctccttttcaatttgtatcggtttcttaatgaaaatgataaagatgatatctccttgaccttatcaaatgctgcttcaacttgtgtattagctatctctgccaattcgtcccctataggcagattttccattataattgaatcaaactgcttaaaacatgacaagtaaagatattcggtgaaaaagggacagataggatgtacaataatatcaagtgttaaaagacaacgcgcaaggattgtatatacggtaaatctccttaccttattatctgaatcatcgctccaaagatcgtaccttactaagggaacgtaggtttgactcagcgagtttattataaagtcctcaatcatatgagaagcttcgtgaaatcggcagttactcaatagatgggtggattcatcaattaagcctttcagcttcgtcaagatccaaatatcttgactctttaatgtgaggtcgtttgcattccaacccgactttgaataagattcttcgaacttgaattgatcataggaggcgttttgttgataataaatatgtaagaaaaaaagtgtgcttaaaacctggtagggtctagaagacatttctttgatgttaaaattaagaggctctattggagaagatttccacataaagtatagtctcaccagatccacaggattgctatttaatagtgatttggcatcaatgacatttcctaaacttttgctcatcttgtttcctttatcgtctaaaacatgaccggtgaacaggaatgattgaaatggagattgagggccttctttgaatataacatttaggatcaataaggtatatgcccaacctctagtttggtcgatcccttctgtcaaaaattcagcgggaatcaatgtatcatattctgcatcagaaagtgatgagaaaggggcgcttccgctattatgccaagtatccaatacaaataactccctttccattttgttttgacatttggggcaattaattactacttcatctatccagggtctgtgcaattcaaagttttctccatctggcaaatcagacgctctcctaacaattgcttctcgtgaaaataatccctctttaaaagaacatttagtacatttccaaataggaagcggtgtaccccaaactctttctcttgatatacaccaaggaactttttctttaataatctcaagaaacctattcttaggttgctcataaaaataatttacctttgaagcggctgcaataggttggtcttttaaagtatcaatcatgtaaaaatattcctttcttgccaaccagactattttgtgatgagaacgccagcatgtagggtatttatgagttaacttaccgatcattactaatgaattcgctgatcgcatgtcattaacgacaatttgatcgacatctctaacgaattgatctttatatttaccagcatccggggtaaataataccttatcatctatgggtacaaagatgggtatttttcttcgcgttgcaatttcaaaatcctcttctccatttgcaggtgataagtgcactattccgctaccagtagtaacgtcaacaaaattttctgcgaccacaaaatggattttaccttgcgatgcaagactactcaaaccaggaatagtttctaagaggggatgaatgtaatattggccttctaattttatgcccaggaatgtatcgactatttcataattttcaattttcaaatcggccattaattcttttaccctgttttcggacacgatccatttttcatttataccctcaacatttacctttatagtcaaatagagagcgttaggatttacacctactaactcatctgtaactaatgtaaaaggcatcgtagtccacactactagaaaaatttccgattcttttaattttatcttgtaatagaaggaaggatcttctacttgctcatagctttgattgatttcagcattactcagcgatgtttgacatgaagggcagtatgctactacacgaaaccattccttcaagattccattatctagtgccttgttaatatatttccattctctttcaatatatgtgtcggtataagtccaataccccttttcatactcgaaggacattccaattaaattatctacctctatccattttttgttatattcaagaattaattttttgcatgtctctacgatcttcttgattccgacttttcgaagattatcagatttattacccgtcaaacctagtatcttttctgcttgaagttctactggtaaaccttgagaatcccagccaggtcgaaactccatcttctttttttctatggtagattttctaaaccataaatctttaattatcctgcctctaatatgacccaagtgtggttctccattcattgttggtggcccctctatgtagcctattgtccttgtaaaatttttagaatcactaagatatttttttattcctccttttatagcgggatcatcataataagctctaatttgattttcaaatgtctttagctcaaatttatcccctaatttcatattatgttaaaaatcaactgtcattccactcttatgtttttggaaaatactcgagcaaaattttcagataccaacaaaataactcgttttaaacggtcgaaaatgagttatagaatgttctaaataaatttggaataaaattctatgatcattgtacgccatagtacgactcagcaatgaaagaaaattatgaaatgattgcccttattgatgagttcttttatactcgtcatcctacaaatagaattatattaaaattgtagaaatctctagatgtgaatagatttaatcaaatcggagcgggcaagaatccacctaatgacatttatgtagtagttgaaattcctaaaaacagtaatatcaaatatgaattagatgaagaatctggtatcctatttgtagatagaaagcttcacacttccatggtttatccctttaattatgggtttgtcccgcgaactaaggaagaagacggagacccaattgatatcttgatattaagtaacgatgaattttcacctctttcagtaatcaaatccaaacccattggtgttctaatcatggaagacgaagaagggacggattccaaaattatcgccgtacctcatgaaaagattgattttgaatattctaggttcaatgaaatagatcaattagatagtagaactttagataagattaaacatttttttgaacattataaggaattagaaaaaggcaagtttgtaaaagtcaccggctgggaaaatagtaatgcagcagagcggataattaatgaaggaattgataggtttaaaaactaatctttagagggctttaaattgttcactccaacgcatataagctctgaccatatctgaactcacgctaggttttctaactttaaacatttctttgaaatctgctaagtttaattccctcggtaaatcatcttctactaacggctctcctttttcaaagagttcatttaccaccctgagttgtgctgactgacaaatatctttgatgtcactggcactgtaagcttcagataatcttgccaattcatctactttcagcaatgggtcttttgttaattttgatacatactgtttgaaaaggtttcgtctggaagccatgtcaggaagggttacataaatccttttttgaaatctccttaaaaatccagactcaagactccaaggtttattagttgcaccaatgacataaaggaatgattctttagattttccattgattccatccatttcggtcaataattgattctttacgcgaacttctccaccaacctctccattcctggtccccaagagggaatctatttcgtcaataaataataatattggaattttttctttctggtgaagggctcttgcaaaagtaaatagctttgaaatatttttttctgcttctcctaaccatttactcatcattgatgctgcgtctacatttatgaaatatccgtgtatctcagcagccgcagcggcagcaagtaaggtttttccgcaaccaggaggtccaaaaagcaagatacccctcggccaacccagtgggaataaatcagcacgtcttgttggatatacaatggattcgcgaatggctcttttggcatcttcgagtccaactacctctttccagctgacctgaggcttttccttcaatatcatgttttctagatcattacttaactcttgcatcttatttgtctctggagattgtaaattctgccgtgcggtatgactatcactctgcagatttgttttattagaaggaataacatgattgattctaccattcatcttcggcaacacaccatccattataccgtttctcttagattcaggctcactagcaggacgcctatcgtcctctgaaataccgtttgccatttgtattgcctttattctgttctgatacgcgcttgccctctctaaataaaccctatttaatttatattctggataaatttgaaccagctttattaatgcctcactagctctttggtaggaggttattgctgacgaatgtgatccttgagaatcgagcttaatagcttcggcggcaaatttgctcgcagtattctctaattcctgtggcgcaagtgtcatagtattatgttctcaagtgatattcctaatttgtttgataggatatgtagtaaatagttttaatcaaaagaataaaaaaaaataaaccctttttaaagacaatgaaaaggaattgtagttttcttttttttaattattaatataaaaattttgacatacggtcttactatccttatgatatcatttagattatgatgtcaactgatggtgatgtaaataatgaagttctgggtggtttagaagaattgggattatcaaaatatgaggcatcagcttattatagtctgcttggaaagggcatgatctcagcaacggaaatagcatatagctcgaatttacctaggacaaaaatctattttattttaaagaagctggaaaaaaagaaactagttttcataaattaccaaaagccattaatgtttagagcactttctccgaaggattcttttagtcacatattatgtaagtatgagactaggatcaagagtttaaaaaaaataatagaatcacttcaacaaattaatgaaaatggtctaaaaaataagggaatcgaggagaaaagatatctagtcctaaaccaattttccacagacagtaagattactgacttgataaaaaatgcaaacgaatcaatcgacatctcccttaatcattggggcaatgtgattctaaacgcttcaaaggaagaaatattgaaggccatatatagaggagtaaaagtaagaatcctattcgactttatgtgccgagctgattcaattattctacctaacgcaattgataaaaaaagttcaaaaattagtacaaatatgtttatcttcgataataagagcatgataataattaaaaacgatggcacaaagtcagcttattttgattcccatgagatttttgttccaactctagttaatcaatttaatgatacctgggttaaggtgaatacatcaattttggaagatagcaaagtagagtccataaatttttgatcgtttaattgattgattgatttatcaattaattttatcatattccttcattacatatggtaattcggttaaaagatcagatgcaaccatgtgtgatccgattttgcctgatattcttaatcctgcttgcccgttaaaaaataagccaagcaagcaagaatgtaatggttcatattttgtcctaaatccagtaattagtcctgaaagtatatcccctgttcctcctaccgtcattgagggtgtggttctttcgattacaaagttatcctcaccgtcagaaactatattctgatgccccttcaggacgattatcaacccaaattcctttgcttttcttttcactaattggatctgctctgatatcttatttgtggggatttcaccgaatagacgtttgaactcccctgcatgaggagtcactatagtttggttgttggatatatcgggcaatatatctggaattaaagctccggcatcaataaccaattgagaatcagcttccaacaacttttgcataagtaagatcaatggttgtgatcttgatacatttaatcccattccaatagctgctgcatcaacttttttcggcaagtagtttagcagccttctaactgaacctatagttaatttgtcatctggaaaaggtaatattataagatctggagaaaaaactcgggatgacactaagttgatctttggaatagcagtatagactaaatcagtcccacttcgtagggcagccaaagaagataacagaggggccccatgatatattcggcttccacctaccaccaaggctattccattttcaccctttcgtgataggatacctcgaggtttaacgatttttctaataaaatcttcatcaactgaagagtagtctttcatcttaggttattgttatagagaatcattgtaataattaggtttaatgacaactagataaaaatatagcattgacccctataataattggagtattgaaaaaaaaggaaaagagttcgcttaaagaatctcacgaagagaacacacctcaaagattcacggtccctttagaaatcgatacgcattatcagttatatggcaagcatatgtgggaggttaattactatgagaaatgtcctcggtgtgataaacgcatagacgaatttggttattgcgcatgcactggttttgcagagtaatcaaaatcagatgaattaaaacaaattgacctcacttattatatgatggttctcgtaagaattacgtagttcagtatcttatgaaatttctcgaatggataataaataaatagctgttcaaagagatattaagtatgagtaacgaagttatgggtgcagtaacgtatgaatgtatgtcatgtggcactaacgtaacagcagaagagttgtcatatttaccagaaataaaatgtatttgcggattcagggtattcagaaaggtaagacaaccgattatcaaacaattgaaagcgatctaagtgaaaatcagatgtccagattgtaaagaagcagcatatctcagtgatgatttttctttagtgaagtgtgataactgtggttttgataagacttatggagagtatgtcaagtacgttgcgtataaggatgcaagatactcagatatattaagtgattacaaataacagatgacgataacgtcaccagaattcattttaattggtgtgtttattctatatggctattaatgctgaagtcaatgaaaagtacgaaataggcaggtctgaatatttgtgggcaaagaagaacatgcccattctaaatcgtttggttgataagtttgtctctaaaagaagcctagaaaattttaaacttggtatttgtctacacataacgaaagaaacatcggtactacttatggcactaaaacaggcgggtgctaaggttactttatgtcccgccaacccactttcaattcaagaacctgtcaaattcttcttgataaagaatgacattaagatttttgctaataaagaaggcagtaccatagatttttacaataatattgaaagagtattagatactaaacctgatatacttaccgatgatggaggagagcttcataaaagggcactaggtaaaaatttcagtataatgggtggtaccgaagagaccacctctggcgttaacagaatcaaagaattgggtaaagaaggtttgttggtatatccgatcatagccataaatcgatcaaggacaaaatacctgtttgataataaatacggaacaggtcaaagtacattagaggggatactaaacaccactggaatactactatctagtaagaggattgtagtatgcggctatggctgggtcggaaaaggagtagcaagatgcgctatggggatgggagccaaggtcaccattacagaagtaaatccccttagggctttggaggcatattttgacggttttgatgtaaagactattgatgaagtagtatccatagctgatgttttcataacatgtactggtcaaataaatgtgataggccaacatcaaattgaaaaaattaaagagggtgcaatattatgcaatgcgggccattttgacgcagaaattgacgtggattatttgaattctatagacccgaatcatttctctcccagaatgaatgtctcatgctacagaattggagaaagtaaaaaaaaaatttacctgctagcaaacggcagggtcattaatttggttggtgcagaagggaactcatcagaggtaatgagtatctcattcgcaaatcaattcttgtcaattatttacctaactcaattccataaaaagttggaaaataggatctataagactccaaaaaaaattgaaaaaaagataatttggactgctttagatacttttggtttaaagatagatagtttaactttagaacaaaataattactttaagaaataatgctttcaaatggtgtgcaaaactttttttgatattaactttgatttagtctcaagcgttgtttagaaaacgaattatggggtctacttctcaagattgttttacaacaaggacatttaaatccatgccattcgagaaataattcgcattccttgcataatttgtaaccttgactataataactagaagagtcatttgtcttatatgctttatactttttgcagattgatctacaatacatctcttaaaaaataattaatcatttttgtcgttctgtcgtatatgaaatctaaatcatttttcatataccacaaatacattaattacttaagaacttaactatctattgttatagcagactgcacaatttcaatctagactacctcatactcttgtttctaaatttcagggtttaataataaatgtactctctgtaatggaatgataacaagttggttcccaagatctatttgcatatactagcgcattttttctttcttaagaaccaaactgttaccacatttgtcacaaaagcttaattttaaatcaaaaaatatcttgcatatactgcaatactttattgtttttcttgtcacaaattttttttttccaggcgtcaatatattcaaagaaaaatatcttgcagcattgaccagagcgtaatcggcagacaaaataggtaaatgtagttgtaagcctagagcaattatagaacagtccgcacttgacaattcattctgacccctttcggtacatttttgtcggaccatacaaagaagctggatgtctggttcataaattattacctttcctgtggttatcaacaaatttaaaccatcaatccgtctctgaatgtgattaatttctttctgaatatcaggcgttatataataaacatagtttaaggaggtctgaaacggtatcccactgtaaaaaatgtttgaatctgttacaaacttattactagaatccaagtttgttcatctgtcgagtatcatttttattgaatctgagaaacatcgcatcataatggtatttggtgatttttattggctgattcttttggatatcctttacaatctgtccatccataattaatttgagatcatgatttgcactaatagtaatcgacattaaaggtaacacaaacgaaggcagcctattcacagatcctataggggtaaccagcatacattccaaatgttcttggaggataggtccgccgtttgaaagggaatgtccagtcgatcccgtaggggttgaaactatcattccgtccatcttttgactataaccgttgtcattaatagagagataaaacaaaggtgttttcgtaagatctgaacgcatcatgacataatcattcaatacaggcacactaatttcatcaccaatttgtgcgactaatctaactcttctgtcaagaaaaaaatgaccatttaagagtgggtccacaattgaactaacggaatcttttgaaacttctgataaaattccacgtgtacctccagcatttatacaaagtacgggaataccgggtggtaacgttctaaatgttttaatcgtagttccgtcgccacctatcgcaatagccaaatcaagatcaatctccaactcgggacgatgcaaatcataatccatatttaagtctataacgttaatccctttttcagccaacttttctcttaacaagtgagaaacttgtctagattcatcattatttctcttgctgaagagggcaacatatcggattcgattactcaaacagttaatgatataatgtcggggtatatttttttacttgttgtaatttggatataggattggtatgtgagtgtttatagaaatttacttactaaaacaattcgttaaatattctctcggaagcatatcgtgaatttgatcagataacgaaactttcagctctaataattaagattataatttgaaataattcagaattttattacgatctgaagaagtaataaatgaaaggataacttggtagtaaatggcacctcaaatattggttagcggcgcttttagaataggtatccattgttccgtaatgactggtccgatgcaaatttaataaaatctggtcgtgagaacacaataaattacatttatattagaaaaataaagcctttagaaattagaaaaacagggccgatagctcagcttggtggagcgttcgactgataatcgaaaggccgagggttcaaatccctttcggcccattgaggatacggtttgcaataatattgattctagataaagtattcaccagaagtggcagaaaataccattagatagttgatttttttaacaacgacataatctctgactcaatgaaaacactgatccaataagtcaataaaatgaaatgaaagattcatggtcagttaccggtacaacttttaaataatttatcacgaagttgtcttaatacgatggaatattcagagaggtataaaaaaataattaatgaatccattgatgaatgttatcggttattcgatagtgattcgatcgataatctcatcaaacttaactcaaaattagatttaattatctcctgttctagacttgaagatcatctaaatatttgcctacttactgaaaagataaagtacatcgttgattcattagtaactggacacaaaatcaactcagacattcgttctttggtcatggattatctagcgactataaaacaagatttggtatcagctaatcattcattggatctaaatttgattgataagattaagaatagttatgatcaaataaaaagaaatgaaagagattatctttatacaaagcgcctaaattgcctattaatttcttcggacaaatatctatgcggtattgttctaaatgcagtcgatgaatctataaatgtaatagtttcagacaactatcaaaaatcttttgaaagagccggaagcgaacattttgacgttattgtctgcgacgtgatggaaatagaacctattattgatgatttcatctttacattttctaagaagataccaattgctataatttgtagatctaatgatttgcagctactactcaacattgcaaggttcgggataaagtatgccataatgggtgatgaattaggaataaaatacttaaccaagtcattgcattccatttacgccgagtggataaaagaaaggaagaaattttctctgaaaccagtcttggaaaacccagatactaaagtcatctttcgagacatgttactcactgaattgcccatttatcaaaaaataagaagttatttcacaaatgagatagatgtgaatccagtgatcagggagtcttataacatcaaggtaaatgaacttgtaaagtcaaattcagagcttgttgatctgttggtaaaagagaaatatctaatcaaagaaaaagtaaaaaactacatcatttgtccaaactgtaagtcagtagatttggatattagttacgtttgccacaaatgcggcaataatttgtttatgaaatatgaagaagttatcacacatagtggatgcggatataagggactcaaaaatatttttacaattggagataaattttattgcccgggatgtaaagtacgtttcactgattttgacgactgtaagaaaagttcatcatatttttgtcaaaattgtttagaatattttgaggaaccagaactaaaatacatatgtaatttttgtgattttggaccctttcggcatatctctggagttttgaatacgttacacaaatatgaaattaatccattactcaaaaaggaattcaagaaaaatttcttgatattacaaaagttaagtgattatctgatccaagcaggttatgccttgtcgtttaatgaaaaatctatcaagaatacgacttccggaattttttatgacttaacagcccgtaaaaaggatcaaattatcattgtgattatacttagttccgaccttgaatataatatagaactcctttaccatatacagcttttgagaagtgagcagagcaattttgtcccaatagtcatttcattagatgagccaagtcaattgattttcaaccttttgtcaaaattcaatattatcttgatagtttccaatgatgagatggaaattctttccagatttaaaaagtttttacactagagggattaacacatgcattttaaataatcaatcatgacttggcaacaagcgattcttagatatccttctattagtttagtagtctacaaatatgaccattcaggtgaacctaaacaatgaatcaaaatgtatatcaccagactacatttcattctcaaatgctaaatgcattattgtaaaatttagctaggttgctgtagccaaaacatatcatataaaatttagctaacaattgatgtaatttctgattcaggcgcttaattgggcttgatattttcacatagtaaagtataatcttaattcggacgttatccatcccgacaatggttcatcaatcagaattaagcaggtttgaactggctcagtagtaataatacgaaaaattatgaccaataagataaaggatgcgtataactgaaggatataaatcaatacttgaaacttcactcgagtttccaaatatttcttctgccgaaaaccatcacacaaatgataataacagaaataattccatctgttcacttggagtattgtaatgatgattcttttaaatgtacaagataattaaataagtaacaattgcagaatttattatgtttataatattgtaatatccaaaacaagtttccgcaaaataaaataaaatggcatcaattcggggcgcacaaataccaaaattagatactttaaaaaaaaagctgaagataatatggaggggagggtcagtaatcacagtgatggttatttacacatactttgtatgaggtgttaataaaggaaaacacgagaatatagaaatctatttaatatttctagtctaatcttgattgagttatcacgaaagtagcaactaatattttgattttaatcataccattaatcataggatcaataattattacatccattctttcacttcaaaatatttctggagttagagcaaagttttatgatatttatgaaatgtctggcattcagctgatgaataagctctctgttgaggtaaacgaaattgcaaatgatctcaatttactttcaactcaccctatactagctaattctacaacctccatacatgacaaaatgaacttgcttcagaggcatattaattttagtaactcaaaatatctagttatagcacttcatgataataatggtactactattctagatacttctgataaatctcctaagggtaatgttttgcaagaggaattctttcaacaatcaaaagcaggagaaatatattttgataagaatccagaagaaatcgcatttaatcaaacaggatttcacatgtcagttcccgtctatgattctaataaagttataaacagtattatggatgttggcgtttcaattagttttatagataacgtggtcaataacagtctccttgataatgacatgaaaaaaaattctgttcattttacttctagaatagtccatagtgatggttcgataatctatgcaacaaaccagcaaattgatagcaaagatatgtctggtcggccagattcgaacttctctattcttagaccctctaacattgagtatgaaaaaaagaactctcaggattccattatcattacagttcctgaatctgaaaacgcaaacgggtatcgatctgatggaaattggacactctttcttgagggaaatctatctccaatcatgaacgactataacaaaacggtaagcgagttcttaattttatcaacattgatcttattaattgctattggggttaccatctttgcggtaaggaaaattacatctccttttactcatttaaaggaatctgctttagaattaagtaaaggcagttttggcaaggaaataatggttgagggatcaaacgaggtaaaagatctttccatcagccttgaagtaatgagaagaaatattgagagtttaaataagaatttgattcggaaggtcaaagaaagaactaaggaccttgaacgggctaatgaagagttgagaaacaaagagtttcaagttaactcaattaataatgaattaagggtatcaaatcgagcaaaggaagaatttctatcaatgatcagtcatgaactcaagactcctataacacccatgaagttatatatcgaaatgatactaaaggaaggtaaatcagaaaatctaagcgaatttcaaaggaaagcccttgatataatgcacaggaacatcttaaagcttgagaccataatagaggatattttcaccgtttacaagttagaattgaataattttcctatcaataaggagatcactaatattgcagaaatagtggagaacaacatttcagcattatctccattgatgaaagataaaaacatcaaatttaattcaatagttaatgccacaggtactattttatgcgatccactaagaattagccaggtattggccaacctggtaaataatgctgttgatcacgtccccgagaacaacggagaaattactattcgagttgatgaggataaacagccaagcacaattagctctaatggtactgataataaggaccaaaaatctgtcatttttaccgttgaagataatggtattggaataaaaccagaaaatatgaatggattatttaagaaattttatcaaattgatacgggtcttagaagaaagtatggtgggactggattaggcttagcaatatgtaagggtatcatagaatcccacgggggtaaaatttggctcgattctacttatcatctgggtgcatcgtttaagttttcacttaatgcgttttaatgcgaagaaagtattaatatgaaaaatataaaatgttctatccctactatgaaggtattgataattgatgacaatgaaagtataacggaagccgtaaaggatttctttgaatttgaaaatattgaatgcagaacagtaaatgatggtcggagagggcttttagagatcgaaaatcataactttgacctcgtactgctcgatattgccattccaggatatacaggaatagatatactttatgaacttaaaaggcaacaaagagaaaatctaaatatagtcatatttacagcgtcagttttcaaaccagaacagattaatgaattttgggaaatcggagtgagggaagttttcacaaagcctatctcattagataaattggaatacattaaacaaaaatatttaaaaagatagaaaatcatatctgcgtataccagtccctttttttgaagaaaattgaaagaattcgatgattcggtctgtctaatatcttagtttcttcacccctctgatgactcttgtatgttgatttaatgtaataacaacgagaggtctatgagtttcaatgcattttgtgattaagatggcagacacatatcatgtgataaagattcaattttatgcccttgcgaataaagatttgaaataatctaataaatatcttagaaatagattggcgatttagttttaactcatcctcaagactttgtctatcttgatgctttatatgcatatgattgaaaaataatgatagttaagattaatccttcaactagaaaatgcgtagattttaggaatcaacttgatttgagaggctttgatagtcctgatgtcttatttggttatatgttatcctgcaagtagtattagtaacagtatcgatttgacctttgggagctatcttaatcaaccgccgtttgtcttgactcaatttcatatgtattgtcctatattaatgatgattagaaaggagttcttaataaggtgaaaccgcggttagatttgaaaaagaaatatgggtttatggtaatccatatcatgatcggaagaaccgatacctcaaactctacaaaacaaattaaaaaaggtctagagggtgttatttaagaattgggcaatcacatcgtcaaagacatctattggttgagcaccctccactgccgctatttttgtcgaattatctttaaggattaggaaagtaggggtattagctaaaccaagattttttgcgaatacatcattttgcaccacaagttggttgtatttatgtgaattcaagcattccttaaactgggctatgtttggcatcttcatgttattagcaaaccctaccaaactttcattactgatccaacccgtgttttctcctcttgagttcctataaacctcatcatgataatcccaaaatttgtcctgctctgctgcgcaataagaggcttctgcagatagcgtagatagtttatcctggggtaagtcgttaatgactagatctttaaatccgaaccttacaatccctgtatcaacgtatttggagaccagttcgtctttagtttcttgattgaatctagcacaaaatgggcattgatagtcaccgaactcaattatattgataggggcattatcatcaccaatagctttggctccaggaatcaccggagtagtcaggttggagatcaaattctggatatcagctggatcagaagaagttgatttattttggcctccgaaattggaaaatgcggtaatggagcctccaattaagagtgctccaaatagaactgccataattactaccttgcgataattagttttatttccacgtgatttcctgtttctatgtttcaatttagaacattaaaagaaaaacgaatcggttatttaaaataaatatatacaaaaaataaataactgcattgcgattcaaacgtcaagattagggcagtattttttttagttatttgagcttggatttaattaactcaaatgctttttcggctttgtctttcttaggtaattgaacgaaaaaaatattactgctgtttcttgatttttgcggtgcgatagctaacattccggctgatgaaagaaatctaaaaaaatcgatagtttcatttgcgtctaataagaaatcaaattcaaggtcgtcattaagaaagtttatatttaaatttacaaaaacatggtgtccatcatcataaatatttaagttagtatcaatcaaattagacttgccataggatttatgcataatattttcgaattgaacatcttcgacgagtaaacagggtacattagttccattatagtcaattacagaaaaacctaacttatgaacgctggcttgaaaatcttcaagcgaatttaggtttctatttaagttcatacaacatattgaaaattgataaaatataaatcagatcatagttaaaaaaaggaaaattagtgagctatggtcagcaaatttggattgattttgccagcagtattgccttctggggatcctctgatttaatttcgtcactatcatatttcttgctaaaatatagcaaatcagctagtttccatttgtcaatagttactaaggtagtaccattttttttcatgtttgtaatattggtagtcagtatcaccaacttatcaactaccgagttctttttagtgcttttaacaatcttatcaaagtttttgtttttatcagaatctactgcaatcgatatgcccaccttttttcccatttgatcattatatattgcatctaaatattcggtatcgatcttttcgtcatattttttcacagttcccaattcatcaaaataacttattaaatttctgatagcatcttttacattcgattctactatgtttttgtcaatggatattttcctcattttgatgaaatcggatatggatattcccatgatacttcctcttaatcgcaatcctggatagacattcttgattgtctcttctattgattgctcgtcaatatttgaagagttcttcttaacagacatttcgaaggcgtgatacaggacattcaagatagatcttatgttcctaaagtctggaaattcatcatatattatttttatttttgatgttaagtctttcttttctgccgatgaaagatcactgttataatgcaatacatattgaaggacaatactatttatttcgtcgaaggagttcgatccggccaaatcaattttataatttgctttttctaggcgatcgaataacgatggattaatcctggagatatcggcatataaagaaggggttgtcactatcataaaaagtgcataaggtacgtgagaattaattaaccccttgaggtaatccaaggagtttaagtttgtgtcaaactcgtcgatctgaaagatagtaatttttttaaataatttatagttgatcttggccaagttggttaagaccattgtaagattttcaaatgtttttagatcggaataattcaacgtacctgttttgataatttcagtgattaaatgtatctctattttagtaaaatcattcgacattaattcaaataaatgttcataagatattcttaattttctttcagtaatttgttctattttgtctgaaattgagttcccattgagtgagtcaaaaaacccatatttgactatcttctttactaaccgtggattgtgaacatagcaccctttaagatactcaatcaactttgtcttaatagagtcatagtattcttttccaaatccgctagctatagaatgaaagaaattatcaatctcccttggttgtacttgagtgaggtcgacgtatgaaataattgatttgtcattgatttcagacaaggtcttcatatgaagggtcaaatgtgttttacctgatcccacatcttggattacggagattattttgaagagatcctcattgagaggctcagcactatttaatttaatgcttgaatcgtttaagcaatccttgattgaatttaacgcggcaatgtgccttttccctccaagtatattagcactggataatgtgggtgtgggactactgggaaaaggattaacggccagattgtaaggagacatcaaatgcacctcacaaatccatggactattccccttagcactacaccctcataccctcctgatgataattcatatttgtctggatgcgactcaatgagttcgcttaccaggttataatattcaatattagaaagatcgcaggtttcacatacctcgttctttatcgaagaaagttctacccagcctatggaacttgacctgcttataattaccctgtcaaagtgttctttgaatgtatcaacagatatcggactactgtcaaactctatgctattggaatcaacttttagactattaattttatcttcgatcctattaaaggaattcttaacctctgttaattcgcagtcaattttttcgacatatttgaatatgctatcagaatagttattgagttttctctgaatccctataatagaatcgtatagatatttgaattttatatctgagatgagcaggtagtctagataaaattctttaccccaacagtaaatgtatgttccttttttagatatgcatactttatcctgcgtcgctagttcattcaattcatcctcaaaattttcctcagggtattttttctttaattcagatttcttaactcctgtagatccaaaagaattaatatcattatagatcatatctaaattggacataatagcaaaataaaaaaacaagataaaaaaaagatagtgaataaaaaatcattgtactgtaaaaaaaaataaacaaatataagaattaataggtctcactgagatccatgggaatgatgatacatttgtctgatgaaataatgatgatagcactagggtatctgacctaatttaaaacagtcggaatcttctcaaatcatatgaaatatatacattaataaatattcttttgccaacacttctacagttaaattgttcaataatgataaaggatacgatgacaccgtaggcatagatgaaataactaaaagaactaatagattactcgatgaatttaaggagaattatataaggaacaataagagtgattttatcaatgatgcaataacaaatatggttgtttgttgcaaaacctacgagaaaatctttgcaggcttcataatcgtatctcaaagaaacaatatgccgcaggaattagtcgaaggatttgtaaaatggtctacaggtcagcttgaagacctaaaggagaaaattcaagaaatagataaaaaaagagatatgagataatcggagtttgtttatattctatttgtgcatcgaatgagttaaattcaggattagggtttttaatattgaaaacttttgtcattgagtggtcgactagaatcttctgcgattaaagattatattgaggtttcaaaaccacgaattgtaatagtactcgttattacagcggttacctcgatgctagcggcgactagatttgacggttcaccaaactcggcatgggatatttctggatggcaattgttgtttctgatcattagtggatctctttcatcaatgggagcaagcgcaattaatcaattttatgataagagcattgacaatttaatggtaaggacagctaagaggccgattccatcaggtagattgaaggccaataatgttttgatatatggtctggctctgagtgttatatcagttaccattgcatggttcaccctgaatcctatagcaacttttatgatagggttaggaatatttttctacgtagttatttacacgttacttcttaagagaagaaatgtttggaatattgtaatcggaggatttgcaggaagtgcggctgcaatggcgggttgggcaactaccacgaacagtatagatgtattaggttttttagtaggatggattgtatttatgtggacaccaccacatttctggtgcctagccatcaaaacaagggaagaatattcaaaagccaaagtacctatgctgccagtcgtatatggtaatcaagtaacggccaaatacatatttataaattctttgatattgattccctattcactttgtttatatttttttggattaggaattttatatctagttgtagcagcagtgtctggatcattaatgactttctaccattacaaacttttaaagaatccaactccagaattagcctggaaagcatacaaggtaacagcaccctatttagtaataatttttatagcaatcgcccttgattctttatggtactttagattttaaagtcagatttgaaattggaaaatatgatcattaatttttcattctgttaattcgattctttttttatcttttgtcagccaacttactctaattagaccataaatttccaagtccaacaatactttattgaattcgtcttctaatacacttacaccatctttggacatagaattaagtaaatcctggtcagtagtagtgcctagctgtttaattttttcaaatacaatattccttataggataattcacattatcaattctaacttggagcatattataggtttagaaataaaacctttttctagcaatagattaaccataaaatatcttgtcatgaaatttcggaattgcagttgtcaattttttctctattgatgaataccaattatgtacgtcatttgttattgatggtttgacggtgttgagtgcttcttcgaaatcaatattaaagatcacatctgaattcttatgaatcgcatttattgccgcaaatctacataaggccactaaatcagctccactgaatcctttggttagcgacgatattttcttcagatccacttcagaagatataggcatggcagtggtgacttttaacaaaatatcataccgagaaatctcgtctggtggattgacaaatattatgagatcaaaccttccgggcctcaggagtgaagtatccaataaatctggtctgctagttattcctattactatgactccaaagttaccagaatcatccatttcggacaatatttgagataaaactctttcatttccagaaacatcatcagaggtacgtggtcgaccaagagaatccaattcgtcgaaaacaactatgcaaggggaggaggagcgagcttttctaaagatttctctaatagccttttctgattctcctacccattttgataacacttctggcccgcggacaaagatgatattcatggaaccttcatttgcaaaggatttcgctagcagggttttaccgcatccagaagggccaaatattaatgcgcctttagctggtttaattcccatttttgaaaatttttctggagatatgatcggagacaacagattttccttaagaaggcttttttccttaactagacctcctacttcatcccaagtaatatttgttggttcaacataaaattctctcaacgcagttggtatgatttccttcatggcgtttatgaaatcctgttgattgattcttatgctgtttaaaatttcagaaggcacttgattttggttctctaagtcaaattcagttaagcttcttcttatagatttcattgcagcttctctcgataaggcttttatatccgcaccagtatatccattcaataattttgccaaatctcgtaattgaatgtctgaaccaagaggcatttcatgagtatggatttttaaaatttcgaatcttccatccacattatggatacctatttctatttcgcgatcaaacctgccaggccttctcaaagcgggatctaagctgtcgggtctgttggtagcacctagtactaccacatttcctctatcagacatcccatccattaaagctaataactgcgctacaacccttttttccacatcgccaaaggtatcctccctcttgggtgcaatggcatcaatttcatcaatgaatataatactaggggccatttctttagctttttgaaaaatttctcttagtttgctttctgtttcaccataatacttgttcacaatttcaggcccattaataatataaaaatttgcttttgattcagctgccaatgctttggcaataagggttttaccgcatccaggaggaccaaaaagaagaatacctttatggggttcaattcctatttttgaaaatacttctggatgcctgaggggaagctccacaatctccctcaaacgtgtgatttgattttttaagccaccgatttgctcgtatgttacatggtaactatcatgatatagtttctctatgcccgtcctaatccctattttggtgaacttagtgatttttaccacttctcgtggcatcgtactctggactttgaattccaaagaagttcccaggaaatttagtgtgaattgttcacctttagtaacagggtaaccttcaaatcggttattcaaatataaattaaattcatctgaaaaattcttagaagtattgcacgacaatgttatcctttccgccggttttggatcactctttttgaccagtacataatcattcaggcttacgcctgcattttgtcgagtctgaccatcaatgtgaatacaattgttttttttattcttatcctcaaaaccgtatacagatacagctgttattttctttcccgctatttcaattatatccccgtcagaaacgcccaattttcccattgacatactatctaggatcgcttttttctttcccacatccttaatccgacactctgcaactttcatcttgatagttgctgttttattcgaaccagaaagagatttattttttttttcaagtgaatcggaatactaattttgatattatttcatttttacagactgtctgctaatagtaataacttgaatttctccagctccttttactttttttatagattcttctagtttctccatctctccctcggcatcatccaataagaaatcacccacaatggcgtttaaaccaaatgccatcggctctttagcgtgtgccttcaattccatcccctcaggaacatgtgatttaagaatctttgcgaatgcatccatatccgtttctgaatctgctggtagaatctttatacgtgctacaagtctagccattttaattacggcccctcgaatccacaacctacacatttgtaaggtctagcaaattctctacagctctgacatctccagattataacatacccacaatttggacaataaaatcttacacatgcatcattaggcatgataggtctgttacaagacgtacaaacaggtaattgtaactgctttgacatgctatctaaagacctgcaaaccgcatttatatcttgcttagatccttaactattttgcgatactcatttcccacaagagcgtgcatcaaatttatactcatttgagtactcataaagcgtttaagagcaaaagaatgaaaatcaaaatctcctgttgaagaaatcttttcaattgtgttttttggtatactagaaaatattttgtctaaggccttattatcaagccgttcaagtaatttcctaaagaaaagcaatttgtcaaattcacttccaaactgggtcaaccaattattttcatattgatctaatgaaggagtgccattatcttctaaaatagattcagatactgcacggccagcataaattcctcccattcctcctgtataaatacctccggccgtggtaggtttggtctgtcccgctgcatctcctacaatgacgtttttaccattcgaaaacggcttgacatatccactaatccatataggagcataaatctttctgatgattgaatatggctttccccgagcttctaagaaacgttcaatggacaaattcggatttatactctttcctgctacgcctaccttccctttgccctccgcagttggaatgatccaagcaaaaaaaccagggtataaatccgaatcaaaaattacctctattgtgtccttcattatccaaggggcataaacctcaaactgtcctgatggaattatattcctcttacctttgtttaccaatgttccaaccccccgtgcatcaacaaaaaatttgctaacaaatactttaccaccttggattttaactttgaatcgaccgtcttcaaaactaacggaaataatagaacttctagtgttgatttcagcaccatttttctgggcttgaaatgctatttccttatcaaaagatctcctatctattactatcaccttttgatattcagagtttatttcaaacgagctgttgttggaccgaataacggcagtttttatttcattatcaattgttttcaatctaggtattattccaagactttcaagagctttttggctgacaacgcccccacaatgttctggagttccaatttcgtgatcttcttcgagaactaaaactttaagccccttagatgacatctcacgtgctgccataagtcctgaaacgcttcccccaccgactatggcatcataatcgtccacccttaatactgaattcaaaattaatgaatgatcttaacttgtcaattatttattctatagagtatcagtgccaaaaactagatgattaatcaactcaaatccaaattgaaactgttatcgatagaacatcataatagtatgtaactcaaaaataaggataagatatcatttcgaaaaaagtttattgttatatttatcggagacttattgattgaagtggagcaacaaggtcatcgataaacccatcatgaaaaaaagttgattctgataagtataggttattactcagttaattagagtagtatcatttctaccaacgacaaaaaattattggcactgtatattttagtctaaaggtaatggatgatataaaattgcaatagttctctaagtaatcaactctgttaggctatcaattccgtaaaatatctattccaggcatttcatctcctgctaaaaatctgagcgtagcgcctccccctgttgaaacgtgagttacctccttctccgaaacgccagacatcttcatggcctcaagagtgtcacctccgccaattagggtctttacacctctccaataagccaatgccatgcttacagcaacactcttagttccgctagaaaatatctctctttcaaagtagcccattggtccattccaaaaaattgtacctaagccattattatgaatttcaaaactaaacttctgaatcgtcttatctccaatgtcgaatcctttcatgtttttaggaatatccccttcaacaatttgatattgactactagtatcagaagaagccactttgtggtctatcggcagaattatcttatccctatgatcccctaacgccttagtagcccaaggtagatagtcctcttcaattaatgaatctcccacagaataaccttttgccttaagaaatgtatatgaagcagcaccacctatgagaaccttactagcttttggtaaaagatgatctagagctccaatcttatccttgattttcacacccccaattacaagagtaaaaggggttgagggattttctctaagcaaggataagtattgcaattcctgggcaagattaaaaccagcaattttagtatcaaaatgcctagcgattccaaaagtggaggagtgttttctatgggatgtactaaatgcatcatttacataaatgtcagcgtaattagcaagcttttcagaaaagtctggatcatttttttcctcctcagaataaaatctcaaattttcgagtagcaatacgtcgccattttttaaaccatttattgcctcaaaagtattcttacctatacaatcatctgaaaaaataatctcggcattgaaggaggctaacatctctcccagtttttttgacacaggtcgtaacgaatatcgtaagtctttgccagaaggtctgcctaaatgggatgcaagaataactttcgcgcctcgtcttactaaatattctatagttggaattgcagatctgattctataatcttcactaactatattgtctttaacctgtacgttaaagtcaacacggacaaatattttcttattaagataaaactgatcgtcaaaatctgtaataaattttatttgttccattaaatagaggaaaattattcgtataaaatatttgttatgaaatttttgtatttaaaaaaatgaatccagatagtcggtattctgggttaatttaaaaccattatcttatttaagttgtttcgttatttattggagttattttagtaattgttggacatcccaatttgcttgaagcaaccttgaatgcctttttagctaattccaagttttcctttgtaacatgagcctcataaatggttctccctcgttcaactctggcagccaagcctgtagctttaccaaatgcacgtctcattccctcttgtaatcggtctgcccctgctgtagcgatcatcttattttctctcaaaattacatgcggatatacccttaatctggcaaaaaagctcatatcacctgcttgagccattgttttattagctgccagcctcgcagcttcaagagaattatgtcgaatttggatacgttcggtaacagtcagttcaagtaaataatcataattacccttcggttgcccggatgcaaatctggcaatctttatttgaggtttccctttaatgtactcacgccttacatatggcatgccacgaatttctctataattaacacctttcacaattactcccctctaataaataaatgaggccgattgctatgatttaattgttatgtcttcagaaagtagccccaacaattactctatcgaatccgctccgatgactgagtctgcaggactagatgtggctacacctaatgcagaaaccccgaataaggagaagaacagtaatgaagaaaatattgactcgaattttctgatagaggcagttcaccatataaaagagggaaaaacgattgtcactgatccaaaacaacaagatcagctaaggaacaaaggatttggagaggttttcaataaagaatacttgctaaacaaccttgaatgcttatttctgcttcaaaataataaaataaagatttatacaaaaaattcacaatatgatttttctacatttctaaaggcattaataaaaaaagacaaaaagatcttgacaaagtatttaatttttagagacttgagaagcaaaggatatgttgtcaaagaaggctttggttttagaacagattttaggatttacgagagaggagagtacaataaaaagacctcaaaatatgtctccgttggattaaacgaaggaaccaacataaaggcatcggaatttgccgaagtaattgagcaggtagaaaaaatgggaaaggcagtagttatagcagttgtggagcgcagaggtgaagtcatttattataaaacttcaaaaataactttttttgacaacaagaaatcaaaaaaacaagtctcttaaatgctcatctaaatatataattctctgtttaaataaatagatttagaaatgccgagaaatgatgaccttcaaaaccaattcagaaagaatatttgtaatgagatatttgcagttgataaaaacataaggtttgttggaatagtaaataaagagggggaagttattgaaggtggatttaggaaggggatagagccactacttgaccagaacgaagaacaagatatgtatctgcagtccctttcaaatatcagtttttttcaatcattctcagaaaaattcggcccagttgactacctgttgatcagacaaatgaaaatcactatgataacctttccatatgaagctgaaatattgtgtgtctcagtttcgtctcaatctgatattgacagaatcagggatgaaacaatcaaaatagtctcagtttaaaatattatagaattctcgataaactattaaataaagtatgatagcaatatattttcagacttagatggaaaaattagtttgcgaaatatgcttttataaaggaaataaaactgaatttgaggagaatagtgattatagtatagaatgtgtatgtgatcatgctatgtgtccaaaatgcaagaaaccttatcacgcagccataattaccgaatagaagaaatgctattgtaattcattcaaatagtgtaatagaatatattaaaatcatgttaaagacagatgttgcaagacgatgatgaataagatagtccccctattacattgaagtaatttcaattaaaatgaagagaataaaccggacttccgagttttgtaacgttttttaaatgtaaccgcacttctataaccaagactattctaattagtgcctcaaatcgcattttcaattctggtcgcttaagcatagactgttcaatagcacattataagaagtggtaaactatggatagttatttaagaaatatttagaatatatataaaaatgatataattattataatgtgtattgcaatatttatatagcatcgaataatattataaatagttagccaatgtttaacgaagattcttgcaggacatgtggtctaatgctaattgcaatgtggagatgtaacgaatgcttagaaacatcttcgtggatttgcaaaaattgcaactcaacgatagatcgtattcaccttcatggagttatcaacccacgccagatagacgttattatttcctgaagaagcaacaggtgaatgtttggagtccagaatcattgctgttattaagtctcgatactcgaaatactgttcaaattaacattctaataaattgatgatcgatttctatagtttgaatcctgtcgaccacaagataagcgattataactacgctttatatttttccatcagcaaaatcattctaattatcgcttagaatatacaacttagaaaatatcaattcaaaaactggatttactacttgaagaaaacaggatcagttccgtgagagttgagttaactaataatactaatgtacgggaatatccttataaatagaaatatcatcatgatggttataaataacgccctcaataatttttttaatttagcgacttcaaaggctatttcaaatattttcaaagatgtaatatttcttaaaaattgtataacaccctcaagaaggattagttttctttttaaaatctaatgacaaagaattaatgcaatatcttaatccagttggattaggaccgtcttcgaatagatgacccaaatgacacccacacttcgcacagaccacttcctttctaaccatgccgtagtcatagtccattttttctttaatattctcattatttgatggagcccagaagcttggccatcctgagtttgaatcatatttagtatcagaatcaaataacttcgaaccacagcacttgcatgaatatataccattttctttgttggatagaagatcaccagaaaatggtggctcagtgtcgcgatttacacatacctcatattcctcaggagttaatttttttttaaatccgatttagaatctttttctgacatttatgactattatattctatttgattctttaaaaatttaacgatcaaggaaatttttttaaattctattcattagcccgtaactttgactagcatgtaattttaatgagagtggaatttcaaaatttaatgttggtgtcatgaaaatgctataaaaaattaagactatgaacatgtagaaactacatttctatcataaatcaataatgaatttctaaaaataaaagtatttatttaatctttggtcactaaccattgattagaaataggtaaacgtaaagttttaaacgaagctcacttgaaggaactggttatgccccaggaaggagagttatttggaagagtaattaaattagttggcggtgataatataatagtaaagagttcggatggaaaaattaggacttgtaggattagaggaaagataaaacggagaatgtggatacgcgataatgacttagtgttaattgccccatgggattttcaatcagataaggcagacataatttggagatacattagcgcacacgcagagaaattagagcaagaaggacatcttgaaggattgaacagatagaaaactacagtttatttactgttgtaccccgccactgacccacagcaaaatcatggttagccttacacttcgtgtataactcattgcgcactctctgacggggattaataaatataaaattaacagctatatatcggttaacaggacaacagtaaaagcctaaaaaatacactatttactaacaaattgttgtcattggttaattgatagtataactgctgaaacactgtgcaaagcagaaatatgtaaaattataaaaatatttgcagattgtcaaaaatcctaaaagatgaatcattgtgaataaaaaaattacaatccttatacaatacgaatcgggtctagcctaaggattttaatcaaagccgacaaatcgaattcgaatatagttaccaatgtccgtaagttaagattttccaatacttgtggatgaatttcacctatctccccaattacctcatcttttatgacaattcttgcagaatggcccgaaagaaaataattagtcttgtatcttggagtagtaacaaatgcatcgaaacaatacttcataaaggattctaaattagacttaatctctgtgtagtctgtcgtattgtgagcaatcgaaacacacagagaccaattttctgtgatttccttcccagtaatgaagaatgttttacctatctcaaatagtctttgaggatatttttcatgaatgttgttagaaaacgtattaatcagagaaggtatcagactgttccgcaatacttcaaattcagcatttttcgaatcgcccaaggaaattaattgtttgtcaaagtgctcatctactaaaaaaacatctttgaataactttttcgatattatattaggattaataatttccataaattcaaggccaattaatacatcgcgcactttatcaaagataacagattgattattcttttgaccaggaaaataagaaggagggtataagggctccagattgtaaatcccataaccaatagccacctcttcgcatatatctattttgtcaaacaaatccaccctatagctaggaataatgcattctaattttccattaccctcgtctttgacttcacatctgcttctctgaagacatgtcaagatttccttattggataatttgagacctaatattttattgatatagtcaaattccatccggattctattcggttgtaatatgggagtaacaatttctccgcaaaatggagaattaacttgcaaagaatataaatcaaatcccatatcgctaaattcgaacgatattattgaaagtatatccctagcagacttttcattcactgaagttacttctacaaagaggttactagttgttaggtctactcttgtagtgtttccatttataacaggtggaagagatatgacgttatcttttgagtcaactaaaattggaataacgtcaaacttttccacaatgtgaccatacttctttccgacatcgaaatctgtaaggatatcatcaatatagtattctttatctctatccagtggtacaaacttcgtgtctctgggaacacccttatacaaaagggggaaagtcaaagcatcataattgtgtataccgattgacgacttttttctttttctacctaacccattattcaaatcttcttgcatagatatcagttgtgtcaattcttcatgagtaatcggaatatcccgctttgctattaatccttgtataattggccttaattctttcaattgttcgtcgacccgtatcaaatttgaagatggtcgaagatctcgtataatggtgcgtcctaattctatattcatgattccttttagagcccgtacgatcccattttcagaagaaaaatcaggtcgatttggattaaactctattctaatcttgtcattatttaggtcaacaccttctatatctaagccaaggtagggcaatttttcaattatttcatctaaagtcatttcagcaaaaatttttgagagtaatgatggtcgaacgtctacgacaggcatttagggaccctctttagccaagttaaattattagaatatagttcccgtatatcatcgagattaaagcgtatcatagccaatctttcaaagccacctccccaagccaaaacaggattcttgatacctaatggttttgttacctcaggtctaaaaattcccataccaaataattcgatccatttgtcaaacttctcattataaaccatcgattgaagggaaggttcagtatatggaaaaaaagtgggccagaatttaatcttctttatgccaagtttagaatagaattcggtttgtattccaattagttgtcttaggttggcatcttcgtttacgtaaatcccttcgacttgatgaaattcaacaagatgcttaaatgtcactttttcgtttctaaacaccctacctatcagaaaaactttatctttgtctgacttattttcagataagtattggagtgttaccggagtagtgtgagtcctcaatacatagggctgagaatcttcaatattccattcgtattgccagttttccctatgaattctggacacatgttgcagtagtgatatatcctctggtaacttagaataaagatcagtttgagatttcaaataaaatgtatcttgcatttccctagctggatgatcttgagggataaataatgcatcaaaattccaaaaacatgactgggtaagattaccttcaatctcactaaatcccatgccgattaatatttctttaacttcgtctataaaatcgaccaaagggttctttttcccataacttaccaatggcaatggagcctctacgtcaatctgttcaaaaatgagatccctccattttccagaaactaaatcttcttgagtcatttttctaacaactttatcgctagtcaataataatgaatcaacaacaggaacactagtttgtgctattcggtattttttgtctactaacttcgctgtggataaaatattataccgtttttttaatgattcatatgctttttcatcttcactatcaaaatgtgattccaacatggagtttgctttatttaatttggcaatgaaattctcctcatctgagaaattttctgattcggggagaactgtcactttatcatcaattatactaatccaattattttttttacaaaaccggatggctccaaaaacttccttttcgttgtctctaaactcctcattgtttatgatttctgacaatttatttacccctttgtttactatgtttacaagtttcctttcagggagaacaacgtgctctttatccgaaaaatcagaatgtaaatataccttagcttctgtgctctctcttacttgaactaggcctttatatcttaaccattctacccccctacgcaattggtccgctgtcaattctgatctcttgacaaggtcagattcgcttatccaatcagcatctaccaatcttaatacggtcaagagctttttctcgatgggatgcaacgatgaaatcgatttttctgaattattttcaaacttagattcatccctacctgctgtttcatccttatccaatatatgtagaaaacttgtgcgagtatttttaaacgtttaaactttggttatataaagaataattaaaggatgtctagtgaaaacgagaatatatcatttgagaaaaatgatatcacgctagattcgagtgataaggtgaagaatgataatgattcagaatcagaatcaactggagttaaagattttattgttactccttgggaagtagcaggagatattaactattctaaattgatcgagaaatttggtacctatacgatcggtgatacgttacttgaaaaaattaagaatattactggagaaatacatccattcctcaagaataaatattttttttcccacagagatttggatgtggttctagaggaatatagtagaggtaataagttttatctttatacaggaagaggtccctccgggatggttcatcttgggcatttgatgccgtggttattcacaaaatatttacaagaaaaattcgatgttaaactcatatttcaactgactgacgatgaaaagtttctgtttaacagtaacttggatatgaaaactattcaaaaatatacatatgaaaatgtattagacatcatctcggtgggatttgattcaaaaagaacgaaaattattgttgatacaaaacatattaaatatttatatcctttatcgattgaaattgcaaagaaaattacctactccacatccaaagccgtttttgggttttccaattcttcaaacattggtatgataggattcccacctgtccagggagctccttgcttccttccgtctataattgagaataaaccgacacctgtcctaatacctgccgcgattgatcaagatccatattggagggtgactagagacatagcggaaaaactgggctatcccaagcccgcgcaaatccatagtaaatttattccaggacttagcagcggtgggaagatgtcatcatcaaaacccgaaactgcattatttactgtagacgatcccgagatcctggagacaaaaatcaagaatacttttactggaggtcaacccacagtagccctccaacgtaaactaggtggaaacgccgatatttgtccagtatattggtacctaaattatctttttgatacagaaaaggaatctcgagaaagatacagtgattgtacaactggtaatttgctgtgcggtgaatgtaaaggagatatgataaaaaagataaaaccattcataaaagatattcagacaaaaagagaaaaggcacaagatttgattaaggattttatgatcgacggaaaagagttcttcgataatggcaataccagtcttgattaactaccaggattgaattcaagttgaaatataaattcatttgtcaagacagttatgaagcggaaaaattaataagcatttttgcattgcaaaaagataatacactttttatcagtaatatcgtaagaataatcgataatgaggttgtcgttaggcttaaagatggttctcatcacagtattctgtttaaggatgatataaattcatacaagttggaacaattttttaaggagattttatcaaaaaaaagtcgagtcattggaacaagctacataggtgatgtagctttcataaatttaactgagttagaagatcattagtccaaactgtagaaatttgctttacacataatccctattaaattcatccaaaattagttgatagactttttcaaaatacaaagatgtagagaatggcatcaacggtataaaatctcttataatttcaagaaccaaaggcaccgcacgctttgataatttaatatcaaatttcatccaaagaattctattctgagtaaatattattttttcacctaactctctgctacaaacttccttggctttatcttcaacgcgtttgtaccaatatgcaagtacttccggatccaacccgccgccaaggtttttaaggtcattacaatagtctagtactaaatcatctattccattcttcattatatcacatcaattgtaaactaaaaaatttatcatgaggtattaaatttagttgataaaataggattattttttatttctgcatatattgccattgtgatcaatttcatttgctctgatacggctagaagaaattggtaacccgtcttgtgctaatttcaattccacagatactatgtcaattgcttttagacccatgcttgtcctgatttcattaacctttgcccccttgtaactagtctcggtactagctaccatacaatcaactttatgggagaacatcaaaggtccgaattcatcctcaagctttgtaatctcatagagtctggacccaaccctactatgaatgatcctcatcagattgcgttttcgtatattaaaggaattatttattcttttatttaatttttcttttactaaattatctgaagttacacctattataacaaattttcctatctcaaatgacttttttaaaagttcgatgtgtccatcatgcaaaatatcaaacgtaccgcccatggctacgcattcatattttttcaatatagttgtcatatgaaaaaataatataaaattattgatttcaaactttcccatgatttgacaaatttataaatacctaattggggatagataattattgtcatctacagttgcagaacatatttgtgaggattgtggttctttactgattcatttaaatccgactaccctacaaagcataaaggaggttcactcacaattatgtcccataaaaagacaaaaaattcttgcgaatgcagaagctgagaaattaaagaaagcatcagtaacaaggaattcaaatatccctgttcaagcaacccaaatagtcagcggggctccacctggtgctgcatctatacctcaacaagctgtcgctccaagtatgaatggttctagtggtgggtcatcgcttcagctcacaggcactggaacagactatcaagcagtagaaggacctatagatacgggctttaaatctaaaagacagcctgtaggcaaatttcaagggatccaagtatggggtccatatgatgcacctggacagcttggaatttggggtactgatgtatgtgttgattttgacatttgtatttcagatggtgcttgtattgaggcatgccctgttaatgtatatgaatggctggaaacaccaggtcatccagcatctgagaggaagccatttatgattagagaaaaggattgtattttttgtttagcatgtgaaaatgtctgtcctccccaggcgataaaaatatttgtgaaatagcatataataacaagcataaactgttagatttgactatttccctttacatatttataaagtcgatagttcaagttattattgtacttcataacagaaccccactttgaatttcgttctgtatataaagctaaaaagtatttgtgttggctaatatcaaggttattataaatattttcgcctacaattacttctccaggaaaacacaaggatgtaattttagcggttatactgatactaaatcctatcaagtcgatatgagcatgagcaatattttttccatacaatagaacaagagcactgccatattcaatgcctatcttcactgcaatctcagggattgaatgtttcttaaacacagggttgattgcagtacctattatattctgaatatagcttgcacagtctaatgaattcattattgcttttttttgatcgtaatctgatgggaataggccgattactgcatctcccacgaattttagcacataccccccgaatttttcaatagccaaaattacttcttgggaaaagatttggataattaaggccaaatccactgatggtaggtcatgagacatctgcgtagagcccgcaatatcgacatacataacaacaacatttgttttggtgttgactttccgttgcaaatactttcgacatgaatccgtggacagatcaataagtaatcctttgttttctagactgtgtgtaacccgatctcgtacactactaataaaatcaaaatttcctgattcaaaatttttcatctagatctgaaaagacctattgcacctagtttattccttatgtgaggcaatgccgcgaggcaggactaattcaatatgttcattggtgtaagaatagttcaaataacttggaaaaatccagtttatgaattattactcttacgttgatatgtgagagacgatgtatttctgcatactataactatgatacccgttatatctaatacctcaattccaaagtaattatgtcaaaataataagatcagattcagtcacctggaataaggcaattcatatcaagcaccactttgttcacgggaaaggatgtcgatttatacagtattctagtgttatacatttcaagttattgtatgggattaagatattatcaaggaactgctagtcaagaaactgatcatgtcgaaaaagtaactcattgcgatcggcatcgatatcaattgagataactaccggagtccgagatgatgactttattgtctccccaagtattgatgagaattcacttgtatgggttattttgtatccttttgccccaaagctctctgcaagctttacaaaatcaggattactaaaattagtgaaaacactcttaccaaattccaatctctgtttggtagagatcacacctaaatcagaatcacaccacacgacaattactataggaagttgtaattgtactgctgttcctagttcttgaacattcattaagaaaccaccatccccgcacattgccaccaccttccgagtagggcatgccagctgagcgccaatggctccgggaagtgcaaatcccattgaacaaaatccgttgcttattatacatgtatttggactaaatgtcttgaagatttttgctatccatagtttatgagctccaacatctgatattaatatatcatctgaggaaagagcatttcgaacttcataaattaatttttcgggtttgataggataagcttcgtcatctttaaactgctcaacacgccgatccacttcttttttaattctcctaaatttggccatggcctgattgattttttgtttatcaattgaatttattcgaatttcgttctggcttttctttatagagtttattagtaaacttatggttaattctaaatccccaaaaatttctatatcaggattatagtagttgtctacttctgcagatgtagagtcaatatgaattatttttttgagatttgatctattccaatttttaggactatattcaaccaaatcatatccaatagaaattacaacatcagccaattttaaagcatgtaaagcataatctgattcctttatgccaatagtccccaggtgagtaggaaaagcatcggagatcacacctttacccataaaagtattcattgaataaattcctgttaactctgcaaaccttctaataatatttgaggcgttatttcgaatacaaccatttccaactagaatcacaggtgcagttgacatcagtatcattttagttgtatcatgcagcattgatgatgttggacatgaaatgctgccctttttattattcagtggtttcaaatatgatttcgtttttgccacgtcaaccggtaagtctaagtgagtcgcaccctttttttcttcagtagctatcttgaaagcccttctcagaatttcaggaattccttcagcatcccttatggaccaagtccatttagtgataggagtaaacatagttacagggtccatattctgatgagattctttatgcatctgggtaatttcggtttgaccggtaatggcaagaattggggatctatccatattagcgcttgctaccccagttgttagattagtagctcctggaccaagagttgccagacaaacaccaaccttattggtcaatcgaccataaacatcagccataaatgcagcggcctgttcatgcctcaccaaaataaactttatagtttctgattctgatattgatatcattaggtcgtttgtttcctcaccaggaattccaaaaatatattcgacgttttcagcttccagacattttacaaagagatcagaagccttcatctaagataaaatgcagtttatcgacaataaaaatatgatccaaaggtctaataaacgatggcgaaggtttaatgagaattatcctaatatgtgatcaataaaatatattttcagatttattctatcgatttccaaaataactttaggtaaagaaaaatggtcaacttcatcggtattctgtcctgatttaccaaggggtttttccattcttaagaatatattcgttgtaatatttggccgatttattcacatcgtatgcttgccatatccaaaaaattaaataaattaacccgaatggaataaagagaattgttatacccagaattatccatccgattactagtattataatgcctttccttacctttccaatatacaaatgacctattccattaaatcctatgataccagcaacaagtgcaagagcaatggcggatccaacatttttggtttgagcagccatagtcactgcattagcagtattttgtggttttccacaaacaggacagtaagatgaattatctgaaggcaaatctccgccgcagtttctgcaaaataccatgattctattattttgtaaaataatataaagatattagtaaattcaaggctcccaaaatcgaatggatggtatcaaacctatctatttcataattaataatatcagactcaattacaatttaaaggatcaatgatcaagctaaccttcaagcactttaaaattttgatcgacatgggatataatattttaccctaacgctaattttgatttatgatatatttgtttaataaaatagacatgatgatgaaagaaataaaaatgttaatctaagataaataacatttgccatcctttatttttgatcactttaataatgacgatatggataatttctcctaaatcattaattgcgaacttcagatttttcatacattaatttgtttattatcatttccgcataaggattgtcacaataagaaattttgaagttctaaaacatattatggatctgcacatgtaaatctttagatatcctaaatgataataaagtcctattatcgattaaagataaaaaaataatcatcccctttgcattggaatcactttatatttctcatcgaacaagaaaattacatgacactaagaatcttggtattagtatgtatgtgggtctgtttaggcatttggtccaccgattttctacaagaaagtagtagtcaactttcgtcaaatgataccgatttcctaccagagatttcttcgaatttttcatttttgttagatccgaatatatcaaatgaatcaagtatgatgcaaactggtaatcagccatcaatgaattcatccaatttaaatgacttaatactattagaagatcaattaaagttagcccaagagaaaattgagcaaacggatattaaaagtaaggagtggaaaaattattcgagcagtaaactaggattatcactggaataccctatagatgtccatctgcaagaagaagggaaagaaacgcgatttgatcctgataaggacttgaaaataggtagtatagaaaaggacggctttagcattagtcctagtaattatggccaaaattctactgattttaccagtatcgtacaacaggcaaaggaatcgcatcttaacatgaatctagaggattcatatctaatcttggtggaagatattacaccaatgagtattcatgatgatataggagcttcttatataatatctctaattgataagggcctggaaaaatctttatttgtatctaataatacctttgtgcatcatgatgataatatttataggttcgtatttgttaccaatactgatcagtacaataaaaacaatgcaattttcaatcatatattaaactcaattaagtggaatctgaataaaggtaatcttagtttggtatctgatgttctttcgaatcaaagctttcttcaagataatattaggagtaatgagagagtcaatcaatcctcaggaaataacacagctcttattgaaaccactcaaggttcaataaaaattgagttttatcctgatgtagcaccaaatcacgtcaagaattttcaagagctcgctaacatgggattttatgatgagataatttttcataggatagtgcctggattcgtattacaggcaggggatccaaacacaaagaacagtagcatgagtagagatacctggggaactggaggtccaggctatacaataaatcaagaatttaattccttaccgcatgagagagggatattatccatggcccgtatgctcgatcctaacagtgctggttcacagttttttatcgtattaaataattcaaaatttttggatggacaatatacagtatttggaaaagttacaggaggaatggaggttgttgataaaatagcaaatgttaccactaattcaatggatcaacccataaatcaagaactagtaaaaataaaaaggataacgattaattagaatgaaacccccgcatgaatcagctattcactcatgacttgaggaattacagaatttacttgcattgtaagtaaatcttttaatatttttttctggcctatggcgttttctatcaattccatcaataattgtaatgtcgaaaaactaatcaaatttaatctaaggtatccgcactctttttctttattgaatttttaatattacatactttcctttttggctttaaattcatctaataatcgttcgaaaatttgtcgagttatttccggcatgtgatttaaatttctctcaatcgccattattaggcacttaagcgattctctatctgcaatttaaaaataaagttagttgaattaagcgaattcgataaatttgttactcttatcgcagggttaggagttgactttgtcttgttgcataattcatttgcagtttttgcaataattttagcccatttagaagttgtggaaggattcatcccatcagttatttcctttagttttcgcctacaggcatctatcccacctgaattaactatgaaactcaaggttactttactaacaagatatcaatcttaacttaattaaatattgagtattaggataacatagacaactgtacaaaacaatcctatgataaaatgatttgatttgaaagtgataatatgaagtttgcctttaattgaatgtaaaattgttgagcaaattgtctcaatagtttactttgttatcatttatagttttttaattgatgaatatacgatgaatataaacaaaatgatgcttatcggtatctcgttcgttttggccgcaatattactttcctcaggcaactcattaagcctctcgtttgctcaatccaacactacaagccaatcaaacgatggcagtgaagaccaaataaataatggcactgaaaataacaactcagatagccaaaattgggatgactttcaaatctgcctcgaagatgaagccggaactataggataccctactgaagaacagataagagactgttttgctccaatttatatcggcggtgacagcaacaatgatgacagcaacaatgatgacagcaacaatgatgacagcaacaatgatgacagcaacaatgatgacagcaacaacaattaattgatataaccatactgggaacctcccggttaaataaagtcaatttatttaatttttttaaaactaagatttatttttcgtcaaacgtcgtattctaaagatcggactctttccaatgagttatttttacactagacaattgtttccattttaatggagaggatggttgaacctttagttttaattttcatgaggtgttaaataggattgaattaataatagctattgttaactatgaattttagatttaccagtatttaattaagataattttgtctgtctggtattttgcctcaaaagtctattgaattatcagttatatcaaaccatcgaaataagaaataagattagttccttattccccaaggattatctatcacaacaagccaagagttatcagattgttttctaagtacgtcaatagctgttccgcctaggttaattggagttccgtcaggagctgatgctttgaacgtccaatcgctgtaggcaagtacaatgttacctgcagggattatttttcttatagtactttctaatttgccattcatatccataaatcctttcattttttctcgaattttctcaattccattgatattttctccagattcatcaataaaactagcctctgattcgtaaagtgaaactaaagagtccaaatctttactgtttaaatattctgtaaccaagttaagtaattcttctggtgtattaatagccattgttatagcacctggacacttgcattaatccttttaaagtggatagataataaaaaaattattactacagagtcaacctaaacgaaattattacaaaaatgataaggtcggtattagatgagttgtttagagaattagtcatttattttctctaaatgtatttatgtgccagcaaaaatccaacattgatgactcgcaaaatcattccgatatctttcttaatgttggtttccacagtattgataggatttcaaattatacccttcttataacatcctcacacctggggtactatcatgagtaacttactctagtaaaaggtcaaagatccattaggattttcgagtccccaacccatcaaactacaataccatttcgagatattaacagattctttattaccaaagagagcaaaagatgagaatgggcctctcgtgtgagaatgcaaagcccctctcatggtggtgaaattcccttatctgcgatatcatacctttgtttaagaatgggaggattcattaagtttaaccttttacgcaaaaatattaatgattgatcatatggatggccatgattgatctcaaaatgctctacgatattggagatattattcatgtgttaaatacgtaagcccaatggcttgctatctctaattcaatattgaattgtgtaagaaaacactcctaactaataccatcgctaagacttttccaaaattaacctgcaaattggaaacagcttttataaccaaaaatcctcttctttttgaaactagatatctaacaagaaaggataaaaaaatatttgtcagatacaaaaaagattaggaagaattatccttattgttgaccgccagcgctattaccaccattcagattaagcgtaaagtctaagttgttacatccagcaatggtgtcattttgtgaactacaaattgatgtttctcctgtacctgcatgttgtcctataaattgttccaagtcatttgatttcttgttttttccacctgcatatgccatgttgtcaccataggctacaactgaaccgattaaggctgctgcaagaaatattgacaagactgaaagtttgacttttttatccatgaaagcatgtatctaattccatattactgagttgagcaacctgttactgaaaagatcttcttaaaaccaaataccaaagaatctactgcaaaagatagtgtattgatgttgaaggatatatagattaaagtttgaagagatctatgtttgagtaatatagtaaaggatttgttgacggacattcgtatcttttccttaagaaaaatccactaatcctgtaaaagctaaggagaaggagattgggtgtgaaggatctggggcggccatacccacctcattccatcaaggacacgcgatataacgacgccattccttaacataagccacgaccacgtcatgtagtagtagatatttggttctatacatggtaatggtcgctaaaaccatacatattcttgagagatcaaattagctctttgattataaaaatattgaaaaaagttcagacacactaatatacttaaacaaaatttaaaccgttgtaattaaaatgaaagtgctaataatagacgacaacccttccattacagagggttttcaacattctttgatttaagacgtatcagctgcaccatattaaatgaaggaaagcaaagattagagaagataaaaagagcaccctataatgtaatatttttagacattgcaatgtcagattataatggttatgatattctatcagaattaaagaatcaaaatattaaagttaagaacattataatacttactgcatcaaatattgacagaagccaacttgatgattttaaagacatggggattaaagaagtattgataaaaccagtttcactatataagatagaaggaatcatacaaggcaccaaatcaatttctgtttaaagaaaaatcggtttgtttaggccgtatgttactatacaccagactaagaacggatcatcaataatctacgccaaaatatttaaaaagcttttgttacaaattctgagtacgctgaggggcgaattttctttcagcttatttttaagagggagtgaatatctggatagctgtaagaaaaaaatatccctaccaaccaatcttccaaacaagactactaatcaattggcggccactacattggtccaagctttatagagatattggatgttcgatttcatcgaaatagtcgatcatgattaaacagaattattgccaattggaattgacaaaaagtgatagtcaagttaactatgatatttttagcatccaaaagaatcaccatgtaatgaaagattttgaggatatgactctcgaagaaaaagaggaaatacttgaacagataagaaatcttcctgataataaaaaagaggacggctgtgactctttcgagctattcactcgatcatttagtgaaatatcaaagacttggtctgaatccttaaaagagtttgctgctctttacccggactgtcttaaagatgaagatagcaaccctgaagaaaaatatgaatctaagtgggctgcaaagattaaaaaaaaacttttctgaatattcattgcccccatttgaataatatggggtttatttaacgagactagatacccatttgccattccaaagtagatctttttaactataaagattgtttatggtttatgatggtattttatacattagattatatctacagactcgatttaagaagtcacaatattattgcaagatgactaaaatctatttagaagggcggcgctataacctttggtaaataccagttaatcagcctaaatgcaaccttactaccaatgtgctatttgggccggtaaaattaattgaatgtgcattaactcgattatctaataacaaaatgctttaattaccaatattgatcatggatgagataacatgcaactaaactttgaaaaaaatctattagtctatggcttattcatagcaatattagccagtttgacatttgctttatttcctatagtaggagaaaatggcaacaatgtattagctcaatctggagaacaagaaaatcaaacatcaatcgcccataatgcaaaaggacatgagtctcatcaagtcattatcttccaaaattctagtgatggtctaaaatatacaggaatggttacattcaatctttcaaagcccgcagatgtcatttcatttgaagagattacaaacgaagatcagcctgcaaacgcaaccaaaaagatctgggaagttggagataaaaaatttgtacctagcacacttttaaaaaatgtaacaaccggatctgttagctttaatggaagtggcatattagcacacagcacttttagtgatgcatatactggtgcctttactctaaatgatacggtaacaagtaatccctagatttctattcgcatagatccgattcttaatgtgcgcagcccatagaggaggcgctacaccgctcttggaatcaaagtaaagatcagctaagcatattccatttctcttggggttttatctggattaaacattcattaaaaatacttttcgagcaatgatgttgataaattattttataaatattaaactatagtatatagtcacaatacaacttgaatatgttcaaatgattttgctaactttggacaataaattcctattgtctaatacttagtagtgacctataaacaatattaaataattgataattgcaagaaatggtttacatcaaataaacaaaatatctaatcacaataaaggacttgttagattatgttcttccagaactatactcgtcgcttggatggtcatttttgtaaccttggctttggtaaccctcacatcttccagttttatatcccaggctagtgcaaactgtgcatttggaggggagtgcgttgcagaccgttatccggctacaggcgatgctaacaattcaaaatctcggaaaaacacaggaacggttgatactagtgataagtgctttccacacaaacaaacatgtccttaaacaattttttaacaacctatttgttgaacaaccacttttttaatcccgtttatctccaaatttccagttcatagttataggattttcgagataaaatttaccgtttaaggaagtaaaatgtaatctttattcgctgaatatttatgtcacctctctctaaatggggaattcaattcttacaaggccaaaaacatgtttctaaatcatatgaatacaagctcaagtcgacattaaagaagaaactttctaaccttttagataaagatttgccgcttctttcgttattatttcctaacctactagaccttaccaaattcagtaagaaacaagatttcgagttttcctcagggaatcttactaaaaacagtaagatgttgctagactataacattcaaaataaacctccaaaggttcacaataataaaaatatctctactaatggaggcaatattcaccctagcatacccgattcaggtgaaatagctggatggattccaaagtattatattaataaccctacgaatttaatgaaaccacagagctccggtggtgtagaggctgctgctactgcttatatcaaacaaagtagtggtagccacacaatccggctaagcatttcgccctctcaaggcgacgatcccgggttcaaatcccggccggagcatttttagttttgaattctgagaccgatttgagctccttttattgatctctttcttatgagaatctgtatacagtttttcatttactgtatacagttttttgtcataatggatatcacagattagacatgaataccctatttttttaaaagagcctaatcggccaatccttacatatgttgagtttagacccctgttacaataaccacatctagtcaagagcaaactaataatatgtcttagaactttaagggtttttccattgtagggattgagaggacgaaatgcttagccggattgtgtggctactaccactaccttgtttgctataagcagtgaaagcctctacaccggcttaatgtgatctctggatattttattttcctaacgatagttgtccaatagggaagtgtaaccaaagttaaatgtggttaatgatgcatggtgtttttaaacttctcatgacagtcaaggttaactttaactccaagcaaagttgttatcgggtcttgaagtaattccacagtcacacacaaggcccgatattttagctatcatcatctaacaattcaaaatttctctaatgtttgttacatattgatcttctgaatttagtagttcacaagctaacttatcgttatctcggttttcgtctgtcgatataacttttattttatttgcagattcaatcgagtttgttacctctagtggattctgaataattcctttgataaggtcacttattgtattaggttctggatttggtgaaactagtttatgaatatcggaaattgagcttcactcttattttggccgctgcaagcatcagtcattgttaatagttactataatctggtaagatacatttacaaaaatttgtgatttgataaattgatgaattaagaatgttgaattaatatgggtaagttagttttactctatcctgagttggatttaattaaggatattgagtaacaacctacctacaatgatttggccgcacgaaggcctgatttgataaagaataaagggatcgataaatagtgataatgtgatctcaatattggtttctcccttctccctagtcgaattcgatatcaaagtctactgaattgttttcagcaaattgtattggatcatcaccattattccatagcacgactccattcacattgttaatcgttttagagtcgcctgtttctaaatcgagtccttcttgagttcctgaaatagttgcttcataaagtgaattacttgaattagaatcttgagtatctataagttctagttcaacttctactgcgtcagatacactttcttcaaagtttgcggctactagtttgagatcatcatcctcaacgatgtttagtgtcaaggaggccaagtctaattcacaatcctcaaagtatgcaataatctggactcgttcagaatctagttggccagggtataggtctataatatcagagatatcatcgcaagtatcttgtgaggctctgatcacatctgaatcgccgttatttccattatcgtcatcactacctgtttcacatccaataccatcattatcatttccatcaaagccgtgtggatcaggcccaattaccttgaagttgtgataaggaatctcgtcatccccaaggtctccaccttggtcacagtcgagatcaggcggaggggatggaatacaattgtttggatatgacgggtcgcattgttgttgtccacaatctggatcttcagaatcagttaaaccatcactatcgtcatctctattattatcgcattcatcaggtgtttctacgcaatcatcaagacctggattttgtttgcatatatcgtccttgtagccacaggttttctggtcaggcctaaagatcatgcctgctggacagccgtcggaatttggaatacaacgcccagtttcatcatcatcaactgaatgatatccatctggacagccgtcacgatgatctggaacacattgttcatcctcattttgaaagaatccatcaggacattctccatcaacagaagcacatttgggtaaatcaggattaaacaagcagtctccatctggtccttcttcattctcctcaggagtaggagtagttacatttccattactatttccatcgtcgctttcacaacctattccatcgttgtcttcatcaaacccatttggatctccagatgatactatgaagtctctttcagatatatcgtcacaatccagttcttgttctccattattatcattcggggaagaggatgaagaattgtcatcgttatctgttagggtagcgggaatttgtaatgttggtgggattgtagctattggagatggtgataaagatggatcagaagccgccgaggctgtagagtctgagatagtttgtggtggtgcagagtttgtggcgtctgtagagaccggattatcactttcagaactgctatcactttcaccattgtcctccccattttgagcaaatgcctgttgtaatcttaattgtgaagaggggctttggagagaatacattaaactagataatgcgggtgagctaaacatggaaacagatatgataagtatcaaggacagtaacattatcgatttagtagataatttttgatttgaattatccctatgcatatttatgctacaatcgtaagctcatttctgtataatatctatttgataattttgttatagatcaaatttatataagaattgaatactgcgttctgatttgtatctgattaacgaatttgaatggaatatattgaataggtgatctgattgttaccatgtctatattatactagtctactctattgattcacataatgctgaactatttgatgatgtgattacccaattagattcggccgctgcaaacgccataatcacagggagaataattgccacattcgttgtggtagtaagataaggttgtaatctgtagattatatgtcgttcaaccaaattttcgttgtggtcagacagctacattaaccatcgtatcatatcggtatttggattttttacgaggtccttgaggtaataacattaggtttgttagagtattgattatcaacctagtagtcatttaactcgataattgcagtctcatagacaaccttcagcaatcgagttattacataataaaatccaaggacgttggactcgtatatcaatggaataatgtttaatctagacaagtattgactatgttattttattttgctatgaaataagttgacgaacagacgttgtgcaacttttataatgttggttcaatcaatgtgccagttcttctaatgcgaatgaatttaattttgatacagctttcatgttcactttccggccgcatcaatggtttatccaccttttagttagagagaacgtgcaggtttgtaaagaatggatgtcaacctcgcttctattaaaatcctaatcgcatgaacctaatttaggaaccaatgcttgaatgagttccccctttacaaaccgtaaaacaaaaatctaggaagcatgagacagagtaatcctcacaatggccctggttgattgttgttgttgttgttgttgttgttgttctcaatttgtgtcattatcatgattctattaggttcttttgtttcggccgctgcaatctataaaactgagtaattagttggcttgaatcgaataagttcctatgtaaaagtcggagcaattattttctttaggtatcttcttatttgacaaaagtaattgtttatttgtttcggccgttccaaagcaatttagttgaataatgaaataggctctctttgttgtcagccttttatgtaaatttatgatatagtatgtgtatggtagaacaaatctcatcacaatatgttaagtgcttgacatacaaagtcgtcaagagtatgatagaaaggactggtcacgatcttaaagtcccgataaagtttgtggaagcatacacagaggcttgcaggaggcgagtaggaattaatgatgaatttgaggattcaaacctggaattgagacaacatctaagagataatctactcaagcatggttttatctttatagatcctaatgacgttgacagtatctatatcacacaaacggccatagatgaatatgataagttaccggaagagaagtggtaacttgcagtatgaaagcattgtattagtatcgaatattaccaacaatcttaaactataaccctttagttcgtaaattgaatcaagatttagttttatagatcaagctaactgtatttagtatgctaattctatggccgcttcatgcattacttgatccgtcaagaggaaaagcgatcaatttgttttgaccaattcatattcaaaaggtatccgggaatagtcgatgtccacttctgcctgtagttgcgaggttatgataataacacccatagacaagaatatataattgttccctataactatagtgttaaatttgacagtaaaacctatatcttggaaagcattttctgtagcattgttctcttttatgctcatattttctgctcccctgccatttgcactagcctcgtcaaaaagtccatatgattcagggtatgaccatggttgtgatgatgctggaatatcagattcgtcggaacagtatatcaaccagcctgaaaagggaccagtctatcatacatctgaattcatggatgggtattattcgggactaaattcatgttcgtcctccagcaataattttgataataacttcgatacaacacaacaagacaatggtggatatgaatcatctcagtcatcctcaaattccagatctcaacccaattgtgatgaggctggattagtagggggcctgatgggtggcgcagcaggagcagctcttggcggtggtattggtggtgcgggtgccggatatacatttggatcaaaggctttgaaggatatttgcgagagtaacagcaataattagaccactaaataatctaggaatagattgtcctttttatgcgatattgctggccgatgcaatttctgacaatatttttcttacaactaatttcggccgctacaagtgattagagggaataaaatcagatatcttgaaatatttcttttagttgaattactatttctttattggtttcatcataattttctttgtttccaaattcggctcttagcgtgaaaattttcttctgagcgtcttcactgaataattttttgattgtctcacttctgggatctaccaataggatgcatttcatattatttatagaattttcgaataaatgtctaataactggatctcgaaatgagtagcctattactatccagattttgtcgttacttaactccttttcaaggtaatagtataattgaatgaatggtgtaagatataacttcttttgacttagagggtaaattattacttcatccttgatagagttactagagttcattgatctgactcggtcatagttatcttccaaacttttttgaattaatctattcttttcatctttaatccaatttaccgatccatgtaattttattattttcatacgtgtttcattgttcctacaccaatatcgtttgatgaattcatccatttttatttccgaatcgaatcctattgctccagtatcaaattccttgtattctacaatatccttaaaatatttttcaatcgctgtatcatagttggtagtgaatatattgaaattgttgtgtaatgaggaattaatcttgctatatggaattgtatcttcgtccaattcattctttgttataagggaatggagcacaccgaaaaaattatcataaattttttcaatcagatctaccttatgttggtcaaaactcatgctacttcttataaattccttatatctttgttctaacaaattcaaatcttctattgaatcttcgtccaaattgaaaacaaagttggggctagttgattttctgtaaatttgatatagtccaaagtcgccagtattttcagcgaagttagtattctccttcaatcctatgactaccgacatgattgcttctacgtccactttaccaagataatactcgtctaaagtattgtatatgcgatcatagatgttaattatttttttattttgatcaaaataaagagagttattcaatgaatttctttcctgagagaatgctgattcagggtatgctttcgaatgaagtttctttctgaattcttgagtaatttttgtcatcgaaggaaaaccaaacgctgaagacgcaccagacccaataaagaaattaattgattcccttggatttatcatgagttgatgtaatttctcctagttttaatcattttttatacttttattcatctatcactatttatcaggatttgtttcggcccctagaagcgttatgaaaatagagatgataatcattgtattcattgtagtcgtaagttaaggatataatctgtagatcatatgtcattcaaccaaattttcgttatggtgagacaactactctaaacattattacgaattaggttttggattttttacgaggttcatcccctagtgacaaataattagaaatattgagtgaggtaactaatggtccgcgatttctgagactgctttgacagatatcttatgatactcttatcaaaaccttttttctaacaatctactctctaaaatttaaacaagttaattatacattaagatgttatcaattagtttgaagagtaacaataaactgactaatacttatttcttaaatatatgtagatcatgttagtctgggatcgcagttaagataagagatccatccacataacaaaagactattccatcagaaagaatactaatttatgcttttatagttaaagaaccttcgttactcatcgttcttagatccatgaatttgctattgttttggttcggccgctgtaaggaatgacaattgttaagactgtgttgttgaatgtttaacagtattgaacaatgggagccacctcttgattccaggatcatcaattcacttattcctaatcaatgtatatgaagagtatgaagaaatgaattatatattcttaaaattatgcgaatttgactaagtaaaagttctcaattcgacgacttcctttgaactacaatttagacgaattgagtgatacggtatcgtgtatggggtagcacattacaatttgaatggtgagataaactatagaaatggaggataataggttccccaaggactgttaaatccacgcgatttagtttgaatattcatattaatccgtttgattatctcctcatactgtgcttcataattttctttagtgatggcagaattaaccaggaggcacaataaattgattaaagcgccaaaaaacttctcccaatatctttctccatgcagtaattgatttctcttttcatcgattaaatcataacattttaaatctggatcagttatgtatactatttcaaattcctccctaaataatttcatgttattccttaattgaatgttagaagttttagattcaattaatcgtaacaaaatatttatacgatttattcgattactgtttactgttacttgttttccatcgttagataaaaaagcaggaatattatcctttaattttccatctgattccatatactctgataacattcttctggcaaccccttctacaagtggataagtaaggtgtgcagcaataagaaatgaatccattctaattttttgtaaatgtggcatgagactctctacagcagcgttgattttcatcctatcaggtcctctaaacatagaattatcattgagaagaaggacgcccattaacaatttaacgcggttactgatctcattatcaaagaatggtaacaaagccaattctttataatactcgtaaacatccatagcataactccagtaataataatggtcttgattgacttgatatttttgggtacgtaaaagaagtataggcatttgattgaatgcttcataggataacttatgcatttcaaatttagtaacaatgagaaaatttctttcacaatctgtttgtatatttgataaataactagttctaagtgtttcatcaccaatgtcaaatattctaggcccatgtgttttccaacattctatatactgtgaaatgagaggctcgatttgttcaagcgaaactaaaggtatttttgattcaattgacaataccaaaggtctgatagtctaaattattaagtttatgaattatcagatcgcatcaagtctggccttctgattttgattagtggtaaagtgaagttctgtaaacaatggatgtcaacctggcttttcttgtgatcttatgcacaggaacctaatttaggaaccaatgcttgaatgaatctccctttacatagcgtaaaacaaaatctaagaagcatgagacagaataatcataattttatcgattaggtatttaataaaaattttatgatcggaatattatgttacatttgaaggtctactgtcactaatatccgaaggtgttccctgcgtatgatccccaccgcgaacggtgttagagcatggacaatcacaattttctacattctgtaaatcatgatgcttgcctgcttgacaatcctcacataaatttcgttgcgtcattaaaatgcttgacaattcaagtagttaaatcttgcttcgacaactcctaattatctggttatttatgtccataggttcaatcgcattacaatttgctcacaaaagttgggttcaatggacaagaattagaatctgaaatccgtatagtcgaccgacgattataaattaatattatagtctgcgtttttgtttcggccgccgcaagggtcaaaagtttgactctaacgactgaaccgaggataagtttaatgagccttttaaaacaattgatttattgtataatattttagcgatagaatcatccaactgtaatctaatcttacctatctctttaattaatctaaaatagaactaccgaatgacttacaataaccctgtatacttttatacatgccgctgggacacgaactataagatgacccagatcccaatgatgataatggcttacaatatcctcctattcccttataccatccgctaggacacgaactatacgatgaccctaatccggatgatgataaagatttgcaaagaccattagctcctttatacatgccgctaggacacgaactataagatgaccctaatccggatgatgataaagacttacaataaccctcaatgcccttgtagaaaccactaggacacagagcctcggcagcctgatatggtaaagatactgcactaattgtagctgcagagatcagtgttattgttaacataaacaaaagaaggaacttcccgtccacggagatccataatttgaaccaagtaataaaatttttggtaatttccatattaatatactaaatgagaagtattggagattcattcccaaatttcaatacttttattttcttagcatttcagaagtatatatttgaattaatcggcaatccctcttaaaagatattatcgtcattatatgtgctttagaaatttgtctataaactaccagaaatgaaggaacgggagatttaatttccattaaagaaaaaagattatttaattaaccgaagacgttcgtacttggatgttcgatcttactttgagctgctcccgtagcaaagtaatcaatggatgctaattcggttgttgtaaaaccatcttcatctgttgcttttatttttgctaatagcgtatcttgtacatcatgtaggtatgcccatgtaccgccacccataactgaaatctgtccttcataataggccactttataaattaaatcctctaccaaacctgtcttatataaattcgtacttgctatttcggcctttagtgcttcaccatcattttttagatcagtgaccatcgcatcaagtccaccctgtatattgggagttggcttagtttttttgacaacttctccatctattatttcataatcttgatactttccaccctcttgattatatttcgcagtctgcttttccaaactacgaatatccacgagacaatcagcttcttgttgcaatacttctttctgtgttttgttttcggttgtaggtattgttttcattgataattccgaaagcctctgatccaccgcctgagaagtattgacaccatcatatccacaatctttgtattctttgctcttttccacttctctaatatcaataaggcaatcaacttgggcttgtgtgatattctctaaatctagtttgtcctcatactgctcgtagtttccaaaaagtcctaaatcgataccaccataggaagttaaatctgtattagaggaatcatcagaggtatcattaaaggagtactcaattattatattgtctacagttacgggagtcaaatatttgtcattatagccacaatcatcataattcttgagatgtcctgtctggttaaaagccaatggatacttttcttttttatctatggagtattcctgagcataaacaccctccattgtaataataaataatgtggccaaaactacaccaattataactaagaatttattatgttccatttgctttctatttccaataattgtccctcttgtcatatatatagttgattctgttccacattaataccaaaatgacaactattagccataggatgaatatcacacagtgtaagagaaataacgatattgtttacttcatctagtaacatcccttaaagggattacttctaattatcctactgcaatcactgtgaaagatgtattagatgaatttgtttcggccgcttgaaactgtttaaaaagtgaatttgaatattcataagatccaaagaatccgataattattatctgtgctcaccatatctataacgaccaactaagagatgttttatgattaatccctaaccccctatattagaagttggcagcatgctagtctgtttacctttggtgcggtcgttatatgatcattcagtcaagataaagtatcaaaataaaggtataacctaatttgttacatgtaacagggtaacgctacatagatatgaaatgacaatatatacacccatatatattaataagtaacaatgttacaatcaaaaagatataacttgtagatcatcaagtgagcacaaaaaatggatttttgttggatttgtagtgtaacttcttcaaaagttacaccaagtaacaagtaacatttaatcatattctggactgaggaactttattagattctgtcggttaccggctaataccctctgagttttgtcaggattgatcctggccggtttgtgctcaaacccaagaatgggagctaaatctttaaaggaggtcacattagggatatccatctttttcataatgtcgatagtgattgctatctcatcatctttctttgtatgcaaataaggtatcaacttatactttaagcaaaaatctagtgcggttatgaaactacttttgagacaactatctgcatcattggtgggggagaaagacgatttatgtcgtgaataggtatctgttatatcttttgtcatcatagatcttagatatgattctttcctgtcatcactttcggcactaatgagagactgatcctcaaagttatttatccaatcaggagcaggaatttcagcaaagctataaaaagattctaagatatcagctgagaattgttcccatttccttgggatttgatttagtttttcggctgatacatagtgtgaaacaaaatctcccaaaataccaagtctctctaggggtaaatctgcaaaggcgttttgctcttcctcgctcttcttctcagcacttgaaaaatgaattgatacaaatctacggttaaagcctgattcttcaatgagtttatggtttgatgtgagaattaagggacttaatgcaggaatctctgaataagtgttataagatatgaatttgccacgagcaattttactctcaactgatgtcttgatagtttcaataatgtttgtatattttccaaattgattctcagaaatcgatccactctcgttgatgagtgttggatatgtagacttgcttaatgtgttgcctaactttgcaacagtatctatggagctatatcctttctcaaaatcctctccagactgcctccaaataaatccaattagttgacccaaagttgattttcctgattgggattgtccatgaagtaatagccacggtagaaatcgacatctgtctctaagacattcatatttggatatatccttgttagtcttgattatgaacgcatacggagaaagtatagcccattttagaaccgttgggaaaatatttttattcttccatccattctgtgccaacttgtttaataactcgcaacattccttggcttcttctctaccgtaatctcttctacaggttggttgttgctttactagattgttattcaccaaatagaatccgggccaagaaatattttctatcgattcgactaatccttgctctcgcatagcagccaaaatactatttagagcatcagatgcctttgatttatttaggatcaaaccatcattctctaatctctttaacaaatcagatgcactatccacaggaccgatgttgatcccatttgagcattgaacttctaatttaggcgggatattaggaaatataggattatgatactgaataatcctttgtggatttatattgattaacgatttctctcggactataagaccatcatttaatttacctgacataatttgtccacttttgttatcgatgtaatatactcgagtatccggatagtattcatacactttgtataagcattctgagtggcgaattatattgccactaatttgagtaacagtgtgctgtatcatatttggaaaagcttgatattgagattggtaaaaagtattatctatttccataatcgattgtgtccctaatctggggatccctttgaaagattgacgatcgataaatttcttggcgtctcgccattgtcgttcaaattcctcatcaggtaatgggggatcgcagtgttcctcgttccatttatgcgacaaattcctaataagctcctcaggaactgtcccacgatattttgccatataggagtccattactctcaataatgcttcatgtctgttatgaccctcgaggattttaaaccctggttcaaataacttctcaataggaattctactaaaatctctctcagatattaaaccatatttctcgtataaaagaaacagtccctcttcaatttctttaccatagatctttggacttctagtcccaataatctcataaggatgtccgttcttgtgaggtgacgggctgcagtatgcgatcccatgacttcctaacccttttacctctatagcaggtatttcattattatgtatctcgttcttgaacttgaccgcgtcgctaccctttttctgaaaagtatgacgagagtaaaagtaaacatgtgccttgaaaggttgatctctatgttgttcgactatgcatatttgtgacaaatcattcaaacttgcaactttgaaaattttacagatttcgtcgattgccttttgattatccatatcaataaagactaacttaataccatccttatctggtctatgaaataaagtcccaggtattattgccattcctttcgaaaaggcgttttccttcttccatttttcgtgtcgttcaactggaatccgtttctcttgccatggtttccattcgactatatgatatctattcttagtatcaacaggggtaacgttaacacctataacattctgccaaaagtctgcccactcgttcattgtcttatcgttactattcaattacatgctaaacctccagcaaattcatccttactgtatagagtatttgaaatatctataacatattcgattaagaaaagtttattaaaaccaatttctaaacttgtattatttatcgaatgaccgcacattttattgccctccttaattctggtgatgtgagatatcaccagaatttgcttttcttattatgttacctattacgtcattgaagctgtctccagcttgtccgagcttctttaaagccaaataattatttaaatcaacaactatttgcctatatctattattgagatgtttaatatttctcatagttactatatataatttattatatttattaatgttactattactgcggcctagtatacatggccgcaacaaggccacaacataagctgcagtgattacatggctgcatttagtaacaccgcaactaggtcagcctgattagataattaaacatgctgttaatattcaacaagtgttcatgatcaaatatctgtataacgaaccaaaagcctttctataatagtatttgttatagcaaatctactatcattgacttttgtagcggccgaaacaaataatcaatcacaaaatctaatataatccggaatcaagatgacgaatattaatggtagatttagaagaggcgtatgattcatgtattgaagtcgaaggatggttgtttaaaacatgttatcatacagatgatccagtcttcgttataaagaagaggttttgtaaaatttgttataatttggctaatatattggaagcaactttaaataatgatagtgggtataaactccaatgaatatcacgagattatgcaaaacatttggagggaggtaaaagcataatgatttccgtactttcaggagggaaagcatgaaatggctgtagcatttgcatatggaccgccggagtttgtcataggattttttatcttcttcatactcctgagcgtaataatatgggcgatacgagcaaagatgagtagtagcagaaacaatgagccacagcaatactactataaccaacagcagcaaccatcgccgtactattatgatgatcgacaaactggaggatcgggatataactcctcagatagatcatacaatggatcaccagtaaaagatagttattcaggtggtaactatgataaggaacgatacgattccaacgggaggcgaatagtataacaataaaaatcccttaaacaatagagaaagtagatcctcttgcagcggccgaatcaaatgataaatctgtaagcaaatctaatctttcaaggtaacatctagaatcaattattattatggtgataagtatgacctcaagaaaagactccaagaccgttttgagcagacaaaaaactgacaagaatcctttctggattaacgcaatgatttgaggtatatcttattagtttcaattcattcctttggtgcggccgaatcaaaatataaacatgtgatcaagactacagtttaaaataatataatcatttattcagaaaatctatatataattcgtcttgcgatcgtgaataaaagtggcagatatagaagaggtttacgttcgggacttgtttaagaaatacaaaggacggccggaatataaagggctattttctattgggaaaaagattaatcgagacaatggagagatatacaatgaaggatttgctttagatgaagaaaacctcagaatacttaaggctagaatagaggctatgttgttagatgaaataaagccaaaacgagggaaaggtttaggaccagataaaccgatacagacaaaattgctctaactaatgctgctaagtcaaaaagtcataattaactattgttttagagataagccaatcgctggcatgctacataatatggaatattgcggattagttgaaaattaaattcattggctttggtgcgccgtcgccagtacctttagattgtaaaaacaagaatttatacctcccttttcaacaaaaaattcctaaatttgagaagtatattaagaacctaaatggcctataaaggagggggattacattttgtttaagcaaagtaacttaggaaatactcaatcatttatctaaaagcacaaacccaatcccatttctttttaaaaaatcacattgttcttgagtaatttcaaacttcagccgtccatacacatggtctctttccctctttatcccatctagtttctctagcattctgtgagctttggctacttcgaaaactgaatcgtattcaatcttcataatagtcagcatcatagtgcttacacatttctaaccaagtaataaaatcaaattctttgctatctctatctttaatcaatccaataacatattgagttcttgtttgattatttggagggggccagtgctttttcactctcggctctacgtttaaaaaagggccatacaatccacctcctaaagtcaacttggtacacctccagtggcgttaggacacaaggtcaatctataatatttgccaaattgcaatcaatagtctccagctttttcgttctctaaatatataagcatatattctttcgttgaattgttgatctggataggagcagttatcagtgtaaggattaggaaggtttcagaaatagttactaagcaaagaaccaatccactcatgaaaattcacggggtttaacgttagacgcaatttagtcaataacaaaattgtaaattattgaatcaggtaataaattagattgtatgactgtcctagattaattatggtttataatggtatttaaaaccatttacaggttttataagttaatgcagacactatggaagcgattcttaaactgttattgagataggtagagaaaccctgtaagaagtttctgagtcagttaatggattctaatgtgtattgaaaaatggctggccactgaatttgtcttaccaactgataatagatatatgtgttatagttattccacttaacacgatgctcaggttgtcatgttatataaatataaaggatggaggataagactttagtatttaccaatatttattagggttaaaaacccattatagaatttacaatgcaatctctagacgattttgccaaatccaatctagacaaattggaaagattggcagaaaactttgaatggatacataaacaacacgacaaccttaaggaaaaatacgataaaaaattcgttgctataaaagacagaaagatattagataaagatacaagtcttgacagattgataaaaagactagaaattagaaactatgatgaatctattgcagtagaatatatctatcaatgatatcttttcttttatgaatctcaggtttaatatagcatcgaattaaccctaaacccctattttattcaagaaaatatattatgtgacgattttaatgcgcggctcaatcaaagcagtctcttaatactaggcatagaattagatccatagacaaaagattaatgatgtttttcaagtatgaccaaatattattatgtaggtttggccccgatgatatcacaatatgaatacagattaagttgaaattagcgtcactagcgtcactagggcctgacgagcaaaacatgcaattttgtcaacttttctcttatctcatcaaattttgatatatcgggccggtaataatgtctgacaaatattgaattagatattcttccttgtagcagatctatcaactctgattccactccttcattcctcaagaaggtagcatagatctttctacagtacgacatgtagaatttttgattgttcctctcaaatgtcaaacttatcttgtcatagttcaaatcatctgtcggactcttttcaatatagtttagaatatcttcatttactaatgaaatgaatgccttcttagtcctcctaaggaatatggaaggatatctaaaatgctcaagtatttttttatcctttgataagtactcatccctttgtattgggtctcctaacatgttaaaggattctattgcctcgcccggcctcaagcctgtcaaaacattaaacataaagatatttttaaaccgaggataattagaaatagcgtttctaatccactcaatcatgttgctaaatatcttatcttgatttgtgatagcctgaaaacttgtaagagagtctctgcttacagtccattttaattggtatctattcttataatcttgccacttatcataacatcctaaatatttagataacagagccagtgatttcattatgtgcttcttcttatcattagaaaattccataatctcagaaaaatcacctgttactaataaatgataatactttcttgcatatgccattcgagttttcattgtcacttgattaagaccttgggatatcaaatattgtcggaatttgtcataatctatatccttttcgttaatagattgactattatcgttaaattgtcctctcaaggcgacgatcccgggatcaaatcccggccggagcatttttagttttgataataagaataacattcaaaatacgcaagataaaataataaaatcacgctatactattctcaataatgaatcctacgataataacgatattcatggatcagctaatcaaaattaatcttattaaattaagttgatctaggatccattcaatgtcagaaatcataatcagagctcacaattgtctcagagtcaaaaaaaggtaattaattttgtttcaattacagattatccaataaaccgggctattcccttcttattagaatgaagtgcgggatgttagatatagttgcaggatatgatgttttatattcccacccttgtactaacaattttttttgcttcctcaatatcggtgacagcagcaatatctacgattttttttctcagatatgtaggttttttggtatccgggatattgaatttatgcttgtgttcataaccattttcatagattggtttccagatcgtttttccggtgaccgagtcttcccccatatttaggaaggtgatcaactgttctgaaaatccagagcttttgcatatagtacattctcgcatctttttttgataaagcggtgttgatgcttccgcttgatttaatgtattagacatttttaggcgtaacaagatcgcatgttgcacttattaatttatgatttattaaactatgagaagcaacgacgacgtaatcaagaatcgatattaatttcaaatgcggtgtcgtactcatattagagattggacaaggaataggtatattcgagaagcatgcatattcctctattattattgatcaccattcaatcatgttgataatcaccattattgttacgccctaacgtgtatcttacgaacatacaatagtgcttgtgcaatatacattagcggcatatcattcaattacatcaatataggattaggaatttccaccaatatgaatttactatgactcttacagttgtttttaaaaaataaccatggtacaaatgatttttgataaaaatatataatggatttatgtgatagaacagttagttagcacaatgattaattttcttatcatagtaacgattttggttattatggctatggttaatgttctgcctacttcaagcgctcaaccaacctgggaattatatgaaaataatgcctgcggaatatcactgaaacatccatttgtttcagacaccatattagataacactggtgctgctaataattttcaaattcatagtttcaaagaccctatggatcccgattcaatgaacatgactttagcggtatcctgcatagacaaagcaattccgataacctatgaagtcatggaattagcgaaatcaagtttggtaaaggattctaaagctattgtttatgaagatatttcatttaatagaacaacaattgatggagaaacagcagggtcagtggcagttagcaagcctaccggatttgcagatattacagagattgataatattattgaaaccaatcattcgaatcaaacctttgtcattaaactaaattttgccggtgatgaaggtgttagtggattttataacaactataaatatttggcagacaatcttattgactccataaaatttttgaagtgattagattttttgcaaatattgatttgaatcataaagttattcattaagacaagatcttgaggtaaaatcataggtcatcttttcagccttttaacaaattcaacaatctcatacaccaattctgcctcctctttcagtatatcatgctccttgagatagtattcatattcattttccaataaaacgatcccacgatctaaatcttttccatatatgtttagcacacttcttagtaaagctgtgttcaaataatgatggtctccatggtcgataggtttgtcaaaaagaatcccaatatgatttaaaatattcttcttatttaagtccaatgaatgcagtataagatttgcttgggctataactacagtattattattattttgctgctctgattttatttgggtatagagtttatttttataaaaatcaaatgcattttcaaccacccttgagtagcgtataaaaccattaaggtaatcttcatttatcataattaagaaaaacagaagagcgtattaattcctatgtatccaatagagacaaccatatttcctgttacttcatataagatcaatctattcaaacttgatatgcaattgattcccgccctcataattgcccttcattggattttcattcaaatagagaaaagagaaataattttttgctacattttttaattcaaattatagtatatgttgttcattttttatttgtagaccacctatcgatttgaaaattcatcaaaggttctaaaaagagaatttttaaggctcataaattatataatgaatctctgctagaaagttccccttgccgtccctatagaatgaacgcgaattaatgaatgtaaccctacatattttttagcgcttttataagtgagtgaatgtagggagctaaaaaggcaatgttaggattgatttatacaagcactcctgcaatgaaaaataaactggttgatgtttgatactatcatgattcggaagatagtgccagataataaaaacagttaggatagcaaatgtgcaattccgttgatttgaacttggcgtagtctgattacgctgtaatattagttcatatctattgaaaattaggtagggttggttgttgtttgtttctttttggttctattaaacatcttcattatcttttcttttatcgagttattagtttgtgtcatttactacttatgtatatagagaggatctttgtcttaaacctttttatgattatcctgcatagcactacttttattttaaaaaaataatctcatggttacaaacaagataatttttctagtaaaaaaattactatcaatcacagtaaagcatcgtattaaacctaattatatacatattttcatttaatgggttatggctattaccttgtcatcatctacgttacccacaaattcatttatggaagaagatgaaataaggttccgtctggagaaaatagacgaatgtaacctcctgctaagaaggctagatggaggaacgcattatattaggtgggacggaattttaccatcaacgaagcactcagcaaagtcaaatctaaaaagaaaattagaaattaaaattgaatccaacttagaatatggcaagtttatttacttaagaaaaccctacatttctaaaaaaattaagatatgtggtagagatgcagcatggataagatcgtggaaaactgaacaattgacagaattagtttcaaagttatcattcctaaaatgaattaaaataattttgctgcaataagtgttgataatgacagaatattgtagatattaaccattattctctatttacaaacgggtctttcggaattatatctgatactttttgattttcaataacgcagtataaaattaattataattagctaaaaaacaaacaaattaaaaatcaaatcaaaaaacaaactaaacctaaaccaaatcaaattaaaaactgataaaacaaactgattctaaaactgattctaaaaataaaaataaaaaagattaaggaactgatctgctgtagagttttccttctaatgctagtttgtacatttctgctacataggggtttcttgcaggagtttccgcgccaagttccaccaaacgtgcgtataccctaactacataggccaaagcacccatgaaagctactactacacccatgttaaacatccagtggttaggtactgaaaatatttcttcaacaaaccaaaagtgccacatttcattgataccaatagtgaacatggtagctaaataaccgataatggttatctttagaccagtattcattgaattgtttggtcctcttaaaactggtactctcctgtcatacattgcaacaaatccccaacctagtgggagtgcaataaagtgactgtataaccaccaatgagctggtgtaaatgcactgtctctgatagctgtttgatgtaatgatccgtcaacaaagttgtctacttctactgatgcagcaatagaccctagcataatgaccatcaaatatatcttttttagcctttggatttctacttcctttggaattaatgcaggcatttgtgccattttactatcactgtatcttcactgattaaatatataagatgtgaactaaaatatttggaaataattctagcaattaatataacattattaaattattagactattagtcaattaattaactaaattttacacattttattagttttatcaagcttatcatctttgattatcatgggtgataaaaaacgtgctacaaaaaataaagattagtaattaggaaatggttatatttttattcaactcaaatgacttacccgaattttcatccgtaatctcataaagtattacatagtctcccgatggaaaagggttagatagtgtcacagtaaatggtataaacacttctttattctggtaatgagaaactatatttccaattggtacattttcttgactacctacaatagtaccgttagagtttgtcataagaaaactggccccaaagtcgatggaaaagagtggtgttccgttttcatccgttatatttttatactcaaatccaattggttcgatgtataatattattttttctcctggagaataagtagtagagttcctttcctcgtagattccaaaaccgcttggttcagttgtcacaaataaatccttatttgagtaaaagtcagttgtactattgctggcagttgtactattgctggcagttgtactattgctggcagttatcccctgagcattagcttgaccaatattgaatccattgaccaaagtgcctacggccgcaaggaacaaaagtgcaaataagaacacaatttttgatgaattatttttcatacacatttctttaattttgacaatttattaatataactataatagcaatgtagaactaaaattaatttaataaataatatggataagaggattagatgataagtctattagaataccttccgataataacttcaggactcttatttatggccatactcactcttgttgcaaatagaaagaatttgagattacagagcgaatatcaaatatatgcaagaatgattgaagcacggttgaaactagagacctcagagccttttattaaaatggcaagggaaagcccattttttgcagacagatttgctcttgtggatagtcctgatcaattttacatgcttagagctttcatagacctgtatgagttcatctatagacttcataagacacatgttattgatgatcaactttggctaaggtggatgtcttctgcaaaagccatgaaatccattcccaaattcttgaatgtatgggagaaaactaagtcggttcattcacctgattttgtcaaatttatcgattcactatagcagaggggtttgtctatattctataaatgaggtttacacgcttattcatccctaaaaatttttacgaaataaacataacaattatcaattacaaatccaatgtcatttcttattagaaaatcacggaaaatcgatatatttttttaaaatatacataatgtaaatggcaatacaacacaagaaaatcttatcaattgcaatcctagcatctttactagtttttagcttcaccgtttcatcttcaacggcaatatcctttgccactgaaggaaaccaggctacaggacaaaatagtcaagacggtaataatgactcagaaagtgaaataagtcaatctagctcaagcgctcaaagttctgaatgcttatcggaagggaagacagttgcaagttgcaacaacttaagtttccaagcaaacgtgaacggaaattctgatgacgaaggggaagcagggacaaaagccacagtcactccagagagcgaatcatcatcacccgctgtccaagccactgcagagccagtcaatgcatctgtctcttgcggagaggtaatcaaacaaagcgtcaaattgacatccaatcttgattgcaagactgacggtttaataattggagcagatgggatcacagtcgaccttaacggtcacacgatttccggtccaggtgtaacaacatctaaggtaggagcaatgttaagcgaccaagacaatgttaacatcgttggtccaggtattatccaaaacttccaagcaggagtattaaacacaggtggacaagatgacaaaatatctgctgtaacattcacacaaaaccaaataggctcatttaacacaggctcagctaacactgcaatagaagacaatctgttctttagcaataacataggtgtggcatcccattcctcaacagggactacgttgacaacaaacctctttaaagcaaatgaccttgcaggtgcaacattcgtaaactctgcagcaaatgtggtctcatttaacaccatccaaggatcagtaagtggattgttcttcgacggacaaagtagcgacaatacagtcaatgcaaacaacattttggataacactggtgttgatatcaacaacgcaaatggccttccattaaacgtgaacaataaccaattcagtgataacaactgtaatacatcagtcccagtcggcctctgcttaggcaaataaccactcttttttttgtttcgactcttcttataaaaataatcaaattatcaatttctaatcatcttctgaatgtttctcaaacgtttagtaaatagcaaaaccataagatcattctgtttatagattttgatatctcgcataactacacttacaaatcatctttgacaacgcgatagtatagttgatctgtaaatactgcagaccgcagatcgaaatcaaatattgaattattttgggtccaggtgtacaatctaatagtaactttatcccaatcgatatgaaaaacgggatgatggtttaacatctatgccatttcattaaccgaacaagaaaatttgagtgattcagggaaacttccaaagtggaagcttttagtaatttttgtgattttcctggagtatcaccaaacactggccatccaatagattttattaaacagccaataatagaaccatttttaaccgcgtgatacttatttgtagaatcatcatattctcgttagagattacgttctaaaatatctcctgtgctaatatttttatttattaaacgactttttgtataagatacacctttcagagtaaaatatgagtctggaggaaggaccaccaagtcgtatctagattcatagtctaccagattggaaggtcaattacatactattagtagtaacgtcatcatatattttagatccgattgaaaaaccaccttcaaaggtaatggtgtatggcataatttccaatggtttcagaaaatccgattatcacttgcactgttcctctatccattctttgtataacttttccaaagatttgagatctgctgttgtacataacctctaaaattgaacgattaagaaggaaatgatagttttgttccttggcataagatattctaatgagagttcaaagggagcagttggcaaaaaataagaaatatgatcaccatagaaagtattagagtatttgccgttacactgaagcgatcgtttgagctaatttcgaatgaggaaaccaattgtcaaaaggtaacgcttatttgtatgatttacatataaatgattttgccctcaaaagacattacacagattataataacaatatctcaatatttccatctgtgaattatcattctactgaatcaatcgcatccagatgatcatacaagttaactttcttgtgtttggttttattatatatatagagtagcagaagttatagattaatagagtctacaaattgtaaatttctctcatcgattgatacatttgattcgataaattattatacaaattatgttattaaaatgtggatgagcggcattgacactattgtaaagagatttgatgaatttgaaaactctatgagggaagggttgcccaaagtggaccaaagactgattattgatatgctccacagattaaagagggatgactcaccaatgtatactatagaaatatttcttagagaaagaccaagtgcggatgaagtaaagtcaattatctcagagggtttgggagtaatgcctgcattgtatgatcatggaactcatatagtagtagcacatcgatttaatttgcagatgcttgaatatatatcaaataatttgaatgtggaaaagatccgaggaacatttacgggatcgggccgtggtgcttctatagggcctgtttttgaaagagacgataaaccagattactagttgaaagaacaaacgagtaaaaaaagaaatctatattcatcatattagaataatttttctgtgtttggtttcaagtagattaaatcacattcccttttagttttttggattcattgttttgatcaataagcatcaaagtaatggataacaagttagtcgaataataggtgttgatgcggatcttgatattattatctaacaaatatggcatttaaaagaaagatcgctgatcataccctactttctcttttactctctataacactaaaaaatatcaccttattgtgattgctgtagtctatcgctcaggacagcatctaggtctcatctaaaattattattcaatctgatattttttaaaaatcaggatatcaaagtaaatcataatgtctgattagactaaaactaagagaatgactatattagatctagattgtattattttctaattctgtttaagaatagattatctcaaagataattgacatctcaatgaattaatttctgtgtgcaaaaacaatttaaacatatgaacttggtctgttgggtttcatgagaaatcattgaccaatagattgtcctttcttaacccattataatactaatactttaaaatataaaagtcgaaattggattaggttattattaatttgagaataaattaaagtgaattgattttaatatctgaccaatttatttagtttgaggatttatggatgatgaatttactttttatgaactaggatcaaaatttcctctaatggactctattttaataggatgtcatgctgataggggaataatcccccatgaatgttgcgaatataatattatttcagtatatgatgataacatgatatgtcctcaaaatctggtctcagagaaagaaccgaatgtattaaaaaataaaaagagagtttatgaagtcttgatcctttctgcttatgaatttataaataatccaaatatcaattataccaaatttgttcagatgccgggacaagttttaaaatccaatattgttaaccatttttttgataaatgtgacaattacaataaatccttcaatttcgtgttaaaagccaacattattaaaaatatttgtgaaatcactaacttgctgggtttacttgctagagaatttgtggatgaaagatatatttcatttcaattaaaaatgttatcgctaaaaaccttagagaattttattcatttctacctaaattcggaacacagaccatctcatctcaaatatcagatcaacttggttaagcaaaatgaaaatttgaagactagggaacatattgatcagctgttagaatatatgggaactaatcgagcaaatatttcttcttatacgaggagtgaaaaatcattaaggtttttaacaagagatgaagactttagaaaaaatagaatattatttaataagttagaattttttaaaaaaaaatcaatgtacgtggacggcattttactaattgacagttttattctagataaggttcataatgaacaattcattaaaaaatacaataaattattgaatcacattattgatattcaaactcaagaaaaaataacaatgttaaaggaagtaaacttattactagaaattaataaaaatctaatctaaagtaattattgaatcactattgcttgctctagtggttcaactgttttatttcttgccctcaattttgctttatactttaagtttctcggtttagttcttagcctatatccacagcatgggcaccataaaccatcccattttatgaaaatttcacaaatttggcatcgtttttgaccgcttgcgtaacggcccgaccccaccggcttttgagctttatgtctgatacaaatacctttacaagtcatacttgaaaaccatatcaatgtcggcgatctcacttataaacttatataagcttcaatagatatttataactaaataaaaaatggagttgatatatctagttggtcaccgatatattctttggttgaaacagctcatgcatagtcaagtattcatctaatttcatccttatgtcatcctctgtcgtgtcatccatgcctgagaatccagccttaaaattaattttattttgcgaaatgtttacatctgaaacttccatatctgcataaacatttcccatttcattaacccattcttgtgcttcgttcgtatcaaatccctctgcgtctatatttacattatacatcttggtcacattataccactgctttttttttatttaggatattaataaagatgacgtaatgaactgtaaaaagcaagttgatttgctttcattttttttcctcaaatccccaatgtttcatcaaatctttttcaaattttgaagcttgatcctcacttagagggtcgccacaatttttacaagaaggtaccaccttcataccgtataatttaaaatccacatcataaaagtggatttttgtgcaattacacattttatgtatccgtatagtcggtttgctaatttatctcttattacactttagctaggaaatggaaaattagtaaacatttaaagagcaattatgtttaattgtaacatacaaatggataggaaaaaaacggtaaataaaataacagtattttttctaataactatgcttggggtatcgttcatgcaggtcaatcaattgattggaatggcttttgctcaatcagaaaactggtatgtaggcaaaggtgtaaagccagatacgtattatacttatgaaattaaaaatacagatactaatcaaggacagccatttacaatgactatttattttaaagaatataatgaaacaggaaaatattgggtagctccaacattcgtagtagatcagggcaaagtaatcaatggtacattccatctgagtaacttggatcttactgcactgggatcttcaccaattcccccagagatgagtgaatatcgtagtgcttattcaacaacattaacatggctagcagcatttgtaccaatgcctggacaatccttaagctcaccatcttggggaaaaattgcctcaattggtggtcctgaaattaaaccaggaggcaacgcaaaagtaaccacatctgcaggggcattcgatacaagaataataacctatcacaagggagttgacagtcacatctacataaataaggatttaccttatcctgttaaagctgaaacatatgctgatgtaactttcggtacagctcctattcagtacagttatgagttaaaacaaactgggagtggtgaaccaccattaccagagagccaaatagaaattccggtaccaccgttaagtctcaagacaccaagaggaacccacgtagtacaattattgtgggaaccagtggcgataaaagcaggcaatgacacgaatttcggagtaatatttactgacgacaagaacaacattgttgaaagagttacatatggttataaaataacgggtgaaaataatacggttatagacgaattcaaaaatcaaagagcaaatgaaggtactggccaatttgtgtataaatttgacacaccaggagataaggcccttcagatcacgttagaaactgcatcaggtgaggatctcggaatgtttgttgaatctgctacatttaaccttgtagtacaataaacgaaacttttttaaaaattttcacctttctttttaactctctcatagtaaacgttggataataaccaattaccgaacctttgaatttcatcatctattttggtccaaagatgaaaggaacccggtaacaagtcaatgcgggaattatttgagtctgaatccttaaaatttatttttaggccttcctttccctcatacatataagcatcaattatttggatagtcctagtgaattcctttgttgcttgaagttttatttgttgcctgtctattgggaaagtttttctaaatttatcaaatataagactcaaattttcagtcccaaaatttttaatttcaactatcttcctacgatctggaaaatgaatttctacgactagaccgtacctggatcccacaaaatttgataattcgtttagcttgtagtatgcaagcgtagggttctgggtaacagttttctgaaaaaattccatgttagcatcgatattatttttgagttcaagcaacaggttagtaaattcatccacatgtatgttgaaattaaagtttaataaataagttaaatgactaaactttaccctataatgttcgcgtccgacagagattctgaacgagccactagcatcgaagattaccagaatacatgtactgaattcataactgatataagcaaagactatcgtgattgggtagagagataccagcttccaaaagatgaagaggtgcatagaaacgctgatatcaatgatatcgtaaaaaaaacaaacgagtgtatattcaagtttggaaacaccataaaaaaaatcgacataatcatgaatgatggaatcaacaagatggccgaaaccactgcaggatatccatttcagatagatgtatctagtagtagtcaaaaaagatacatacttcatgagaaaaggtccataaaactcaacctgaggtcttatccacgtcaaaacagacgggtcagggtttgcaactatgacaaggacaatatttttctgttatcgtctagtaataaaatagatgtaaagtacagcaagactagttttgaggcttcggacctgcttgatgaatttatcataattaacccaattcaattcgataaagaagaggttatttcaattactattaaggttgaggaattagaaaatgatatggttaaagaaagtcgtggttatactacacttttaataacaagataataataattggtaaactaagaaccgatctttagattttttgcacaaatgccccgcagacattctattgctgacaggatcgccaaatagctagttttaggattatcaggactagtcatattgtctaccttgagctggaaacttccaaatttccacttgacatttatctcgtgttgattgtttaatattttcggatctacaactatcttgaccctggttttttcaaaaccaatgcctgctaaactaactaatgcggagatattaatatttgaagggaattctttgatagcatcaatggcattatcatcaaaaataacctgcttttctttgatggtatcgatatcaacacctctattgtaaaaatatggtgcgccttttaatgatttgatgctttttgtggttacgatagtaacattctcaatatagtcttttacactacgaagaatatcagcgccaccaatcgcgcccgacggaaggaaaacattgcgatcagtatcagccaataattgaataatagttttataaaatgtcggatcagaaaaagcacctatactcatcatcatgatgtcctttccttgttccagtattgtagtcatgtatgtttgagcagctttaatcgacgcagcctcaatgacaagattaacattttggtagtcctttgatgtaataagttcattaaagtcattaaaagtacttgacggtttggcatttaactcattacatagatacgctatcttttgagtatctatgtcaaataagattgataacttacagtttgggattctcttagcgtcaatgctacgtgctatttctcctccaatagccccgcaacctattattgcaacttttatatccaattataactaaagataaaaaaatcatttataatcattatcttctggtttgatccctttgaagtccctttagatatttgtctaatccaacttcctttaattttgagttctttagcttgacttcctctctcattttttccttgaattgattcattttctttagcaataacggatgtgagatagataatattgaacatgctaaaataccagcattctttgctccgttaattgcaacagttgccacaggtatacctggcggcatttggattattgataagagcgaatcaataccattaagaggatttgcagaattattaataggtactccgataacaggtatggatgtcattgaggcgaccatgcctggaaggtgagcagatccacctgccccactaattattacttggataccgcgtgcttcagcagtttgagaatattcaaacaattcaactggtgttctatgagcagagactatctttacttcataagagatcgcaaattgatttaatatccgagcggcttccttcattattggcaagtccgaatcgctacccataattattccaactatcggtgattcatttttttctaaattcactggattaccaaggttggattggtcctcaaatttatttttgctattaattttatttaaattagatcttgacaaagaacttaaatgatcttattactagtggaatttgagtttttagatctaaaaagatgcttcttggacttttaaagaatcttcaacgttgcacttgactgaaatgggatccatgttatttgatactatcgtcacgtgaccgagttttctatttggtttcgtttctagtttaccatatacatgaattttagctcctggaatggcaaataaatcatcaattcctgtgatatcatatggtccagtataattgtcaggcccaaggatattcaccattacggcattagataacagggatggctgaagaagtggataatcaagtatcgctctaatgtgttgctcaaattgggaaattgaacaggcttcaatagaataatggccggagttatgaggtctgggggcaatttcgtttatcaatacattgtcatcctcgtcaacgaacatctcaattccaaaaattccagatccctttaatgatttcatagtcattattgccaaatctattgctttcctctcagtttccttgctgattctagcaggaattatagaagttttcagtatatggttttcatgaatattctcagcgataggaaagtaagaaatagtcccagataaatttctggccaccattatggaaatttcttttttaaagttcacgaacttttctaccatgcattgacggccggaaaagtggataagagctttacttatttcattttcggatctaatcaaataatttcctcgaccatcgtatgaatcttcacatgcctttaataatactggaaacccagatatcgaacaatagtttattaattgttcttcgtttgaaactagttcaaaattggggactgcaatcctgttatctctcaaaaattttttttgacggtatttattttgaatgattgagagtgtttttggtgatggatgtaccatgaatccggatttttcaagattattaagagcagtagcattagctaactcaatttcataagttataatgtccacctcttttgacaaatcatatattttttgctcatcagagaagtggcctatgattagtttgtctgcaatacttgaagcaggacaatctttgctgggatctagaatgactaccttcataaacattcgctttgcctcagcagccatcatctttccaagctgtcccccaccaataatacccaatcttactgggtttctaattgaaaacttgtctttgtataatgtcaacaaatgaacctatcaaaaattcgtgcagttaaatttaatacacacattctatctcccaactcgatttatttcacaaatatttttatcgcctggggaggacagacattttcacatgctaaacaaaaaatacaatccttttctctaatcataaatggcttcctctcagatgctggatgacctggtgtttccagccattcatatacattaacagggcatgcctcaatacaagcaccatctgaaatacaaatgtcaaaatcaacacatacatcagtaccccaaattccaagctgtccaggtgcatcatatggaccccatacttggatcccttgaaatttgcctacaggctgtcttttagatttaaagcccgtatctataggtccttctactgcttgatagtctgttccagtgcctgtgagctgaagcgtggtattcgcagaaagctttgctacattggacgtaggaattggagacggcacagcaactgattgattctcagttagattccctacggattgctttcctgctgttgctgctgctaatgcggttgcagatggatttactaacgatttcttctcatctttaagattcttttgagtatttgctagtggagtaatagattctaatttttttattgattcggcctggctcagtttttggattttctgataataagtaattaatttctgccctatctttgtattccgaattatattatcaataatgatcttagcattatgatcagccttttgtctataatttctgatccaataatggtcaccaaacgtttctagtggttttatctgataaattatgtccaatacctcaccaatgacaatttcgactgttacgtatagctctacagattgttctgtatttgtgtatatatcaaaacctttttcaatccatttagaagtcacaaaaatcctatcggcataagtatccaggacgtaaccataagtcttaagttcactcataactccatttacctcagactgcccaataatatcaactggcaacctaaatataccgagcttggcaccatgagttggataaacaccccgttttgcaacttcagaaagcattacccagactctatcagatagcaagagggacattgactataaatcttttttattcaagatattaaaacttatgtatattcaaatgaataaattttagagattatccggacaggtcatctctcttatttcatgatattttttttccattatttctgctatcgtagtaacgtactctaaatcgtatttggatttgggataaaaccatcgttttacgaccttgtggcctgtaccttccatatcataaatcatacctctttcagaaatcactttactgttctcatcagttatcgtatctctaacctctagaccacgtttggttttatctaccaatagtagaaattgagaatcttctaaaataaaatagaattttcctttcttgatcagtataggttcaggggttggattagtagtttcaccagacattaaatattcggctccatatttatttttctataggatttcgtatcatgttgccccattccgtccaggagccatcatagttttggactgatggatatcccaacaaatattttagaacaaaccaggtatgggatgacctttctccaatcctgcaatagcaaattatatctttatcacgtgtaataccttgcttttcgtataacgcctctaaatcttctacggatttaaatgtcccatcatcattaatcgcttgaatccaaggaatgtttttagcacctggaatatgccctcccctctgagcatgctccattggatattctggaggtgcggtaatctccccattaaattcttttacagatctaacgtcaaccaaccctacttcctgctttctaaatgagcgtttgacatcgtccagataagctcgtatactttcatcaggagatgccgctacataattcgagggtcttgcaactggttcgtccttggtatatggtcgattttcattttcccattttttccttccaccgttcattattctaatttttttgtgaccaaagtacttgaagacccagaatgcaaaagcagcaaaccagttattaaaatccccatataaaatcaattcattatcaggtattacacctaaacgtgacatcaactcttcgaattgttgcttgttaataatatctcgtgttgatgaatcgttaatatcctttctccaccataccatatgagaattcggaatgtgaccctctttgtaggcattttctacgtcgtaatctacttctaagatctttattttatcattattgatattattattaacccaatcggtttcacaaagcacatcttgattggcgtattgattaatcatcagtaaattatggaattcagctatataatagatttgtcgcaccaacagtgttataaaaatgactttaaaaacaataaaatagtacgataaaatatgtttgagtaaaacaggctaaatgggccggtagtttagtctggtagaatacctgccttgcatgcaaaaagcagaggatacgtaggtggtcgtgggttcgaatcccacccggtccacgtctatttcggtgtttaagttcgattatgatttaaaagtatcttttacaatattaccaatagtactgcaaagacaaacgccaaccaatttattttcagaattcaatattatatacgaattgcaattacttatggtttatctgacaattatctagttattgatggctatggcttttagattataaccgtcagatagccgtcagatagccgtcagatagccgtcagatagccgtcagatagaggccaatactattaagattaaaagggcatctagtcctcaacacaatctttgatgtgtatataatttattgccattcatattgtttttagatgaaaataatatcaagttaaatatcaaatgggttaataatatgttggcattttctttctacgtccatccatcgaacctaggaattgagccctatcattgaattaatacaaaagctagctttcggattttataaaaagattttagttcagagtagtccaagtaatatcagtgttaatatcagattatgtaaagactgctgcattctacattttctatgtagtttcatttctaatcatatttcaaacttcaaatgcaattatgagtgccgtaggtagtaccttacaagatcctgatataaatttgattgacaggtcagatatgtcttttcaaacgcaggatcaaaatacaaatgatctgaaaaagcagtttgaatcaggcatggaagaaagtaatagagataactggatatttgtcaatcatgatatttatgggactaggaacagtaatcaaactcagattgaccaatctaacgttggagatctaaaagttaaatggagactgaataacacttatgaaattcaagatccaccaataatagtaaataacagtggttattttcaggattacattggaaatatcattgcttttgatactctaactggaaacattaaatggaaactcaatttagatggaggtccgacaatgggtctttatttttcagatggaataatttatgctactatcggaactaaggctaaaattatttcgattgactctacgaatggagaacaattgtgggagtctccgatattaggagataccagtttaggatatgccataaattcacctcctttgatttggaaagattatgtaatcgcaggatctggcggcagtggactgccacctggtaagggttttgtgaagggaaacattaccgcgctgaataagacagacgggagcctgttatggaatattgaaacaacgactggagaatggatagaaaaaggtaaaaatccacccaacggtggagcaacggcttggtcaggtggctctattgatgcagatacgggaattgcatatatcccattgggtagtgcctcccctaatttcaatgcctcaacaaggcagtcacccaatctttattctaatcacatggtagcagtagacattaagcaagccaagatcatctgggcaaccccatttattgctcatggaacagtattgaacctaaaagttcccgacactcatgattgggatacgtcctggggaagtagcgttagcaatataaaattcgaaaatggctcgtcaaaaaaaatagtgatagggcatgacaaaatgggcaatgtaattgcaatggatgctttgactggggaggaaatatggtggacgacattgggaagacaagttaatattgacagcctaccatcgccatcagggagcggaatgatttgggcatacggagtatataattatcatgcagtagatgatgacactttatatataactgcaactaatagaggcctgaatttctttactgatgggataagcggacacaaggaagatcctgaaaactcgatagagcagggattagtcaatggtaccatatatgcactagataagaaatcagggctcattaaatggaagattgacacaaattatcctccccgggtctcacctttggtttcaaatggggttgtttacacaggtttcattaagtttggcgaaaacgataggacagggatcattatggcactcgacagtaacacgggagaaaaactgtgggaatatgatgttcgaggttccatctcaccagtcggagcgtccattgggaacggaatgctatttgtacctactgataaagtcaatctatatccaaacgaaaatgatgacgtagagataagtggttcgatagtggcatttatgcccatcaaagagtaagtaattgatttagcccttatttttttcatctgtggagcattctaaacaacataacgaaattgaatttgatttgttgtttttatatttgatagtacaattcttacattgatcaaatggacaataatcacattttctaagttcattatcacaaatcattttcgtacacaatctacaataactaaagtgcttattgcaaattgtattattacaataataacatctatttatttcctgacctctggtcatgtcgatgtttttttcacatactatacagacttttttagctggaggcatttatgatcagattcctttcttgcattgtattaaatatagtaaattaacggttaatttactttattcatataaccaattgaggaagcgtaatctcagtgaagaattatccgagatattacaattggttgcggtatccacatgaatgactcttcagatttaaatattgagcgatatatcaattcaaagagcagtataggaaagtcaaaatcatactatttgtttgtttgtttgtttgttgcttgtttgattaacccttgattacatgtaggcagcgggtcaaatcttatgtaaagcaacaagatcttattaacatttacacaccttgtgcatctatttgagcatggatataggcagattcagtatcgtatagattaaacataaactagaatctaattgacatttctatctaatctttatggtagaagtaaatccccgataagatttttggttttattgtacggcctcatcttaagaattttaaataaattaaaaaagccatggaacattgataatgaagaatattatgatgatttctatgatttctatgattacgttgttttcaattataaataccaattatgtttttgcagataataaagatccggatactcaacctaaggaggacacggatgaacaaggccaagagcttattcaagataattatcaaaacaatcaatgcagggatagtgcaaaatgcgagaatcaatcacttgagcagctgaataatcaggttaatcaatgcagagatggtgcaaactgtgtaaatgaatcagtctcaaacatatttgtgtgcgaagagcaatccgtgtgtttgatacaatatgaaggaccattcgaattgctaaatccctattaaaaaggccttaaatctcaaaggtcagtttcgttttatacgttgaagagttttttaatgaaaattggtacgaatgtttctagcatagtctttagaaatctatacagagatctaaatctgtatcttaccattttaaaatatcttataattgttagaagttgtctgtggactgcattcattatccctgttagaatccagtctaattccggccgttcataaaatctatataggtcgtttttatgaattcaagtttaaggtaatcgactcaaagatactcggctgagtaattttcaatgagcttgtagattcagtattaaataaaaataggtgcatgatattattaaaatttgttgaagacaggaacgaatcaagcccatttttaattatggcttacagaagtagagtccaatacaagcggcacttgttacaactcttacttatagtacgtgtatgtttttgactgattaagacaataagactctgttgtgtcattctcatttcattccaaaggtttaaaaaattataagaacccaataatattatgatggtacaacaattaatttgtgaccagtgcaagattgtattactagagaaggattcaaagcatttgaataatgaaagattcccgataaccgaggaggaagctaaaatgattgataaggatcacagaggtcacgaatgtcatatcgaattggttgaaaaatttggatagaatctgccaatcaaaaacaaataactttaattagaaataaacagaaaagagattggcaatgaagaaaaattttaatgatattgatgattaaaaaatgttatccctcggagccaaatagaaaaagtagtataatgcgatagtcatttatctaaaaaataagtaaataagtgtagtaataaatttacgatctaaagaactctgctttatgttcctcactacagaaataatcgatctttcttacacccagatttgagtcaccatcaacatgaggccacgcctgattatgttctatttctcggccacataacgcacaatgaagtatccttttgttgtcaatatccccatcatctttaagattatgcattggctgatcccatttgagctggaccttatataatctagaatactaaacaaagaatttatgtaagtctagcaaagtagatagatatattgtctttctttgggaatgcatcaggtaataacagtaagaaacgaaataagtacaaagaattaacactagccataaagcaaattgtgcttgaaaggtcaaaacacaggtgtcaggaatgttcaaagaaattaactggatcaaatcaacctcactttctttatataaatggatcaaaaaaggataacagaccagaaaacttgcgggctctttgtcctgaatgttatgaaggtaattctcaaagtaataacggaaatatgttctcctcattcaaaaaaatattttcaaaaccatagtttcatttttataccctttttaaaaatttttttcactttttaccagttaataggactagctcaaagtaaatgatgctttcatgaaaggatgtaaagtacaaaagtattcatactctgattcggttagagaagaggtatccaggacgtatttcttatctgtcattattatggacgaatcaaatgacttgccatcatcaacaaaactagtcactgtgtgtggaacattgtctaaattagtccattctatagcttccccttttttggcttcgattatcgctggctcgtaggcgggatttccttgacccgaagcgcctgcggggattgtggcagaaacaatcgtggtattgaccactttgggcatagaagaattttgagaatcagcttccgtgttttcatcctcctgagttgctgtagcaggtgcccccatccatacagtagaaattatcagtgcagatcctattatcataactactacacatgccgcggctattttcattaaatgagcagttctcctataagaagcgattattattattagtgaagggatacttattgtaagaataatggcgataaatgaaataatcgaaggaaccttgctgctgacttgtacagccccaatgattccagcagttatgaataaaatcaatattatagccgctgcagcttttgatttttttgaagtgggaaaaccatccttaaacagcccagcactcaagaaaattaatccaaagaacattaataagattgaaacggcgtgcatcccatccataaaggttttagctattccagaaagagctacagctaccccaatggcaccaacagctgttaaaccagcgcccggcatgagcaagtcccagtctgtcataaatatattaaaaggtgaatgcagtataattaatagtttctttcttttaattttaaaaaccacaattctgcttcaaaggtaaaagcaacggataataaatgaatcactcaagtattttgattaaagttagtcaactcttaactttagagcatactgtaaatttgagtattccacatgaatcatgcgcggtgttacttggcaagaaaaaggagaacgtctatgaagtatatgaggtaatcccggtgagtaacaaatacacttcagaggtcagttttggtatcgatgaaaatgaattattgaaaatttataaatatgctgaatcattaagcatttcggtcgttggcatatttcattcacacccctccaggccctttccatcagaaaccgacaaggccttcatggaaatcaatccagttccatggataatcaaatctacaataactgatgaaatgagatgttttatttccggtgacatattaaaaggaaaaattgatggtattgaagaaattaagatgactgtcgtcaaggactaatccttgaagtatcccgtgggtacaaaactgcctctctaatattattaagtcctaataaaaccatcatcaatctatcaaatccgagaccacaacctgagtgtggtggcatcccccactcaaagactctcaaatgatctttaaagttatcagtagataatccttggtctgctaatcggctttttaatttcgatacatcatgctgtctagtccctccagaaactagctcaagatgaccaaattgcaagtcaaatgactttgataaggtaggattagattccttctcgtgtatgtaaaacggctttagactgagtggccaatcaacgataaaataaaacttgtcaaatttttcccccaactttcttaacgctgaatcagataaatcatctccaaacgtaactttttctccaatactggctagttcttccaaacatttatcgtaacttatctttggaaatggtattgaaattaaatcatttaatgtgtttccctcaaggagtggattttcattgtcaacataattagaatctctcatatacatgagtattttcttgattaattcttccattatactcattatgtcataataatcaagataagctgcttctagatcaacgctcaaaaattcattaagatgtcgaagagtatgggaattttccgctctaaaatatggtgcgatttcaaatacacgatccaaagataagaccagctgttccttatacaactgagggctttgagccaaaaatcctttttgcttgaaataatcaaatgaaaaaaggttggaccctccttcactagcacttccaatgatttttggggtattcacttctatgaacttattttgagagaaaaaatctctaattatccttaaaatattagaacgaaagagaaagattttagaaatattgggattacgcaaatccaaagctcgactgtccaacctagtatccaaaagtgattcaactctgcctgtaggatcgataggtagagagacagaagcatatgagaaaacaaatatttccttggtctttatctcgactggaaaattcttagactttgtaccttgcactaatcctgttagtaaaatagtactctgtctaggaatagatttagctttttgtaaattctccccgactaaaactgtttgaatcaaaccggttacatctctaagtaatatgaatccaagtttaccgatatccctgaaatcctcaatccaccccgcaactttaacttctgaacctatttgtgactcttgtaattgggaagcgaagtgtgttcttgttatgctgtttgattcactttgacctgagtgagccatatcaaatgaaatcaatcaactccttttaataaactacctgttcaatatcagaattcaagctgagttttcagtcaaactcaattataagatcgatttgtctaactgccatggatatctttttaatcgtttctaacctcttttcatctactcctttgatattcttttccaatacaactcttgtcagcttactcccatccggtaaccagacaaaatttacagtttctaactttataggatgaaatagattatcgagaaatcttcgatcattagaatcagattcaactatccaaatatctttgtgaaatgctttgtttatgatatcactaagatcgttatttgagcgaattaaccttatatcagaatttttgaggattagtatatgttcattatcaatttcttttgccgatactagagtgattttatttatattagggtttttttgggctagtcgagcaaggataatagagctctcaacatctgattgagtgatctgaccagactcaagtttgctttcacataaattacacaaaatacctgttttagcatcaaaagtacaaataggagttttcagtaccacttttaaacttaataaaagaatacacttaaatatctttaatcctttttcatgtaatttgtcaaaaactttactagtcggaatgaaaaattcattttttcgtcaatatcatcgatgtaggaaatgaatgaaaatttgtttgtatctgactcaaatttccagacggatcacgctgctttacattaaaagtagagaatggtcatgagcattttggcaaatatttaaggttatttggcagttttacattagtggtggtagtcagataaggttcattagtagagggatgtcggagtgcaaatacccgtaccctaattccattcgctactgtaaaataagtattctctctggaccatatcttttcggcaatagttttaacatcaaaaatatttccactaattcctacttgtataatgatcccttgttcgttttttttaacacaggttatgagtaattctgtcataaatctggaaatcaaataaaatagtctgattaccaataaaatcgtttaacacaaccaaataaggaccattcttacataagaaatattataaagcaaacaggaaaataaaattatgatgattaaacaaaagcctaatactctgctcaatcaattaagaaagtaatttgatatgaatgagagaaacaaaaacgatggaatcagccctaacaaagatttaacgggattatcagaagtcaatgatctttctatagattatagaaccagatcgggaattttaagggctgtagataaaatttcgtttaaaatgaatgatatcaaaggtattggcataataggagaatctggatcgggaaagagtacacttggttatggtcttatgagatcattgccagaaaatggatccgttgtatcaggaagtttcatcttagaggatcaagacattttgaaaatatcggaaaaggaattcaatgagaaatatagatggaagaaagtatccatggtgtttcaaggttcaatgaatagtcttgatccagtgtttactatagaagttcagatgaaggaagttttatcctctcataggaaaaaaatatctaataaagattgcatttcaatcatcagatctgctcttagggatgtcggcttgaatcctgacttggtttctaaaaaatacccgcatgaactgagtggagggatgaagcaacggatagtaatagccaatgctttattgcttgcgccaagaattcttattgcagatgaaccaactacagcgttagatgtagtgattcagtcccaagtattacacttattaaaaaaattgaaagaggagaaaaacatgaagataataatcatcactcatgatatgtcactgattccaaatttagttgatagagtaatcataatgtatgcaggacaggctgttgaaatatcggatgtcaaaacggtgtttgaaaaaccgttgcacccctatacccaagccctcattcaatcaatacctcacataagctcctcgcagaaatccatcaaattcataaaaggagatccccctaatttaacagaaataggagaaggttgcagatttatagacagatgtccccatgcgtttagagattgcaaaaacaatccaccagatattctaattggtaataacttagtaaagtgctggttgtacaagaataaccattgattttattattagctaatcattataatcccaatagttttgtgaatattatttttggatattagtttatatcttaaaatatagaatagtaaacattaatgcaagctcttctggacgttcgtaagattaggcaggattttccaattttaaatagaatgctaaataacggaaaaagattggtatatcttgataatgctgcaaccactcaaaagcctaatgaagtaatagatgcaatttgtagatattattcagagtataattccaatattcatcgagcagtttatcaaattgctgaagaagctacagaggaatatgaaggagcaagagaaaatgttagaaaattcataaatgcaaaacaccaagaagagatcatttttactcgaaacactaccgagtcaatcaatctagttgcttactcatggggaaattccaatatcaggaagggaaatacaatactactgaccgaatatgaacatcacagtaatatcgttccttggcagatcctatgcaagcgtaagggagcaaaaatcaaatatttagaggtggatgaggatggatatctcgacctagaggttttcgaggaactcctgtcaaagaaaggtgatggaaaagttaagttggtatccctaagtgaaatgtcaaatgtcctaggaacaatatttccagctagggaaattatcaaaattgcgcatgaaaaaaatattcctgttgttttagatggggctcagtcggttccccacatgaaaacggatgtgcaagaaacaggatgtgattttttagcattttcagctcataaaatgcttggcccgacaggtgtgggagtgctgtatgtcaaaaaggcaatacttgaacaaatgaagccatttatctcaggtggagacatgatcaaagaggtacataaagaaaatacgatatttaatgatctgccttatagatttgaaggtggaactccaaatattgctgacgtaattggatttagctctgcagtagagtatctaaataagatagggatggataatattcgtgatcatgaattggaaatgactacctatcttctaagtcgtatccaagaaataaaaaatattaaggtttatggtcccaaaattgcaaaagatagaggaggcttggtctcttttaatatcgagggaatacatccccatgattgcgctacaatattaaatgattttgggatagcaattaggtcaggacatcattgtgcccaggtgcttatggaaaaacttgatattgtagcatcttctcgtgctagcctatatatttataatacaaaagaggaaatcgatatattaatagatgctttaaatcatgctaaggggatattcaatatatgagtgaagatatttacagggagatgatacttgaccactataggaatccacgaaataaaggaaagattgaggaacctgatataagaattaatgatagcaatccactctgtggtgatgagatttcaattgatctgaaagttgaaggtgatataattaaagacatcaagtttgatgggaggggatgtgctatcagccaggctagcgcctcaatgttaactgaaatggtttcaaataaacctctaacaacaattaaagatataacaaaagatgatgtactcgaaaatatcggcctgacaaatttgggccctgctagaataaagtgtgctttactttctttaaaggttttaaaactgggaatggtaaaatattacgtggataaggatccatcatcggcttctcagataaaggatgaatctaaagtctattaacaaatagtaaatgattgttgagtcaatttgcttaaagcagaagggaatagcttactcataatatatggtgaatgaaaaaattcaaataaaacaggtaaatcctttttggaatatcagaatatcttttatttttttatttttattaatttttgttattgcaactgtaattgcaactgttattgcaatcacagggctaatagctaatttagacgaaatagtgacaaaatttattattcaaataaggagtcaagcattggatacagtattcatcattattaccaccacatcagatactattaatctaataattgtgggttttattcttacaataattaagagaactagaagatttggaatgattttgttaattaccttggtttccgttaccattttagtcacctacatcaaacctttaattgcaattgagcatccaagcgacgtttttaagccattagtcatattaccggataaatttactctcgaaagggacagtttcatgccgtttgcacaagattattcatacccttctaaccacatcgcctcagcaacagcttttagctttataattgggggattatcctataaatattcgtccagattcgcggtagtatttttaatatttttcccagcgctaataggttttactaaactgtatctttttcaacaccacctaatagatttgataggagggtatttttttggattggtaatagttacaataatagtaaaggccctaaagcccaacgaagaacaaagaattaacgttgtagattcgaaccaaagagactagtactaatagtaacagtgttgctttgtgttttttttttggctccgattctagaatccataaaacggcagtataattttagttgaaccgatttgttaacgctggatccaataataaccagccaaagtgaaaatcatcgtgaacatatcggtactcttttatatttggccttaatttcagattcctgataccagataacaattcatgttgaagttgcagtcccaatttccttgaaatgtcatttgcttttggaatttcaaccgacctttttaacaagatcctataactaaaattatgattagaataacatttggcataatgatctactaatttcttgcacacaactgacacatctttaaaactatctaatttattcgtataatctgctggaaatcgttttaggatttcaatatttaccaaacaaatattagaatataaagaatactatttatattcattctgaccaaaaaatagatttggcattaatgttatgaatgaaagtaaagtaaagtaaacaaattagaaaggatttttttctgtttttttttgcaattatagtatcccaaaatccaaatattaaacagcctcgtttctttatggcagaaaatattttgataaatgtaatcaacaatcaataatatataactaaatgggctatctattttttttagtctttatttgaaaaataaggtcaaacaatcccttaaaagatatcataaaggagtgtaaacaactgttatttcaatcacctcggatttaacaatagtctataaagtgaaatccatcataaaatttgaaattaagtacatattgttctattggttaccaaaaggattgcatgcggcaaaagacagtaaaatccctctatctatccatctatctatccaactatctatctcagcaatttggtatcatgactacttttcctgtgtttctatatttttacttgttagaatagaaatgaattaaaatagcataagttctgtttatcacaagttgaatttatttattgaatagataatatctacattttcgaaggccaaggacttcaatcttcttttgtctataaaccattttatttgaaagagtcaagtggggtgggagacacatatccatctaataaaataaaagaaatgtttgattggaaaaattatagcatgtagatgaaccagtctttgattttgttttattgtgctgataattgagcattctataatatgtaaaagctataaaatattcaatcaatctttgatattatccgattaaatctattcatctcaaaataatcaaaatagagtagtgactttttgattaaatttaaatatatcaaaatttttccctctagtataatgacaactactgctaacgagtttgcaccgactaataatccctatcaaatggctttgaaacagcttcaagagactgcaaaaattattaatttagacgagggcatccacaaaatacttgcaaaaccaaagagagttttaacagtatccctaccagtgaaaatggatgatgggaggattgaagtatttactggattccgttctcaacataacgatgcaaggggtccgttcaaaggcggaatcaggtatcacccgcaagtaaccatcgaagaagtaatggcactctcgatgtggatgacttggaaatgtgctatagtaggaataccgcttggtggtggtaagggaggcattatctgtaatccgaagaatatgtcgaacttagaattagaaaggatgacaagaagatacgcatatgcaatatctgacattattggaccctacacggacatcccggcccccgatgtatatacaggaggtcaagaaatggcatggattatggatacatattctaccctcaagggtaatcgctcagaacctgcagtaattacagggaaacccctacctataggaggatcattgggtagaactgaagctactggaagaggactatcctttacggtaagagaggctgccaaaagactaaatatcaatatgaacggggcgacagtagtcgttcaagggtttggtaatgcaggacagtttgcagcgcaattggttgaagagcagggagcaaaagttattgctgtttcagatacacagggagcaataatcaataagaatggatttagtgtaaatgaattaattaaattcaaattagaaaacaaatcgatccatgacttccctagttcaactgaaataagcaatgatgaattactaacaacagaatgtacgatattaattccagctgcacttgagaatcagattacaaaggacaacgcctctaaaataaagaccaaaattgttgctgaagcagcaaatggtccgactacccccgaagctgatcagattttttatgaaagcaatattttggttatcccagatgtattggctaatagtggtggagtaacagtttcttattttgagtggctccaaaatctaagaagagaatattggtctgaagctgaagtaaacgagagattagatgtaataatgacaaaggcatttgccgaagtatatgacgcacatcaaaaatataacacaaacatgcgtacagcaagtatcgcattggcagtcaatagagtggctgatgctataaagctaagaggaatttggccgtaaatactataactcttacctgactcatggtataagataagatcagataagataagatcaaaaccataattttattattttaatttcctctttttaggccttattaaatatatttctaataagtttaaactgatatttaccaaaaaaatataaagttaagttaagttaagttgaaaaaattaaaccagattgagtaattgatgaaaaaattactcggtagaaaacgagtgaccacatgagcagctctttgtaacgttcggattagatatcttaaacccagaacccatcaaactttcaatgtaatcgactactgctccctttaaatatttttgactataattatctaccaaaattttaactttattttgttccaatattacatcatcttcatctggattttcttcaaatcccatcccataggataatccagaacatccaccgccagtgacatagactctcaaatagagactatcttttccttcttgtttcataaattctgtaaccttttctgctgcctttgctgtaacatcaataattttaggttgttgtacacttgccatgatgtattataataggcaatacgaatttaataatgttttcctataaataaaccaaaaaaaagatgaccttgtagaaaaattctacttgtgtgacttggataattcagcccatttggccaatgaactggctgctatactccaagtattaaccgattgatatacaggtacattcttctcctccaatctattggccattttttgagtaaatggacctcctaaagctccaacaaggataggctttttcccctgcttattaaattcggccagaatatcaacgattttctcctcaagtggatcgtcttgaaatacgaaccaaggcatgacgatatcgacatttggatcatccataaatgtttggatggcaaatttataatcgtcagcgtttgctgatcctgtgacgtcacacggattaccgattacatatgtaggtggataatgagatttgaatgattttatactttcttcactgaggtctgctacttgtagtcccaatctttcaaattgatcaatggctgcaattatcggcccagcaccattcgtaaccattgctactcggtttccctctggaacgggttgccatgaaagagctttaagtgaagcagttagctcatcgtagctgtccacagaaattattccattttgtgaaaatgcaccctttactacgctataagtcccgcctagggagccggtgtgagaagcagcttgtttagcacctcttgttgttcgcccatttttgaaaactactattggcttttttcgttcagagattaccttcttagcggtgtttacgaattttctgccatcccccaaaccttctacgtataatccaataactttggtttgtggatcttcggctagataccaaatcatgtcagcttcgtctacgtcggatcgatttccgtatgaaaccattttgctcatcccaaacggaaatgagtgttccataaatgcaatgcctatagttccgctttgcgacaagaaagcaacgttgccgtttttaggtctaagcatgcggtcgtgcccctggaacgcacaatctagtctattctcaccattaaacattccgatgcagtttggtccaataattctaatatttaactgggatgataattccttaacttgttgttcaatagcggctctttctcctcctaactctttcccacctcctgaaataattacaacattgtggattgatttattgccacaaatctttaacaaatcaggaacaaattttaaatctacagtaacaactactacgtcaatgggatctttaatatcgtctagactcttatatgccggtatccccattatttcgggatagccctttgcatttacagggtatacctttcctttataatcatgctttaccaatgtttcaagcacagagtttccaatctttcctaattcaggtgatgcacctattaatgcgatagatttggcattaaaaaacaaatccatgttagtagaatttggttcaatgctagaaacaacatcatatcgaggatgttctgataatatgatttttgcatcagctacgtaataactgtccgggtatacaattacggggttgaaatctatgctatcataataaggcgaaatatcatatcctaattttcctatgttgagcaaggcattagtcaatatatccatatttatcggttctgaacctcgatatccttttagcagcattttgccctgaagttcctctatcatttctaatgtatcttgttttgtaagcggcagaactctaaacgaaacatctttgaataattcagtaaaaatccctccaagtcctaccatcataacggggccgaattggggatcattttgcaaaccaacaatcatttcaacccctttggggaccattttttcgagtaaaactccctttagatcgtaatcctttgatagtcgatcatacatatcattaaaagcattcttaacagactcttcatctttaaggccgattttgactcctcccacatctgtcttgtgtaatatctgcggagaaactatctttgccaccaatggaaaacctaattttcttgcttcagtgactgcggactcaacatctttaaccaaagcaaactctggaacgctaatatcatattcagaaaggatgcctttagcagtttcttcggtaatgactttggtattattcttaaaagaatcctcaaatatcgatttgattttgttttgatctgtcaataaaggttcattattctattcggtttataatttttcttactttaatttatgaacttttagtaaagtattcatctttagtcaagacaaatatgcctttgaaagttagttaaattcatgataaagcataataatgaatgattacttgtaggcaatcacaattatggcgccccctagcagttttctattaaattcgaccttggaaaaggttttcaataacaaatcatttagctcattattccttggccacctaagaaaagtaccatataacgtacgaaaaggtagtccttccttcccagcggctaaaaatgccatgattacaaggaaatactttagataaaaggatacaagatatcgtgcaataaaattatcaggttttcccagatcaacaatcagtaaccttccatttttttttaaaaccctgtggatttctacaaacgactcatttaaagcaattgaatctctaattgaataaccacatagaacagcatcaaatgaatttgacttgtatggaatcttttcaaaaataccactgcataaaaaataactagtatcataattcttgaatttgcttttgatttcagccaacatttcgggaataggatcataaaaatttatagtaacatcttcggaaacaatatccagaactatttttgacatgttgccgtatccagagccggcatctagtatatgatttccaggaaaaacgctttttcttattccttcttttcgaaactgattgtcttttcctaatgaaatagcactatttaccttatcataaacaggaataatattcctaagtacctttattacctctttccaatacaaattccccaatccaatattcttcaatgcaaaaagtaaaggaaaaccagatattgagcttttgtatcatctaggataataaagatattagtgaagaagttatcaatatttttggagttggtgagcgtcttggacagcaaaaggatcatcagcatggacgccttaaatgctattattgtaggattttccttctttgactcggatgtaagaaagatctacgacaagataaagtcagaggataaaactatcgatataatatttattaattcaaaactggtgtatggatgggaccatgtgtttggaatcttaaagataattaacgaagaaaaaaaaagaaatatcaaaatggacatcaagaacgtagaaattgaatttttacttagaatatgctacaccaatcaaataaaggatgcgttaagcgcaaactttggggatgacaaaaataaaacctttgtaatagtattggtttctacgcttgttgacaaattgagtaacactcttggtactctcagatcttacggtagcgaagatagtaacttgatagttcctaatacactcaaaaaggattacatcctcaactacttttttaaagacaaattcaaagataattcgcatttattattaaatgatgaagaaaactatatgaaatttcttgttgagaaagcagcaatatgcctaaattaaatatccttgaataagggacggtataatctccttaccatatcttagtactattatgaaacccttttttctgtcattgaactaaacatcatgtcggccctgataacagatattcccgaatattttccaattatctctactagcaaaatccatgtaggatttgttaaattgacaggataattcaaatgaggtcccaccgagtctataatgtcttttttagtcaatttagtatgccttttttccaccagtatttttacaggtcctccgccaacaattttctctttagctaaatcgagcaaacaatttctaatttcttcgacctcggttaataccactttctgtatgggaacaaatctaagcagattccgaatttcccatggtgaatcttttatctttgctctcaaatatggtataaaaagttctgaatcctttgaagattttcccacaataagccctgaaatattagtttcatgtacttctgccgtgctctcgccaaagtcatagaaaagcccctctagttcatccattaggtcgtcctccttgtatctatatgttgttgcaagaaaattgaatatcatagtttactccgctatacattcctaatagctgctaggattttttcctttggaattgcaccttccctaattattctaggaaatccactccctgaaacatccactatagttgatccactgtcatttccagataatatttcgttactaattacagcatcgcatttacccaggatagttgcgtcaatatcttctaatttcattgaaggtagtttttttgtcaagttggcacttgttcctactaataatttagacctagtctttccaatcagatctaaaatacatgaattattaggaatacgcaatgctatagtgttattatcattattaaatacatatttagacaaaccatggttttctttcaattttagaatcaaagtcagctttccgggccaaaataattcgtatagtaatttggcttgtggagtaatttgcgaaattctcgagacaatcctcctgtcgtttgtcaatacgggtaaggacttttccaggggtctttctttgatagaatatagacgcagaaccgatttatcaatagtgggatcacaacctataccaaaaatagtgtcagtaggataaacgacgactcccccattgtcaattatttttgcacatttttctaatccgtcaagatcattacaatctgtataatagaccaatagtttgaagaacttgcgaattcaatttaacctaacctattggtattatctttgaataaagatttaaattcaacaatttttaaaactgttggtaatattataattatttaacaatagtaaatagcctcaattaatttagaaaagcatatatacatatattggtatatattgtcaatgcaatgcaataccaatgttttaggatataaaaattatgaaaatgtatcaagagtatatgatcaattcagaatccaaaatctaaagtcattagagagcactatccgatcatcagaaacttgtaaaaagcctataactattgttttttgggatattagtggattttcaaagttatcaaagatgttttattcaatggatagtgaaaatgtcatattagagttcttagaagattattacaggattgcaagatccataattgcgcataataatggagtctgggacaaaacaattggagacggcataatgtcatggtttgggttctttgagaaaaacgtactagaaaattcagttggaatggacaatggagcccttgatgctataaatgctgcaattgaactcagaaatagctttcaaaatctaaaggacaagctgaaatcagaatgggaaatagatggaattaacatagactttgacataaaatgcggcattaatacgggctcagcctatataggccttgtttatgatcagttcacagctatgggaacaaatgtcaatattgctagtaggttccaagaatttgcgaaaagagatcagataattatttcaaatacaacaatggaaaaaattagttcaaaaggttttgattttttgagaattcctgttgattcgaacaaccctataaaatcattcgaagacattgattgttgttatgagattttatactaaaacagaaaaaaaggagatcaattgcggcatcatcggcgtttctcatgatttcagatttcataaactcagaataacaaaagtatttttatttgaaagtgcactatatcatcaattaataatacagattaaaatgatagaaaaagaaagattaggttcaaaaggaaaaggtattggtatgggtataaacgaagtttatctaagcgaaaacagagatgaatttgatagcactgttaatggttattataagctgattggtggtaaggagggcagttacgataaagaaaccagtaggagattacgcgcttttggcgaagaattgtttaaaaagagatcatatgaaaaatttactgcctttaaggcagatcatgatgatatgataataggaaatcatttgagattattttcattttgtgaacatcatttgcttcctttttttggcgaggttgctataggctatatcccaaataataaaatattcgggctctcaaaatttcaaaggctcgttgataaagtatcctctagaccccaacttcaggagagacttacctatcaaattcttgaggaaatcaaaaatagactggaacctaagggtgtaggtgttgttataaaggctattcatacttgcgtttttgcaaggggtacgcaatcaagttcagcagaatttacaacctcagcagttgatgggatttttaaggaaaacaacaacacaaagcaagagttcttttcaataataaattctgatggcagactaagactctgacattctcatatttaatagataaagttgacatgaattttttttatttatgcagaaggtaacttggcgccttttacgagaaaaatcagcaagcaatatagttaataattttagtagtatcgtggcgcatatatcgcttagacactatatctatatgtaatatgtcacgatatattttaattacaaaggagagcgagtaaacctaacttgatgtctgcggccaatgatgcgaatatagagtatattgattggaataacgcttttgaaattttagataaggcttataaacttggtatttttgtcttgataattggtccaaagggaactggcaaaaccacactcgttagaaaattcgcaaatcaggtaagtaaagaactctcatctgttaattttagccttaggactagagaatcacacctaattggaactaacacgattgataatggggagataaattttgtaaatggagttttggtacactcaatgacggaaggcgatttattatacctcgatgagcttaacgctgccgaaccggatgtgttgcttcgacttgacgaggctttagatgatagaagacaaattgttttaaaagaattccatggacagaccataaaggcaaaggataactggtttgtaattgggaccatcaaccccttgtcgcacgttggaactaaagaacttccaccacagattctaagcagattcccaattagaataatgttggattatcctccagaagatatcgaaatggagattatcaaaaaacatgttaaagtaaataatcaaaacgatgaagataatattaaaagtgcaataaaattagcttacaatcttcggaaggcagcatctcttgaagaaattttttatagcccaagtttgagggaaacgattgcatactctaaattggtaacgaacaacacgaatgcaaaagaagccgctgaaattgtatttgcaaacgtttaccatcaatggggtgaaattgagtaccgaaaggtaatggatataatcgcatccatattcatttaatttatttcgataaagtatgtctatattttggaacataaaagacaatggcaatggcaatgacaatgacaataaatcaaagcctgttgaatctagggatgaatcctctgataagaaaataaaaatcaaagaatacaaaaagtccgactctttcttaagatttgatgatcttgatcttgagaacatccacatcagaaatgatgtattacttgagattgctacattcttatctagacggtggtcagacagtaatagatcatcgattcatatttcaagagaaggaaaaatttctactaatctagacaagaaaaaaattattcttccgggattagattatttctatggtaatatttttcaaaagtacagacaatggcgaacgttactatggtatgaatcagtcagattaaagtattcatttaagatttttgatactgacgtagtttttggattcatatttaacattttggagacaaaacggatagaaatattgggtttagaggagtggaagggaatgataaaggaaattatatactacgaagggttatcctggcacaacaagcccctgttgaattcgcttcatgggaaaaacaaagttttagaagcattttctcagttctttttaacaggatatatcaaaggagaactctatggtggcgaaaatgaaagagtaataaatgcatccgagtatgcacatgggattttaagagactatattaaaaattttaaacttaacaataaaacctatgacccaataaaagatcaaaagtggttagaatatgaaacaagacagataattaaaatgcttcaagtggattcgctaatgtcagtcccacccatccctattcttatgccaaagagcaaggtagggctatctatgaagcaggaggaaatattatctcatattgaaaaactagtgagaataaagactagagagatagaaatagagagattaaaaaaggaaataatccaaggcgacgatatcaacgaagaatttagaatattagtcaatgagagcaagaaaaatgacaacaaaggttttgaaacaactgaaaacctttccatagcgattccagacaatatgggtattgacgaaactgccatttacgattttgatttaattaacaaggtaaaaacagcacttaaggaatggaaaagcggatggaaagaaaaatatgactttactggagacgaaatagaaattgaaaactacattgaaaaacagccaaaagttttcatcagcgacaagaaaattgcaataaatgtaaaaatatcaggtacctgttggatctttcaagtagtattgaagataatgaaatagaatacaagaaagccacggtagcattgtgtgaaggattagaatatctaggaattaagttttccatatatgcctttaatactgaatctagatcggttaaatgttgggtcattaaacctccaacggcaagatgggggtcaatatatgcaagaaggctcatgcaagtaaaaccaatcggaggaacaccattagcagaaatctacaagatacttcagccaagtattagtgcttttaaaccagatatttttgtaacacttactgacggcgaaccctcagacatggatgcggtgcgttcgatagtcctgtcatacaaaagaaatggggtgaagatgattgccataggtttgggtgcggatctcggagatgctataggaatcgcatataatttaaagtacctcaactaccaaagaattctaacattatcaaaaaagaggctgcaagatttacccaaaaaagtattgggacttttaactactgaatgacatgatacatgacagggaactaaaaaaataaaatagataaaatgaataactagaattcaagatcagggttatctttttctagttttttccaatccgataagaatgaatctaggcctttatctgtcagtggatggcgtatcatcttatccaaaatgtcgggcggtaatgtaacgacatctgcccccatttttgccgcttcgataacatgtaatggatgacgaacactagccaccaataactgggttgagatatcataactagcaaatatttggacaatttcacttattaggttcagaccttctgctccaatatcatctaaacgaccaataaatggactgacataagtagcacctgcttttgcagctaataacgcttgatttgcagaaaaaatcaatgtcacattggtcttgattcccattttggttaatgcatgtacaacttttagaccatccatggtcataggaatctttacaactacattttccccatattttgccaatttcaaagattcctccatcattttttcaaaggtaattgcgactacctcaaggcttacgggccccttcatgatctctactattttcttcatcgtcttgatggggttgcctttttcttttgaaagtaaagttgggttagtggtaataccatccacgactcccatttcattgtatttttctatggattcaacattagcagtatctaagaagattttcattttttctcacttttttttaaggacaccacattttttactatttcccctggagataagccgtatttttctaatagtgaatcgatttcttcgtctcttgcagattcaccatatcgatctctaattcctatcttccttacgaaagttgggcatatttctgaggtcacttctgaaattgcggagcctaatccccctattatattatgttcttctacagacaccaatgaaccagtttccttagtacacctgtatattagatccgagtctattggtttaatagaatacatatcgatgaccctacaagatatattatgatcctttttcaatatgtcgctagccatcagggaggctgaaaccatagtcccacatgaaaataaactaatatcgttaccatcttttattactgttccttttccaatttcaaagtctgaggaatccgaatagatttcctgagttgaaggcctggccaatcttacatagaatggacctgggatatgaactattttttcaagcaattttttgactgaaatagcatcggcaggtaccaagaccctcatatttggtaaagatctcataatagatacatcctctatttgttgatgagatgccccatcaggtcccacggataaacctgcatgggatactacaattttcacgtctaggcttggatagcaaattgcatttctaatctgatctaaacatctacctggaataaaagcagcataagtactagcaaaagatactttaccggcgatagcaagaccagcagcgattgagactaaattagcttcggctattcctacattgaagagtctatcaggatatttttcaccgaattttttagttttaagcgagtcagtagtatcaccccccacacaaacaatgtttgaatacttactgcctagatccacaagggtatctccatatgctgaacgcatatcagaaaatctaatatcactagtactcaaagggttcaattcatagttcaccataatacattatatcttttttttgaatgtcatacattgttacagcctcgtcattagtgttcaattatttcgataaattaaattgttctattatgttccttcgtccctttacccagtcttcttgaatatttagagactgagattcatcaagtaaactctgctctaaatatgaatcaagcaaaaatctagtatccttaaatctcttatcaacatcgctatgaccgaatattgcatttcccatcacgaatattctacaacctgcatcaaagcattgagttacagtcgactggtctatgccaccatcagcctcaaaataacctttaaaacctcgctcccttagtaaagggataacccttttcattttcggtaaaacttctggaatgaatttttgaccagcaaaaccaggatttacagacattatgataatcacatcaagattatcaagatgggaaaaaatccattcgggtaattcggtgccaggatttacagctaatccagggctaacaccatttgataaaagtttagtattaatcatttcaaattcttgttcgttactacaggcctctgcatgcacagttataacatcgcatccagcatcaatataactatccaggaatttgtctggattatgaatcatcagatgagcatcaaatggcaatttcgtcccatctcgcaatttctttattgtatcaaagaaaaaagtagagtttggaacaaattttccatccatcacatctagatgtatcatatctgcaccgtatcgctcggctgctgttattttttgtttcaaactctcttcgcctatcccatcggcgcctgctataatagaaggagatatcatatactctccttccagttcccttattaacaacggtaggtgtttttttgaaggtgctctcccgtgccactgaggattgttagccatatgttttattccgttccctttcacggtatttgctattattattttaggtttatcaataggtttttttaaaagttctggaataagctgttcaatcttatgtccattgatttctacaacgtcccagttaaaagaaagccatttttctttgacagggtcaattggcataatctcttcggtaaatccatcttgctgaatcttgtttctatccaatatggctatgaggttattaagtttgaattttgcagcggccatagaagcctcccaaatttggccttcattggtctcaccgtcacctagtagacaatacaccatattctcacgcttatcaagcttattagcaaggcatattccaattgatacagaaagaccaataccttcagagccgccagaatattcgattcccggtacgctgtggtgtttttgcatcttactatatcttactggatgaccttgtagacgagaatccaattttcgcaacgtcttcatttcttcttttgggaaagatccagcaagggataaggtagcataatatcccggtgccgaatgagcctttgaatttatgaaataatctcgagatggattagaagggttatctatatcaaatttcattatttgaaaataaagacaacccattatctcggcagcagaaaaggacgcaccaggatgcccagagcctgcttctgcaatgccggttaaggctaaagtacgtaattctttaagtttttcctttaatttcaagtatctatttatgttatacattttatcagcctctctgttttcatcatgcccaccattccatttcaaacatctctgtatactagtttttcaaatatcaaatagataaaaaggtagctacactgagaaaatgattttacatttctgttctaatattagacaaaatcgattccatatcactcttggtaagccccactcccatcttggcatctctacgatccttgattgtgcttttagagaaggcaattaaagttggtactgcattgatactatacttatcccacaacgggttttcatcctcattaagttttacacccccaaaaagaattttttgattgctaatatttttaactgaatcttcaaatataggtacaaaacttttacaataaccgcaccaatcagcataaaacaagattagcgagtttgaactatttgtagcagagtctagttcgctttggttaaagtctttcataatatactatgatagatctatggtaaaaaatatttgcaaaaaataccttgaactgtatgatattgttattgctgttttggttctggttttggttctggttttgggtttggttttttgtttcccagtttgagtttatttttgggaaaataaataattacactttaaaaatcatattcatacacaaatagttcaaaatagaaacaacaggaatagtcataatttgacctttctcatatttgttcagctaccctctctttgtcctatgaaaaaaatgtgtcgtttcttttccgccactaaattaaggaaaaagatggtagataaagccccaatatgcttattgaggtaataacttttgttaaaataacttgtatttttctctagttaccttagaggtttaccaaactcatcattatccagcgcgcctttaaatacattatcataacatgcttctgcgttttctaatgagaaagttccattattgtttgctacacgagtaacacaattaaaatatcttgttagtgcattggctggttctataaccattagttgtgccaatatcaaaactgaaaaaataatacaagatatttttaaggtattttttatattttgatttatattcatgctaaattattcacctccgaattcaatgtcttcgctagcatcagcggattgagcatttcctaaaagaacttcgttatagcaactttttacttcgtgtttagttggttccttttcaaagtatgaatcttcctcaactcctttgcttgaatctactttttcatctatacagtcataaaataatggtaaaccgctatctaaggtttcatttccactattaatttctgttaaatctacggcctgagagtatactttgtctgtatgcagcgggattcctgcaatacttgaaaaaataatcgtaatggctgaaaataataacgtattaatccagagatatttcatcctgtaaaaagttcgaaataaattatttaaccaattctacaaaatgctccacaggaatcctcaagaacaaagtttgtttgatatttcaaagattaatcaatctctcttccagtagcatttattataaaattatattggtgattcttaaaaaatttatccaaacttgaatagtgcaattaaatgattcaagcttattttctttataatacaataaattagcataatcagtagcggtttgagaattccaaatatgtgagcttgaatatcaatcaatattttatcaaaaagcatccaaaacgtattcacaaattagccagtttggtgatagcttttggctaattaggaatgcatactaaagtccggctctcagttattgaagatattcctcaagaatgcatcacaagaccgatatgatataaatataatcatgaatatagtgacatattgatttttttgtccaaaatgaaatgtttctggttaattatgattttctttacaagtttggtgattattcatgccccgcaagcattcggtcaaaatcaaagcctagaacaacatctaggtttgtttggtaatggaaataattcattgttaaatgacattttcagtaaggtaaaagattcagtcgtccaaataagtacagaatatcagccagtagatccttcaaataggctttatgaatcaacaggtaatagcccattcacaatgaagtttgggtcgggatttatttatgacaaagcgggcattattataactaattaccatgtggtcagctctgcaaccaacataatagtcacatttaacaatggtaacagctatactgccaaagtagttggtgtagatccttatggagatatatccgtgttgaaattggatgatccagcaggtgaaaaattgattccagtgacattgtcaaactcatcaaacttaaaggtaggtgatccggtattagctattggtaacccgtatgggcttgataatactttaacattcggtattataagtcaaattggtagattgttgccaaactcagatttaggttattctattcccaatgtaattcagacggatgctgcaattaatcctggcaattcaggaggacctctgatagatcttgatggtaaagtagtaggcatgaacactgcaatattttcaaatacaggaacctatacgggagtaggctttgcaattccttccaatgatatcaacagaataataccttctctaataaaaacaggtacatatcagcacccatggttaggcatatcaggatcaaaattatcccccaccttagctgaaatgttcggactaccacctaattacaagggtgtattaatcgatgatgttgtgcctggcggaccggcagacaaagcaggtttgaaaggaatgttaattcaaggaaacagatttggtgagcaacagatactagataaagatataataattgcattagacggcaatcctgtttcaagaattgatgacataatttcttatttagacatatacaagaaagcaggagacaaagtaaatctgactgttaaccgcaacgggcagataataaaccttgttccaacattagaggctagaccagatttacccctacaagatattcagtcacaatctgaccccaactataacgacccccaaccctacagcccgtttccaaatttcaacctaccgccacttccagaatttaagctcccagatttgcccaattttaatattccaggtttgtagtataaaggtaaaaatgatgatatccacatgcaaaagatcctagactaattttcttatttggaaactcaactcaacacacattcaaaaatttttttatttcatcagaggttttttctatatgatatccagcaataaatgaaagcagtatttttacttaaatttataacctttcatttctttaatttatgatagaaatatgtctgttcaggagaaggagagtgagcgtgagaatgagcgtgagaatgagcgtgagaaggcaactgaaaaagcttcaaatcctcttgtcaaactagataacgtaagctacagaaatgactctgaagttattttggataatatctcctttgaaatagacaggggagattttttaggaattattggaccaaatggtgcaggcaaaactactctttttaaatgtctgttaggattaaacaaagggtttactggtaacataagattatttgataaagacataagaaatcatgcaaaagagatttataaaaagattggatacatccctcaatcaaacagttttgattccaggtttcctgctacagtaaaggaagtaattcaattgggttctgtaggaggtaaggcttttaatgaaaataaagtaaaagaattgatagaattgacaggtatagcaggctatcttaacaaaaggataggcgatctatcaggaggacaacagcaaagggtaatgataactaaggcgttaattcatgagccagaattgctgattttggacgaaccagatacagccatagatgctgcagtattgaaattattctacaaacttttgacaaaactgaacaaggaaagaaaaattaccattatttggtcttcacatgatctagatgctgtgagtttgctttcaaataaagtggcttgtctttatcggaaactcttttttcatggaatttcagaagatttttttaacaatgaaagtaatctcaagacatttgctgaatcatctatgcacattcacataaaaagccattcgcactgattttttcatttttgctcttctttttgtatttggatacctttgcaaaaacagaaataacaagtccgtctgtcttttggtttgaatttttttacataaaggtattcaaagtttatgatttgcttgcttaatattttagccagctatggtatttacttttaaggcaacacaaaataacgaaaataatcatatctacttagtttttgcaagcagggttatctgaaaatctaaaaaataggttgaagaataatcaacagattgtttagttaggcaggaggatatcttcacatattttgaactaatcgcataatcaatattcaaagaatttagtaagataataaagaattatctatttatcaatacatttctcatcatcttaaattcatttattcatcaaaaaaaggaaggcggtcagtctgttctcgtgataataatctcctttgccattctgcctacctaagtaggaaccatgataaaagacataataacaaatttacagttatgatataaggatttacaatagaattgaaagagaatgaagcctatgagaataaaccaagcaaaacgagaagcattacatttagacttgaaagttcggttatagaagaattacaatttgaagctgattacagagaaacatctttgaatgtgcttattaatcagattttacgcagatactcaaactgggaaagatacgagaataagattggaatgatcccaattcccaagataatattatctagtgtgatggaccaagtaatcaaaacaggttctgaaaatggaatcgatgatatagcaaaatttaaggaatcactagtaaaagaactttcacaaatagccttcaactttttaaaggactctgttctcctcataaagaaaaattataatctattttcagttttagaagtgctcgagcaatacatgaaggtaataggaataaactcagatcaccgaatcgaagatgatggaaaacatgtttacgtaatacagcataaattaggtgaagtctggtctttgttcatcaaggaattcctaattctcatatttgaaaatttggggaaagttaaggtggatatatcaagtactcctaacaccaccgttgcgaaagttttcctaaattcctgatatctctaaataaaaatattatgatatttttttaccagccttatcaaagcaatgaggagatacaaaaaattttcatttgtgctctatatttgggttggttgtactgaattatacaggagtatgacaattctaagataatagtttgagccacgctgtaaaaagtcatttaattaatttatcttttcatgtactctgcccatgattttcggagattctaggagcaaaaattttctagataataatgatatttgtcagatttcatacattttgatttttataggataagatttaaaaaaaattattggtttggagggcatactaccttatcaagaaagacaactacttgaaaatttctacattattgatttgcatattttcagtttttgcaataatattaaacattgagggaagcaattgtattattcaaatcagttccttacctcaaagtaacaatagttcgaacaacaatgaagaacaaagtaataatagtgaacttagcaatcaacaggcagagaggcaattacaaccattacaacaacaacaacaacaacaaaaagaagacgttagccaatctcaagagacattgatacagcagcagcggcagcagcagtcatatgaacttctaaaatactgctttttggtgactaatctatatgtatactccttatttggggtcataataggttgcataatactagtgctctggtacgtgagatacaaaaaaatttggtctggaaggaaaaaagggtctattaactaacccgtttttaaaatctaaagtgtcaggctatttgcatagatttttaaataaatgggaactaattttacacaaagattgtctcgcgcagattctattctaaaattggttaagacctcctatactacaatgcccacgtttaaacaggccacttttttcggagttccacataactataaggatataaaaactctcagagaccttttagaaatcaattacaagtatcagccagtaaagaatcaactaagacagaatcttatcgctaaaattaaaaataacgaaaatccgtttgtaggaattattgggtttgaggatacagtcatcccagctataaagagagcactcttggccggacatgacattttgtttgtaggtcacataggtcagggaaaaaccaaacttgctgaactgatttcagagaatcttttgtcaccgatccccatagttgaaggaactttgacaaatgatattccaaccgaaatgccttatacccatcttgtcgatttattaaatggaaattctgtggataaaatgcttccagaattttatgtctcaaaggactgtgaggaaataataaaaaataatgggttggacaccaaattaaaatggttagacggcaaacaaaggtatagatatatcctagcgaccccggacatctccgttaaagatttagtgggccagatagatgttgttaaaattataaaaaagggtatcgaagtgtttgacattgattcatattctccgggatatttactgcaagcccgatatggaatactatgtcttgacgagctacccgtcctagatccccgaaaacaagtaacattattaagtgtactacaagaaggtagatttacaaccggtgcttatccagtatttttcaaaccggatgtaaaaataattgctacggcaaatcctatagattatactcattctggaaagataatcgaaccattggccgatcgtttgaagagccatattgagacacattatcctaatacaattgatgacgaaaccctaattctgattcaggaaatggacatgctgaatagaaatcaaacttttttgcccattttcatgctaaaagcgattaccagaattttccaaaagattaggaaccatccggatatcaatagcgataggggtgtaagtgtaaggtcaactattcattccttagaagcggtaatcggtgaagtagagagaattcgttctcttataaataatgtcaaaacaataccaaggttttcagatctgcaatgcatatttcaatcttcaaagtttgaactagatgaaatagaagatactacagaaaacaagacactatttctaaataatgtgatagacgaagttatacaagagacatgtttacatttctttaacgaatttttcaagccccaagatctaatatccattaagaatgagtttagaaacaagtcatttacagtcgttcaaaatcaataccaacagaaaaagcacgaccacaaccgacacataactgctcaatcgatagatgcggcagaaggaacggatacggcaaaagactctagcactacttcgattttatattcagaccaactaaaacatcttccagtaatctctaagacattaaaaggtgttatcgctaaaatcaagcaagaacaagattactttgttcaaaaggctcgtcagaatgagattgacaaaaaccttcaatatattcagtttgaaaatgtgtggaaagataaggaaaacaataacgaagaactcatagccacttcaaccgaattactgttcgaatatcttaggattagttcccctccgattctagataaaagggaagacaggttcgaaattagagaataaataaattgaaaggctcaaaagataagataaatagtaacaagatcagaactgctgataataataataataatgacaatactaacgttctgattcataatgccataaatcaaactggcctaaacaagactgtcatgtatgagaaaagggtcatttatttttcaaggccctttgtaaatgctgataaggaagaggatagtaacaggtctgataagaatttaggaaatagccaaagtcataattcacaacagcaacaacaacaactacaatctttatctgaccaggaaaaaattcgagcaagaaacaacctgttaaagcagttttttccagacatattaaaggcaataggtaacaaagctatcaaagataatcctccgacacttcaagaactagaatcctatcttcaagaatattttcatgaactagaaaagaaaaagattgaggcggaaaaagcaaaggctcaagactatttatcaagatttactaaccctacttcatctagtcaggattctagtaacaaggaactaggtagatcacattattcaaaagggcaaaatgattcgacggcgtcagtcactactgctaatcagaaaaactatagattgaactttaattttaatgatgataaactttcgggtaacaatcttccaattgttaccgaattgattaggaaaggttatttggttgattcagataaatggcttaacaagaaggggtttctaaaaataggtcaacagatccttacagagataataaagtctctaaaatcagacaaaataggtatgcatgaaacaaagtttgctggatatggaagcatggtacaggaaacttccaaaatgtatgagtacggaaatgagatttccaacattaatatcaactcgaccataaggaactttgtagaaagacactatgaggatcatcgccatgatgaccttcataacaggattgagtttccattagatatttcgtatgaagatattgaaatttacgatactttggaggaaattcaagtagctactgtttattgtatagatttgagctcaacaatgaaatattcctcgatgtacaatgatctgagcaggatagaggcttcaaagcgtgcattgtggagcttgtttatcttaaataaaaaattcttccctctagattctatttatacgataggatttggatccattgcatcaaggattgatccaatggatattccttttctaagaacatttgaacctaacgcagattttctacactacactaactatcaatcagcatacagatttgcaaaagcaattttgaaaaaagatggtgcaaaaaacaaaaggatagtgatgataacagatgggcatcccagtgcgtgctttatagatagtaaaaatgagaaggataagataatgaaacaaagaccttattcacatttttatatacctgatcgagagcgaataggtgctcagaattcagacaataaaagaattaaatttgatattcacgataagcagaccgtgtacttgtgctacaggtataggcagattgatcagtatataggagaacagacaataaaagaggcaaagaaactgaaaaaagatggtattgatcttgacactataatggttagtgaggaggatactctgctagagtttgttaatgaattggctaaatctgtggatggaaaatcgatatacattaaccctagagacatagatagagttcttataaatgattatttatcaaataagaagaaaatgataagaaaataatgaaagaattgtttacctttttctctgtaaaagaagatcagatataaaaagttagtacagtacagcacaacaaactgcttttttacctaccgctgctaccaccctgcagcaattctaacattcttaatatatcgagtgtttcattaccttgcgaattaggcgccataaaagagtttgaagagtcagttccaaaggaatcattattagggaaactaaaacccgtatcattcccagcaccaccaccaccgaataaggcttcaaaagggttaaaaatcttggtatcgttaagagaagttccgttgttattttcgtttaaaaacatttggtttagaaaagaggcatttgttccgttagatggaaaaaaggacgaaaatggcaagtcgctaaatgatggagatgaggaagatgaggaagatggagactctagggaggagaaggatgaattcgaagatggagaggaaagcattgcaaatggacctaacaactgcttaaattctgagaggtcaaagtgatcagtggaattcttggggaaattaagcatttcggcaagtccggaaattgaacttttattatttaacagagaattacccatgttaagagacggattagaaaacggtcctccattgcaaagatttgctaaaagttcaatgccgcaaatggattgcaaatctataggtgggatagaattcatcatggaagatatgtttggaatatttccagcagaggaattctttaggagattttctagcattgttttaggcgagctatttatctcagaagtattgagcaattttgaagagttataagcaaaattgctagaatttagtgacgataaaatcccttgcagcataggtactttttctttgagcattgccaatcctgttgaattagtcagcagttttagtgattttgacaaattgtccgactctatattaaaagaataaatcatcttgtttgctattggaagggaattctggtagtcagaagtatttacttcgtagcttaatgaatatagtttatcgttaactattatcccatattcaatagtatcaattgtctcattaccagaataacttcttgttactaatttataagctggatggcccaccaatagtgaatcagtcgaagattcaattatagtaacatcttgatcttcttgttgaacagcattagtacgatcttccaaataagaactcacgttatcaggggaatagaatattggaggataaaatgtttgtacgtaaacatcaaaccatgaaataaaagtctctggagataatccggaatcatcatcataggcagggaaaaagcttatctgtttaactgttttattagaattgctttcatcaatcaaaaagttagatgggtatttgatcgaaactcccacttcactattttcatagttgttgaaaattactgtattattgctatcagaaacagaatttgccaatgtggctacagattcttgtgcaaaaaccaaatttgagttattattattaccattcagcatatttgtgttaaacattgcgccaaataaggaaaatgcaaatgtcaaaacaaaaagagatgatgaaaaaataatcacatgtttgctcttgttcatcaaatggtattgttttagcacatataaaatatttttctgtataaaattacaataagaaatcatatacctttttttaaaatatgcggataaataataagtagaagaaaaggaaaaagagaaggaggagagaaaaagaggaagaatgtcagataagaaaaataattttaatacagatataactgatgaagatgagctagatgaaataaaaaaaattgcagagatgctaaatgcggatgaaaaagtattggtagtggccaggcaatcaagatttaaaccaggtggatctcagttttcacctaatgtagtttatgcaactgatagaagaattatattaagggatccaagtatgcttggactaaaacaagaaataattgatattccatacaacgttattacaaatgccaaaatagaaaaaggcttgctgtctgcctcggtcatctttaatgctccaggattgtttaaccctaatattccagggaggatgccttggataaaaagattagaaacagatgagcatggagaaaacggcgttatcgatgctattcccaagaaaaaggcagaagatttaatagaagtgatccgcaacggtatcacccagatcaggtctcccggttattcttcagcaggtgttaataatgcaacccacatttctaccccatcccatggtcatgtatcgcatgccgatgaactcaaaaagcttgctgacttgaaggaaaagggcgtaatctcagaagaggaatttaagaggatgaaggaaaagataatcggaaaggaatagaattttccaacaaataatacataccgactaagatttagaagaaggtaggaaggtaataagagagtatatactaggttgtctccccacccctcttcttccttcctttatttctccatctaactattctttgtctgcaatcaccagggaaaattattacgaattaaaggacaatgcttggggaatggatagcaatcaaatagcccagtttatagtcatataatacggtatcacttcaaagatcacttgacggaagatcgtaaactagttttacctttgtaccaatgaccttttaaagcacatttgaatataatataataaattgctcaaaagagaaaacacagaacttaaaacaatttttgggcgtttcttaagcaataagaccagtttgtttttgtttttatcaatcactgtcacaagtttagccatatatccaatcattataccacacatatctcacccttccatgatatatcacatcatcattcacattattagttttgatgtggccctttttctaactacgatttcatttgtatctttcaaaaagtcaaaaagtaaaaaaatactcctgacagctctaagtttcggatttttgttatttacagagtttctatatttgttacagtcaagtaaccttttaggaacattctacatacctttaatagaggttgagtttccgcatatattgttattattgatgctgggattgtttgctgcaggtgttttgaagttggaaagaaaatgaaatctagtacagtattaaatgagaatgagataaattccaatggaaataatagaggtaaaattctcaaaattatcaactcttttccagggataagatatagagatattctaagattaacaaatctcaataacggcactttgtcacatcatttatccatccttgaaaaaagatcaataataaaaattggtaagacagaaaacagtaacattaccagatactttcccgcctcgacaccatcggatgaaacccttattctaagttacttgaagataaagaccactaaaggtataattttgaagttactatatacccaggacgaaggcgcatcgtttaatgagattgtaaatcacatcaaaaaagccccgtctactacttcttggaatctaaaaagattggttgattcaaaaattgttgtaagaaaaagaagtaaagaggtttcattattttttcttcttaataaagaactggtagaaaaacttgtaggcgaaaagaacaagactttacttgatagaagtattgataattatatatcaattatagacgaactataaaatcattattgtaatttggtgctgaagcaacatctggatttggacttgagtacagggcatgagggctcacaaagtactgtatgatgcgatatcacatgatacaatatcatttcacatcttagaaagcaatacttgagaccgcaaaaaaaagacaacaataatatcattattttactttatagttttccagtatgcaccactcagccgataatgatggccctgacaaggtccatgaaattaaagataaattagagtatctttttgagatgcaaaagtccttgataactcaagattataacagtacaaaaaataaaggtcctcaaaagatttctgaagataataaccctgaaaataagatgaagaaattatatgaaatgaaagagcctttttccggatacagaatatttatgatttcttctgcactagtgcacgaagctatagaacttcaaagggaaacaaattggaaatggtggaaaaaagataaaattgtagataacgaaaaacttcaggaggaaataatagacctgtggcactttttaatacaattatctattgaggcagggtttgaaccacaagtattgatatcaaaatatatggaaaaaaacaaagaaaatactggaagacaactacgcggatactaaatacaataaccaatgttttggtcataaaatgcaattcttaaggattaacccaatatttctatttcttcgtactgacccttaactgctagcagaaaaagaatcttcctcaaatatcagtaaccaatcacttgttccaataacgggtaattttctcaccaaagtttttccatcgtttagtgtggtttggacgtatacatgagaaggcagctctgcatctttgttttttactctgataaggtcgctctgcagtttaatacctcttgttcctggctgaatgtttagttttctaatgttgccatctctgtcttgtatttttgaagttacataactttggccgatatcaaaatccaaactcaatgaaattttgatcctgcattggttactttgtggaatttcctcatgaaggagttccgattcttcatcaaaatagatggcttttttcaataatttataatggcggtattttatttaataaaacttttcatattgaagaaggttagatgaaatcttttagttattctaataggggctatgctaaattttatatttgtggttataaggtatcttttcgtttcccttttcttttttattttccctagcctccttgcctctcctctcttctcctctcttctcctctcttctcctctcttctgtcctcttaaccatccatactttcatctacattttcataattgtaactgattttgccaatcttaatatgacatgagatacaaatattcattgtgtagagaaagggcatgcaatattctaatatacccgaccaagatatcgttataaagaatgtaacttttcaagatattgataaaataattgaattgcaaaaagaatcatttccatccatgttagaagaaggcagcgtttggagagaaaagcatcttcaaagtcacgttgaaatatttccagaaggtcaattttgtgttgaatttaagaataagattataggttcgtcaagtagtttaatcgtaaggttaccctctgaatacgaggtacatacatttagtcaagtaagtggaaatagcctgtttactactcatgacgctaatggtgattcattgtatggtgcagatatctcaattcatccggattttcgtcgattgggaattgccactttgttatatgaagcaagaaaagaccttgctataaaatttaatttaaggcggattatagcaggtggtaggttgatcaattactgtaattatgcagatagattgccagcagaagaatatgttcaaaaggttatcagtgaacagatctcggatccagtattgacctttcaattaagaaatgaatttaaatttataaagatacttccaaactatatcaaggattctagatctctaaattatgcaacatttattgaatggataaatccttattataaaaagtgactcaaaccatcatcgattgccacgtacatgtaaacggctacgagagcttaaagaacctgactctccaagaaagaatagaatcgctttcagatactatgcagtcaaacaatgtagaccaagctataattttatcctcatacaaaatcaatgatgagagaccatctacaggtgaagtattaaaatttgtggaaaaatatgataagataaaggtagttgcaggatactcaattagcaatcatgatgaagatagtattacagaatacaatgaatatcttaaaaatggtaaaataaaaggtttaaaaatttatccaggatacgaacattactatccgtatgatccgaaatatcagaaaataatcgacttgtgcatagagtatgatgtccccctaatgatacatactggagatacatacacgcccaaggggaaaataagatttgctcaccccataaatgttgacgatgttgcagttgataacccagatttaaagatcataatttgtcacttgggaaatccatggttcttggattgccaggagataatttataaaaataaaaatgtatatgcggatatatcaggattggttttgggagaatttacagaattctatgaaaagtatctagttcaaaagattacagattttctcaattatgctggagagcctgaatatctactttatggaacagactggccaatatcgagtatgaaatcttatttgaattttatgtcaaagttagatcttaatcaacaggaacgtgatttaattatgttcaaaaattcacaaaggctttttaaattatgaattaagaattatagcctttatcagcattacgttagaaaactgcccttatttattgtaattaggaatattcaagataactaggattacgggataactcgatgttttcatttttacttactttgcgagtcaatactatttacaacagtatattacagtaatatgactgaaaatataatactgactcaatttctttttaattaaaagttctatggtgtttaggaaaaaatcttaaaacactagaaagacttttggtaatcaatcaaagacacgcacttcttttgttctcttgcagtttgagaatgagtcttaaggattgataaccattatttttgaaggcctttattgcaatcaaataacgctgctactatttgattgagttcctatagcagtattaactatttcagcgatacctgatgtttctgaacctgaaccactgctgtcagaggaaccatcgctagaaccactgctgtcagaggaaccggcacctgcacctggagatgagctacctgatgtttctgaacctgagctacctgatgtttctgaacctgagctacctgatgtttctgaacctgagctacctgatgtttctgaacctgagctacctgatgtttctgaacctgagctacctgatgtttctgaacctgaaccactgctgtcagaggaaccatcgctagaaccactgctgtcagaggaaccggcacctgcacctggagatgagctacctgatgtttctgaacctgagctacctgatgtttctgaacctgagctacctgatgtttctgaacctgagctacctgatgtttctgaacctgaaccactgctgtcagaggaaccatcgctagaaccactgctgtcagaggaaccggcacctgcacctggagatgagctacctgatgtttctgaacctgagctacctgatgtttctgaacctgagctacctgatgtttctgaacctgaaccactgctgtcagaggaaccatcgctagaaccactgctgtcagaggaaccggcacctgcacctggagatgagctacctgatgtttctgaacctgagctacctgatgtttctgaacctgagctacctgatgtttctgaacctgagctacctgatgtttctgaacctgaaccactgctgtcagaggaaccatcgctagaaccactgctgtcagaggaaccggcacctgcacctggagatgagctacctgatgtttctgaacctgagctacctgatgtttctgaacctgagctacctgatgtttctgaacctgagctacctgatgtttctgaacctgagctacctgatgtttctgaacctgagctacctgatgtttctgaacctgaaccactgctgtcagaggaaccatcgctagaaccactgctgtcagaggaaccggcacctgcacctggagatgagctacctgatgtttctgaacctgagctacctgatgtttctgaacctgagctacctgatgtttctgaacctgagctacctgatgtttctgaacctgaaccactgctgtcagaggaaccatcgctagaaccactgctgtcagaggaaccatcgctagaaccactgctgtcagaggaaccatcgctagaaccactgctgtcctgaccagctgaaatacttccttcgttatcctggctttgtactgccacattactaccggatccaagactattaaaaggactgtcaacagtatcctgcaaacctaaagatggttcatcggattctacgttggttggattcgtagattcttgaccgttatgaggttgatctccaatttctggctgttccattagttcaacttcaggtatgttcgaagtttgattaggttgatctacaccatagcataagccattaggtaacgatgcattgcaagcattatggtcataattattatcgtttacgtttgttggtaatccatttgcattattgatacctatttgagtatcttgtttcaaattattgaacgtaatactattattatgactttgagcatcagtgaaaatgccattcaaggacccctgaactgtatttaagtagatgtcattgttgtgagaatccacaagggtcgcaccacctaaattatttgattcaaagaagtttgttactatatttgaatcagatgaagaataagtggcaattccaatattattgtcgcttaacctgttatccatgatattagaatcggtagaacctgaaacaaatgtcccaacatgattatttgtcaaatcaacggcggatatattgctgttttctccagaggtaattaaaacgccagcttgaaagtctgatacagtaccaggacctttaaccgtcacattctttgtatcagtaaccattatccctattttagaactgttttgaccaggaccggttacagtaaagccattcaaatcaaccgtaacgtcgccgccactcacaagaattccgtcagtcttacaattgagattggctgttagttgtacactctcgtcaatcacttgtccgcaagaaatactaggtacactagaaccgttcatatttccactccccatcggtgatacacttgtttcagcagattccccaaattcattgcaaacatcgtttgtgataggtccttttgactcgctgtcaccatcagggcttcctacctgatttactttaggttgtggagtagaagcagaagaaggaggaggagtaattactttaccgggtttaccgcttggtttagtattagtagaactttcactttcttctccattgctttgtgagttgctgtcaccatcagggcttcctacctgatttactttaggttgtggagtagaagcagaagaaggaggaggagtaattactttaccgggtttaccgcttggtttagtattagtagaactttcactttcttctccattgctttgtgagttgctgtcaccatcagggcttcctacctgatttactttaggttgtggagtagaagcagaagaaggaggaggagtaattactttaccgggtttaccgcttggtttagtattagtagaactttcactttcttctccattgctttgtgagttgctgtcaccatcagggcttccatgcatttctggagtgatccctggaaatagggtgtcattactttcactacatagaaaattcaaactagaactgccatactgattaccatagtattgagctattacaaaattattttgtaagatactcgatgaattggatgtgagtaacaatgcaagcatcaagcctgatattacgatcatactcttgtttgtcaatgtttttccttgtttgtttgaaatatatcgattaatggtatttgctctctagaaagaatcagatggtttttaacaatagattgttatttagttaaatatattacgaaacctattgcgttgtaatcatagactattttctaatagatagaacaaagagaatatggtgtagctatgattgacttatgctttagtgttcttatttattcttacaattgtatttgatatttcccaggtttgattatatttgttcagtagaatttcgtctatacactcgtcagtgagctcatattcatagataggtgcttcagatatcaagaattagaaaattctcggattggaatgcattgattttagcctcagagaaggtattagagttcattatgagatattgcaacttacatttcatgtaaaaagataccatatttctatgtaaatatatttagtaatttggttgaataagaaaattatagtagatgaacctaatacaggatattttgtaaaaactcggccaaaaatattacttatttggccttttgactttagacaatactctaatctttacgttgtaaattggatccccattttgtaaatatagatctgactttgtaactcctgcaatagtatttttcaatcttactcgagtatcgtcatctagtaaatattcattccatttttccgatgtggtagaaaaaactatctccttattataagatgattccacctcctccttcgtatacagtttcttatgttgttgtccggtggctttatccgaaaaaatgaaagactggatagactgaaaattaaattcatactcttttgatgggttcactgttgattttttcacgccggttaatactaccctacttttgagttttgtgtcatcgcttagtaggtatgaatcccaatactcctttattaccttaaaatccagtgtaacgaattcactcatttaggttaagtctcttcaatgcatattttaatcaatccagcagcccggttagccaaatagacgatcttgatgtaaaaatctcagaagaaagcgggatcaacgcatttgcagcattcatatcttttagtttggaaaaaacaaatatcataaatatataaaatttaataccataaattgttcataccaaagtatctaaaaactgaaatggatttgtattccatattctaaaatatgaaaggaaatagtaattttgagttttttattatttctttgactgcattttccgttttcctaatattgcttcaatttttttatgatcctcttggtcaagctttagtcgccgtatttgtatttgatttcatcgtatcaattattttggcgtttgactttgcaataagaataaaaagatcaaaaaaaggttacaaatattttttaacccatttgtatgagattcctgctttcatacccttgtatgctcttactttactagaagcaaacgttgtgtatggggcgggactgaaaagcttgaggcttattcagatttttagattcatgcatgttttatccagaactctaacaataatggacgaaatcagaaataggcttttgtatattgttttactatctatgattacagttacagctggtgcatttaccatgtatgttgtagaacataatgcaccaggttcaaagataacaaacctgggagacgcagtttggtgggcggtggttaccgttactactgtcggatatggtgatgtataccctgtaacatttgaaggaagagtaattgcgacaataataatgattattggtattgcaattttaggcattttaatttctactcttggggcacaatttatcgagtcaaagataaaaaatcagcgcagaaaggatgaaaataatatcaaactattgattaaggataaaatcgacagactagaaggcctgcaaagtgaggagattgtaacacttttaaacctcatttccaatcttcatggggaacttaagaacaatagtaatagcacccaagaacaaggcgtgttatgcattaaatgcaataatataaattctcaagcggcaatctattgtaataaatgtggtaataaggtaaccaccggtaacccataaaaggtattcgagggctggtggttcagcttggtacgaacgttcgattcgcaatcgaaagatcgcgggttcaaatcccgcccagtccatcgcttatagttcgaaaggtctcgctttcaaattaccagcaacttgttaaaaatattaagaatatgataacaatttcaattgaggatcttatccaattattaagaattttcttaatactatcagtagcaccttgtttaattgtggtagtttttcttaaaagtaaaaattatttcttaagagattaaaaactcttcttaatatattaaacattatggaaaacataatgtttaatatattgtattccataatacaagataggaaatgtcaaaagtttatactgaaccatcaaaggacatcaaattaaagaaaaattggataagcataggtgcaagtattaaaaaagacgatgtagacttattcaacagacaactggataatttatattgcaagacattgaaagatttatgcaacctccttatttgtgggaaactgaaaagaatttcagatgatgaacaagtccaaactatgaacatgcaagttcagtcctcaggattagtgacagcacaaatcggccagaaattcgatttttggaaacaaatagatgatcaagatttacttaattggcttcttggaagatatcatcctcatacagcaaaatgctactatagttactttaatagatatgtcgagttgttttttagtccatctgttgatattgagttatttaaacttgcaaaacacaagcgctcttggattctacagtcaattaagcgctttggggatttctatgccaataggtatggaaacaaagaagtaaaaatattgattgcaagaattattgagaggtacgatcttaatagggatttagatcagaaggataggatatacttagtaagtcctcaatttgtagaagagaaaattaacaaggtgataaagatgaccggtgatatcggttttacatgtaaggtaggtttgttttcaggtttaagagaaacagagatttgttatatcaaaacaaaagaaatctgtaaacaatcttttggatgtcaatgcgatctattgcatatttttgaatgcagaaatggattaaccgtgattgcaataaactggactcgaggacagaaaaaggcccttgccactataatacctacccacctatggaatagattgagaactatggaaaagtttgattataatgatatagcagcagctcataaaattcttaaaagagaaacaggaatcgcatatattgtattaagaaaaattcactacaatgtaatcagattcaaaaacgccttcgatctggatgaagctgaggtattagcagggcgattcaaatcagtgagtgctagacactatattttaaacgatcccgaaaaaatctctggtaaatatatttcagcatggcaaaattttggtgtatcaaatttttatactgggtaataaaatccaatggaagtaaaaaaccatatagacaactaagtgtaaaaatatcaaagtagtggaaaatacaaaggaagaggatccaatatccaaaaacatatggaaaaatattgtaaaattttatgattttatagagggagctcaaatatctaacagctttgttattctaaaggttttgtatgattcagaagatcctcttagcactacgcaaatttctcaaaagatatcatctcattctgatggaaaacttttcaaggtttctggagtccttaaagacacacttgagaacagattacgcaaattaggatatgttaatggagaagacattgcaaacataaattcaccaaaaaaacctatcaaactgacactttattcaattacaccaaaaggtaataaactattgaaaggttggatctcttttttaaaagcatttgattaactaattattatttgtaattttaaaatatcgcttcattacttgtggctgcttttaatctaccccatgacagttttgtattttgtctaaaggcttcaaggatcatttctttttctttgatctctttctctttttctatcatttctgcataaattagactcaatctagttgttatgatttctctagtattcaattgttcctttttattcatcagcttcatcagtgtatcctgagctttaagcaattcttttggttctaatttgggatcatcaagtaaattccaatctttacgtatttgttcgtcaactacaagcatcaattttagattttcttctatcatatattgcccaaagttttccttacgtttatttatgatgttttttaaattgttaatgtcccggcaaagggtaggttggctaattcgtaatttggtactaatccttccttgggaataatttcttatatacagttctttaattttgtctctgcgccattcgatctgttttttatactttttggcagttaaaccggatctgagatttttgttttttttaagaggatctttctcagaaagtataataagattattactattgttgttattattattgaggttattaaattctgactgttctattttatcattgtcgttattcactattgtgacaataagtttttatcacttttaaacaaagttgaatttttttgtagtgcgctttggatcaaatactttctgaaaattattttttttgataaaagatatgtcccttgattctctcggctgaccaatgtacaagttcgatgatatttcttgttgaggatatatgcccccgccaataaattcttgtactttattttgacgacattgaatctgtttgcggtatttatttgtagtaactctagatcttggatttactttaagaataaaaatattggattctaccacgtggctatgtattatataataactctaaatttttatgtttttatataatatgtttcataaattgtatttggctatgataaagatatagaaggatgacaagaatacctctagctggccttgataggcatagttcaatatagtgtgtagaataatgaaataatttaatgctagtatatgccaattgcatgattctcaataaactctgcaatatcttaaaatagttactctatgcaaatcaaatattgaataagtatcttcatggccatcaactgatcataattttttttggattcattcttgtatctcagtttctttactcttttcctaccaagcttgtttatgctcaagaagaatgcatggtcggtgaggacggtccaatctgttttggagatgaaatcgtcgttacacctgatcctgagatttatccccctggagtaacaccgaattcaccaggcgatatttccaatgataaaactcgcaatcccggtgaattagatcataaacctgtgccattagaaaaggtaaaaggttgtaaaagtggagaaaaatatgatcttaatttagggtgttatcccgatatttgtggagaaaatgaaatctatatcgaggataatgagccaccctgtaccctcgtatacgagtctagtaaatgtccagaaggcatgatcaaagttactggaggttgtgcccaattgaccgacttttctatttgtgatgaaaatgtcaacaatggtgcagtcatagatagttctttgaacgaattacctatggataggaagatgcatacttttcaaattgtatatcatcccaatttacttacagatgtccaatatcctgatccttacatcggaaatatattagaagtttcaaatcatcaaatcgaagggaacatctttgattcaaccacgctactagaggaagagtcattacctacagacaatgaaacatttgattcaaccacgctactagaggaagagtcattacctacagacaatgaaacatttgattcaaccacgctactagaggaagagtcattacctacagacaatgaaacatttgattcaaccacgctactagaggaagagtcattacctacagacaatgaaacatttgattcaaccacgctactagaggaagagtcattacctacagacaatgaaacatttgattcaaccacgctactagaggaagagtcattacctacagacaatgaaacattagctactcccggcgaactgtccaacagtttggcatcctctgatgaacaaccattatcatctcagcaactacaagtaattgaacgattgaataagctttctgaagctgctcgaaacgaaggcaatcctaccttcgcactagcaataagtgatttcacaaataacctacaaaatggcctccgttacaattcacatcttcctcaaattcaaatcgtcctcggtgcattagacgagtggaaaaatgatccaggagataaatggggaatcggtttattagatggagatacaattcatagtaggaatcccaattatgcatctgcttatcctaacgctgcaaaatgcaatatttttgttgctgaagtaatttatcttactacaggtaaagaattcaatatttattctccaaactctaaagatattcttaatattggtaaacataaaccttatgttgctgctgattggggaaatcctaagaaaccaattgaaggctttcaaataactaataatcctataatgggtgatatatggtcaaatggcgtacacatggggatatacctgggctactataatggaataggattgtatattagtgcacgagatgttcctatcgctccgggtataacgagtggggtacaacaagaatatggaattcacattaaagaacttcccccgaatgtaggagtctatagaacatatgctccccaataggtattgatcgtcccactcaatatttaccgtattacaaaagacaagcaaatagaaaacctatctgaaaattcagataagatgggaatgaaaacactgctcgatggacaatttgcttctgacttttacatgaaagcaaataccaccgacatgcatggttattatcttaatatcaggggatatcataagaatacttgccgcgatctgatatcctattttaggaggtttagagatgtgtttttcactaatcgagtggatgaaataagaagtaccactccaagggttcgttcaagaattatggattctttccgaaaatttggacaatactatctctacaaatacaataatgaggaatgcatagacctggtggagaaaattataagaagacataatctttcttcaggaatgacagaacacgggaaactctacattgtggatgataactacatagaggaacgggtaaaacagttatttgcagttgacggtgaaatcggtaccatagttaagtttggtatgttttctggtctgagagaagatgaaatggtttatgtatatgacaaacctatttgtcacgatttatagggctgtaattgcagtaaactgcatgttatcgagaaaccaaacggcctctcgatagttctgattaattggcaacgtggtaataaaaagtgctatttttccattatcccaactaataactttaattccttcaaatccttagattcgtttgcatacagaccccacatccggtctgcccacgagtatatgaaagccaaaactaaagacgataaaattacctttatgtggcttagaaaagcacattataatgtgatgtgtagagtaatgaaaccattcgaggctaatgtattggcggggagagccaaatcggtggatgcaaaacactatgcaatgtatgagttagacgagatgtctgacaaatatgctgaagcatggaaaaagttcgacgtgaatattcactaaaaaaagttattaattttttttatatggttcttttctaattttgtctaatcggttgccggtaacccttattatttttgtattatattattagatgcagttaacctgacaaactcgaaggaatttcacattgaattatgatttctcactaatcccgtaaaccaaatagatctatgaaaatcttttatttttcttaattacggcaatttttttcattcaataaattgtacatggagagtgataaccatgggcctaaaacgtcattcaaatttctcaaataatattatcttattctgagcgaaaacctaagtttcaatagttgtcaatatactctagaaaacagattacgtaagttaggccatgtaaaaggagaagatatcgcaaatatcaattatcaattcttcaaaaaaccgattagatgaccctaattcaattactccaaagggagagaactgctaaaagggtagatttcttttcttaaagtttttgattgatagccaaacacagggaaattgatagtagtgttaaaacagcgctgcttcttccttctcttttagtattttctttctataacatttgtcaaatccttctgcagtcatatgtttggtataatctaactggattttatagtccttgaaatatttctcttttctgtttagttctttcactttttcatctatttttatcatatatggcaaaccttgaaataattgtatcctcttgttataacaatcatttataatagtcataattttactttctcctttccatcacaaccctgactgtgagttttaacgttcttcctgttataaaaagaatttatacttcaactgtattgctaaatcgtggacaacagtcacaaacttacgttaaatagacccagtaaaatatttggaataataatagttttagtgtctcttattacgtgtacggttgtaggtaataatgcgtttgctcaaacaacatgggaaactttcaaagagaaggatggactttattcattacagataccatctaactggatacctcaaaaagtaccagaagcggataaactaacaccaataaatgaccaattcaactattatggaaaaaactctgaatcggcacctgcctggttgaatataaggctctccgaatccctatattataatccaactgattcatttgagtctataatagcagcctcttcgagcttcgaggattacaaagtattacagcctgttgaatgccagacctatacaataaataaggagcaagcctgttctttaatagagactttttaattcgaaggtgaagatcaggtaacaaagatgttaagtgttatggttatagattccaatggtatcgaatattcggtaacatttgcaggcaaatctggaggctatgatcagtttttgcccgtggctgaatacatgattagtaccataacctttgacaaagcaaaggtggctgaagctttagagatagatttatctccagtaaatcaatcaccaacaaattcaaatttgaccaacccaggatcggaactgccagaaattccaaccaattaatttttctttttattaaattatcaatactagccgaaccgaattgaatgaacattcaaaggttaaactttacctttctattagttgcataaaaaaatatcaattgattttaagttcattggcttttgtgttttagaatgttaagtacattgcaacttatgattagtttttttaacgatcataaattcattttttgtttttaaaaacattaagaggagcttaatggaaatatcgaatggaaactaatagattcttttaagtgttgggctattcattaatttttctaatttgaaatctgcgaagcatttacctatatgaatatattctttcaatgaggtttctttgtctttcaaattccaaaatcctatataaattttattcataaatgattattaagtcacataaccttatcgtattctacgaagcatgtatgaaatactagtagtatagatgcaaatttcaaactaacatttatctaattatttcctttaactaaaactgaataaaacacatcaaaaatgccatcaatgaaaataggttctttgagttcaccagcatattcgatagttatgaattttgtcctcgtgatacttcaccctacaagaacttgcggttatggcaaataaaagtttgatactttctcttaagttggcttccacaagctataaatgtcttaatattattacaatcatttacataataagttacatggtttgcaataggattaagaaaccagttataatttccgaatcataaaaaatactggcgtatgataaggaataaaaatattgcatcacagtgaatgatttacagacaaaattaaactttttactaggattcgttaaatgacttctttacctgatccatttaaggcctttaggttgttggttggctttatactccattaacatgtttattcattgctttgtggcgttgtgaacgtaagaataagtttatagcttgaaaatgtaatatttccttatgactagtaaagaaaacatacatcaccatatattgaatctgcagtctattctacttagattatccaccagaatagtatctcaagcatttttaatttgaaacaaagtcgagaaaccatgactcagatagaattggaatttagaagtagggttccagaaagatttcatcgaagataaaagtatatcttagaaatcatggttgatgatagattagttaaggttgattcagaatttatctggttgtgtatagttatgggagcaaaaaaccaggaaaccctctcttgtaataccattcaaagacaggaagatgtttattgctaaggtttctgacaagtgtagttcagatttattaaaagcatcttctatcactcgatggtgggttctggtaccaaatggcatgcacactccttggattggagtctattattcattcctcctctccgagaactatatccgaaggaacaatttgtcaaatcaaaagcagctcagagaactcccaggcctatttcctatgcgagtgaagaattactaactagattatctgatcaattaggtgcaattctttgtcaactaccataatagtaagataaaacagccttatcaaaaggactatgatattactcagtaattttgatattttcttgaatattttgtaaaatgttttaagtcaacgaataatctttaaatcaccataattttgcgacattgtcctaaaaaccatgttttatagatgacttatccctctggtgggtagtattcttgagcataatattcttcggatggcggctgatattcctctggtgggtagtattcttgagcataatattcttcggatggcggctgatattcctctggtgggtagtattcttgagcataatattcttcggatggcactatattctcattacttgtatcagaggttagggtgttctcattaccgggtggaaggacaggaggttcggtgttaccagatactggcccagagtcatcgggtggaaggacaggaggttcggtgttaccagatactggcccagagtcatcgggtggaaggacaggaggttcggtgttaccagatactggcccagagtcatcgggtggaaggacaggaggttcggtgttaccagatactggcccagagtcatcgggtggaaggacaggaggttcggtgttaccagatactggcccagagtcatcgggtggaaggacaggaggttcggtgttaccagatactggcccagagtcatcgggtggaaggacaggaggttcggtgttaccagatactggcccagagtcatcgggtggaaggacaggaggttcggtgttaccagatactggcccagagtcatcgggtggaaggacaggaggttcggtgttaccagatactggcccagagtcatcgggtggaaggacaggaggttcggtgttaccagatactggcccagagtcatcaggattaggaggtattgtacctgctccagtatcaggttcaccttcaggattaggaggtattgtacctgctccagtatcaggttcaccttcaggattaggaggtattgtacctgctccagtatggttcaccttcaggattaggaggtattgtacctgctccagtatcaggttcaccttcaggattaggaggtattgtacctgctccagtatcaggttcaccttcaggattaggaggtattgtacctgctccagtatcaggttcaccttcaggattaggaggtattgtacctgctccagtatcaggttcaccttcaggattaggaggtattgtacctgctccagtatcaggttcaccttcaggattaggaggtattgtacctgctccagtatcaggttcaccttcaggattaggaggtattgtacctgctccagtatcaggttcaccttcaggattaggaggtattgtacctgctccagtatcaggttcaccttcaggattaggaggtattgtacctgctccagtatcaggttcaccttcaggattaggaggtattgtacctgctccagtatcaggttcaccttcaggattaggaggtattgtacctgctccagtatcaggttcaccttcaggattaggaggtattgtacctgctccagtatcaggttcaccttcaggattaggaggtattgtacctgctccagtatcaggttcaccttcaggattaggaggtattgtacctgctccagtatcaggttcaccttcaggattaggaggtattgtacctgctccagtatcaggttcaccttcaggattaggaggtattgtacctgctccagtatcaggttcaccttcaggattaggggcgatggtaccagaggtaggttgcgtcggtgcctgagaggtttgaccaaagctaagggagggcggtaaagtagctgaaccaaggtcaagcagcggaggtagcgtaatcttactaaagtcaattgaaggtgagagtggattaattttattaaagtcaattgaaggtgagagtggattggatatcgatgtaccagtatctttcttttgaagagaatcagaaacagttacaagggtattgagtcggttatagatattttctagaccttgttttatattattggcattctcatccagtgaatcagatcctcattgcttaaggaggatcctttggtgtttgtgtttgtagggtcagtgggtttgttgatgttgttgtttgtaggtttggtgtttgtgtttgtagggtcagtgggtttgttgatgttgttgtttgtaggtttggtgtttgtgtttgtagggtcagtgggtttgttgatgttgttgtttgtaggtttggtgtttgtgtttgtagggtcagtgggtttgttgatgttgttgtttgtaggtttggtgtttgtgtttgtagggtcagtgggtttgttgatgttgttgtttgtaggtttggtgtttgtgtttgtagggtcagtgggtttgttgatgttgttgtttgtaggtttggtgtttgtgtttgtagggtcagtgggtttgttgatgttgttgtttgtaggtttggtgtttgtgtttgtagggtcagtgggtttgttgatgttgttgtttgtaggtttggtgtttgtgtttgtagggtcagtgggtttgttgatgttgttgtttgtaggtttggtgtttgtgtttgtagggtcagtgggtttgttgattagcaaactagatatctttggtaaaggtacagatttggtaatattttcattattataaatattagcataatcaatattacatgcaagaactttattttgttctatctttttgaggttatttgtttttgataattctttcttaattgttatcttatcctttgaattgtttaaattatcttcgaggtccgcaatcttcttgtctattatctctaatttgtcaaagtttttagagcattcattaaaactaatatatacttcaactacccaattgtatttagttgacaatttcttattattattgccatctaaaagtaaagtaccattcgacttggagataaaactttcacttttccctccctgataccatttcgggccgattttggcgattagagaatctttggtaaggttagcaacttgataaacagattcgttcatcgttgtactaaagtttccatctggactaaattggattactttctttgaaacattaacgttcttttgaattttgtcttggttaagagatagagaatgtgctgaaagtatcaacagatcgccgttatgaatatttaaagcggtattggtgatcttatcatttacataataaggaccatattttaaaaagactttatattttaaaagaggagaggaagaaaatgctgttttattctggtttaaaaagtaatctgcttttgtagaggcggtattgtttgacatagcggttatcaatggtcgattctccgatataccttctccaattgagccttcaatattttttctatcaatattgtctgtcactttgcctaagtctattgcactttggaacgctggaggagctgtagagacattattgtcaaatgtcatatatctatctatcaaattatcatgaatagttatggacgaaagtagaatagattcgtgaacgttaaaagtagcctctgcgggttctattagtaataaaacattaaaactacatacaacaacgacaaagaaaatcagaaatactgctttgatactggaatatgaaaaagaagtaatatattttaaataaagatctctcatgtttcattcaatcgctctttgtaaaaagatatttgtatcgacaaattatgatcatttttatggaatttctggcaattccgagtcgggaaatatcgttgcattagaagaattattgttagatgatggagataattgttgttgattggaggcagaagaaccgcttggctctatacctatagtagaggctaccttatctgtatcaaatgttaatgtactaatcatatatttagctacgggtagaaatttatcatatagatcttctgatgctacaaatactgcagaatattctatgtcgttactatctattgtactaacgcttaatgcattccggggttgttcatcctcccgttggaatgtttccgttatagaacaagcttttatatcattaaacacaaaggtttgacattcaacaggctttaatagtttgtaattatcaaatgactgataataagaactaattccttccaaagattcagttacattatgatataatgattcaccagcatatacatctaaccaaacaaaagagtcttcatcttcggggaaatagataaaagtactttgaattggcgttgctttatccgcttccggtactttttgaggtatccagttagatggtatctgtaatgaataaagtccatccttctctttgaaagtttcccatgttgtttgagcaaacgcattattacccaaatacgaagaagtgacaagaaacaacagaaccatgaatatcggaaatattttagcgagtctccttaacctaagtttgtgactgttgtccacaatttagcaagtacagatgtgatataaattctttttataacactaaaagaatgttaaaacccatatttagagtggtgatagagaacataactcatgactgacgtattataagattcgtaaaaaaagaccctataaactggatttccaagttaccagtgtattcattttaaaatagtaattttacttcccgtcgatgctacttctgtatttatataatcaatgctctgcgaactccaaggagtagcaagtcagtattccttttatcatctcgaataaattttacttatgtatggtttgtgctttcaataacacatgttgatctaacgtttccgtaattttgtgaaatcgtcatacagtcatcatcactaaataatttccgtgaagaatctcgacagctgcttcatcccttatacacaatatctaaatactttatcaaatttgtctaataattaaatgttctaacacaggcacaattttgaagtgtttatctctgaaatcattagtatctaattaaagaatgtactattttcagtatcactgacattcttgtaacctgggataggggcaggagttgatgagatcgacgaaatattattcatatctgtttccgtggaattcgacaaatttgcatttaaaaagctattgtcaacaggtggcaaatcccaatcgggaattatcattgcattagaagaactattgttagatgatggagataattgttgttgattggaggtagaagaactgcttggctctatacctaaggtagaggctaccttatctgtatcaaatgttaatgtactaatcatatatttagctacgggtagaaatttatcatatagatcttctgatgctacaaacaaagctgtatattcaattccgtttggatcgatcataacaacgcttagttccttacggggcatttcactctccatttgtaaggattgtaccatcgaacatgccgaaagattgtttaaagtcaaattttcgcattcaaccggctgtattaatttgtagttatcataacttttatagagtgctatacttgcatccagagaatcctttacatcgtaataaagggattcgcctatcataacatcaacccaaacgaacgaatcttgattcacagggtaatagtaaaataaatcatcaattggagttactttatcttgctcaggtgctttttgtggtatccagttagatggaatttgcaatgaataaagtccatccttctctttgaaagtttcccatgttgtttgagccaatacataatttgtaagagagaaggaaaagagtaagagaactattcctaaaaagcagtaagtcatcttactgaatttgttactgttatacatagtctagcatattaaataagtattataaaagctttcaatgatacaaaaaaataatatgcaatgagatcgtgaacatatttgtcataaattcattaaattacgtcttaaaaagttgaagtccatttatcgataaatatatattaaaaggttaagactccaatgatttatgtaaatatatgcagcctggtccttatttattatcaattaatttatgtcttgtgtcattgctaattattattcgaccattatgataatcgtcaactatagagatattctcaaataatcaaaataacctattttcgttgctaaactctcagtagaaccatattacatgtatggtcttctgcagtattttgaatgagtaataacgacgaaatagtttataagaaaatgctgatactttatattggtttaggctcatcttaccatattgtggtctagtatgaattggtgtaataccgttacaaacgatgtgactaacaaatgccataatgactaggatgcccacccatgttgttgataatattcattttagcacaaaaagccaaattatccatatcataaagaaaactttgctcgcaatatgtctaaatctgacaactcattaatgctcggatttgctggaaaagttttaataccattaccagaactgatgccgccactgcaagttgataaactactaaccttgttcttattatcgcatgactttttttttatgacacactagaaacttctgaggattattatggcggcactccaaatttatgattgaatcatttagtagtatatacacgaaattgtaatcagtgtcaattctttgtaataccgatgaaatatcttttcgatgagtaatatatgacagatggaagaacgatgcaatgtgtctttcaaggtatataccaatatatggtaaatcattctaatagattgatctaaaaaaaatacaacttcagttatgagagagctttctatcatttccaaggatttttcgccctctcaacattagaaaacaactccattcaaaattcattgatttgttatcacattaaaaagaaacattcgtacaggcgtccacatattggggatttgaaaatacttactcctgccactacaattattaagttatctatcgaaatttgtaattcctttgttattttgagccattcaatatagtcgcggatcattacactatattatatcatgtcctagaccacccttttcttctgtcctcggtgtttcataataacattctttatctagcgtagaataagtatcctcgttattcaattctttattattgcgattctatactatatattcagaaataatttgatttacgaggggttttctggttatatgcccataaagtgagagttggatgtgggaacttattaacgaatgaaaaaatatcaaatggatgccgatagcttaagccaatagcgaccctttttagataagcgcttgtcataaatatatcatttgtcagaatcgagaatagcatctgattcaaaattcaagtctgttcactttcgatgaagcaaatgtaataatctttaatatttaagtgttaatacctttcgaattgaaggtataagatataataatatggtcactgcaatgaatccgacggtagttgttataattaatcgggaactatccactaaaggaatcgctaaactatttacaatttcgttaaaatctcttgttaattcttcgacttgaatttttgaactggagtttttatcagttataagtatatcaagtgttctcagagagctactgaaagcaactatttcgtcggttgaattccgtgattgtagctcctccaaaacattaaaccaattatcacttgaatcaatttcatcaatatactcttttgccttagaataattcccttcgttagtagccatcacaatattttctatgttttcttggatagtagaaatttcatttataagcaatggatgcgatccattatcaccatagctcatttcttgtgcattagcattataaccaaaacaattgtaataaagtaaaaccagtatgaacaaagaaatcgtataaatgactttttccgaactaagttgaggtcgacgaaatgatactttcattattttatgcccatcttggatcaatagtagaaaatattacaagcatcaatactatcatcaagatatgaggaacagaaccctgtattgttttttttctgtcgtgtcctgtcaaattctgggatattctatatgtgatatatccacctacgattaaagagataatcgactctggaatccatttcagggtatagacgtcagaagaattaatatcaattagtgacgcaggtaaatatagataaattcccacatattgtaaccctgcatttatataagttccaccattaagagcaacttggccaaagatggctcctacaatactatagatagcaaagattgccaaatatccataagcaaagtttgcaaaatttcgtttaaactttatgccagaaatcctacttgatactaataccgctagtgagtaaagtccaattgttatccctattgacatgacgtaacctattaccccccgttcaacctgtctttcagttagaaaaggcattaactcttttatattttctgaaagcccttgactaaatcctgggaatatcgaatctactgattcatgccacaaataagtactaaaaatccctatcaaagccaagatggtgaaggcttcatatatattgggtctaaatacctgccacaactctgcaaatggcattcttagtcttagtctcatgggctcggtaggtggacaagaatgaacgcatttcatacacatgctacatgcggaattgctagtcatagtagctggatgttcttcccaagggcagccttcaacatgtttgttaccattgtagcaatcatgagttttgcaggtcttacaagtaggatcaatttttccaactccaactatgcttcttgactgtggattagtgttctctttagataatagaggaatttcttttattatcataggggataatttagctaaagatggcggattttcctccctgtattcatgtttattagtcatgtttgaatgagtagccattgtctttgttctcacttctattggtgcaacgcgggacataactgctaggggagctgaaataggacatatgtacttgcagaaaacacggcctctaaagataagactcacaataattgcaacagcaattacgctaactatccagatggccgtaatcagtggctcccgaagaacatttatcccaaattccctaaaaccccaaagagggattagaaaagtcaaaagtggtaatccccaattgcataagcgccgagggaacttgcgctctatactaaatctattaaatgcacctgcaattgctccaactggacatacagcacaccacgatctaccaaaaaaatatagactagcaaagataagaggataccaaaagaccccagataaagataaggtaatcaaattttcatcggaattctctgagcctacaaaaccgtcataaataaaaattgatagagccaagacaagcaaaatttgaaatgtcaatggataacatttgcttctataaaacctcgcgatccacttgtaattaaataaatctcgtttttcctttatattatttttatccggtttcatatttacagaggaaattgccaattattctctaaatttataaaatgtatttaagtgttaagtgttccatttctttttgatctgaacaagcaagtttggatacatgagtcaattactttaggtttaacatatgataccaatctatatacatcaactaataaaacacaattttagaatttgacattaacttagacattagtcctagccagattttagcaagtcaatgattagcctgaaattttatgcaattgaagaaatgcataaacaaattatgattctattagatggaagtagtattagctttgctattgatcagatggtgatggtagataaatcatcttttttagaaaagtaatgtaaactattttactcaaaaggtattgaatttacgattgtaacctgattcaattacaattcattctacaccttaaaaccatttagggctgttttaaccttattagtagccttaggatagatttcgatttattgggtatttattgaatggatgaacggcattgggaaaaatagcagaataatcattaaggttataaattaaagtcataatagtgactgcaagtaccgcataatttaccaatatatgtagcaattcgttgtcttggttgcagttcaattttagttaaaacgtgattactactcactatcctgaactaataaggtatattagaaaatatcatcctctaaattaaaaattaaaaagaaagagaatgatgaacatataattaatgaaactttgattaaatttgggttggagtacatcctgctttcggttgttatagatccaaaaaagaagcaaaatctcgcaccaaatatatccaaggaactaatgccctcctatcagaaggacttaattccagtttagccagaattcattggaaatatcctgtatcaacggacgcaaactccccagtcagacagtgttgttcctataggacattctgaagatttagactcatagtcagtaacagtgctattatcatacgaaggttcattcataatatctaaaccagtagatgatgtattattaggaattgttaaagccgacgggtcctcttcaactattccttcctgagttgaagaaacactacatgattctattgactgactactagaatcacacaacatatcaccttcaatgctattattgctatcttcacttaatgctagaggatcttgaatagaattgctatcaaaagaaatcgattcatttccaaacaactcattatcgtagttaatttggttatcttctactgtactagtattttcggataatgatgacggtgacagtgtctgtgactgtgatagaggttcaacactttccatcaagggttcagcagaaaatgatggttctaatccttgttctcttgggccttctccttcttctccttcttctaatactggtggacctacgtcagatgaagaattattatcagtgcttgaactattcaagtcatctgttgatggtacagtaagaggctctaactctgatgtaggtacacactggcctgttgattcatcaagtatcgtacctggttgctgttcttcacaaccatctgttgatgatgttattgatggttcaggtggggcacatatacctgttgtctcatccattagagtacgggatcttcacaatcgtttgcagtgtcatttattatcggtacatctggttcagacattggtacacactggcctgttgattcatctaatattgctgaaggatcctcgcatactacaggtgatgttacaggcatatctagctcagatgtaggtacacactggcctgttgattcatcaagtatcgtacctggttgctgttcttcacaggtatctgtcgcaatggatggtggcggaggtgcacatatacctgttgtctcatccattagagtaccgggatcttcacaatcgtttgtagtgccatttactatcggtacatctggttcagacattggtacacactggcctgttgattcatcaagtatcgtacctggttgctgttcttcacataagttatccgtaacattacctgccatatcagttattgatatcgaggtttgatttgatgtgttagaggtagatgattggagggaagatatagtatccattccgcatttatctgcctgactagtcacacacagtgaatttaccattgatactaatatatgattccaataaaattgaaaccaatcggggactatctgcccatcaatgagaacttttatctgtggaatataataagttatcatatacatttgttcgttattggcaatagaatatgcatgagcaatgcggtactccctattgcctttcatatagtaatcaacatatttgctctcaaaaccttggacttaagatgaatatttcaggtcggcgttatagcttgttatggtaactattgaactatgcattctttgtgttagaaaaggactattattctgtcgtaaccaatccttaatatcctctacactaactccgggatttaatttataaatatcaacatcaacaacgatgggtaccaaactatagccatcattatattggtaactaaatcttacaagcggctgttcaaatggccatacagaactgcttgatggatattctttcttccacgtggaaggataatcaatactaaatagaatattattctctttgatccagttaaaggattctatttgagaatgtgatatatttacagaagtaggcaaaattaaaaaaaaagataatgcaagaaggtagataactattccagcgaaatacttaaattttaataaggttaccaaaaatactttaagtgaatctcgattaaagggttctctcatagataaaaacaccatgttgatgtttatcatttcattagccagaatgatatttataagaatggttattaagttgtgattgtctctgaagatggtatgccgctgtttgataaagagtcggtactttactagtatcaatactttcagtgatattgttatctatatctgtttgactaaatgtatttattaatatgttgtatatggacaaatacccaagttcggatgttgatgtcactttccccctattaaaatccgttgtaactatcttatacgttgttagcaagatctctctcattaagaacatttgaagcagcacagatataccatattctagaatactaccatctattagaggaacgggtatttgatccttttgtattacattttcacatcggtgtgtcttgataaataaacagacatgtttatttatcttgcaagcattatactcatttgtttggatcaaattatatttggattgatccgagtacgttgtaataatgaattgaagtgaatttttgagactacaaaaaggaaattttatagcatgtatttccaaaatcacaaatgaatacaggttctcaggataattgatagacatataatctattagaaatattctgcattttttggatgccatgtatacagaccagttagaaggtatttgtaagaaatagagcccctctttatctgtaaaaggtttcccctctctacgcgagaaggaatacttggttgaggatattgatgatgttttcaatgcagacaggctcattattgtgacaaacataatagtaatagaggtattcatcctgggtgcacgagatttgtaatctctaatcatagatcagcaaatccactcttatataaaagccttattgatataagaatggtacgaaaaaaaataattttgtataaatgattaccaatagaaaggttagtttgagacatggtaacaccttctttcttttatttctgtccggatctgaatctaatgtatctaggaattgaattaccaacgactgtgaagctattatatttcttctaacagacatattaggaagagcatctttgagctattgattcatcgataagttaagctatatttatcaaaaaaaattttagaataactggtctagtatatttgtacttgagcaatttgttttcatgttttgatatatgattgccaagatataatactagattaagatcagttattacgttttggtttctaacggttaatatgccttcatagtactactgtttcctgaatcccaatcaaaatgtagtaagcaaattaggtcctgtcagcttttatttaccattggacaataaaagctgttaagctttgctcagattcactacaattatcatctgaaagggttgtcagaggaatctgaattgcttgctgagctgtctgagaaagggttgtcagaggaatctgaattgcttgctgagctgtctgagaaagggttgtcagaggaatctgaattgcttgctgagctgtctgagaaagggttgtcagaggaatctgaattgcttgctgagctgtctgagaaagggttgtcagaggaatctgaattgcttgctgagctgtctgagaaagggttgtcagaggaatctgaattgcttgctgagctgtctgagaaagggttgtcagaggaatctgaattgcttacaccacgattatctaaaatggacttggagtccaactttattgtcttagtcatgtattcagcaattggtaaatacttgttaaacaaatcgtcagaagcaataaacatagttgaatattcattccccataggatcaatcaatgtagtgaaggtaatgattctttggttagtctcaccttctggcttaaaagttattgttacggtacatgctggcgtgttatttatcgttaatgattcacaatctatgggcttcaagaccttaaatccatcttcgtccttcattatatctgcgaaaaattctgcacttgctttagaatcttcattcaccgcatctatgacaccaaaaaagttcatcttggcatatgaactatctttggagggatagataaaagagtcgtcaaacaaaaatgaaaattcattatcttttgatggtatcttttcatgtgtccaattagatggtaattgtaaggagtagattccgtcctcttgattaaaagttttccactgagcttgtgctggagaatagtttggaattaaagaaatcgtcaatatactgattaatagaacaacatacctagagacagacttatatttgcgactgtttgtcacaatttagcagatcccataataatataaatgctttttcaacatataatgtgaaaacgacgtgtttatttacattattccatttatagcacaagaggcgatctataattttattccacactacttaattgaaactgggtgataatctattctattctcataattttatcctgtctagattaaattgcattatattaaaaatctatcaaatccttaaccatcaatttagcacttactctgggcatcctgcggttataatgaaaaactagttgtaggatctaaacggagaacagctcgatagcacctatattatcattccttttgggatacctcgtctatttttgagaaaggtcatatggatgacatcccgtagctttgcagttttactctccttgagtagatcacttgacggggtgctgactcataaaatcaattagtttctgccattctaagggcgtattcttgtatctgaatatgagatgtacgagtaagttcatatttgctgtttaaatcaactatgattcttcgtacaatcgatagtcagctaccattgaatatattttctttaatgtttctagagatagatatgatcacatatatagataaagaggtttctcagagacttggccgttgtaacatcagatgtgagaagttcaggaatagtataatcagtgctagatactaaatggaaatcttatggtgatatccatctttgatttgactataacctccccttgcttatttattccctctctaggtatagatctctctttcatggatgaggtgtgcagtcaacatggtgtttaatatttacagtacattagtttgaccaattcctcaaaaaatattatccatagtttgaaatctgctcattttccagatctgtatacaaatcattctcaatgaccaaatcaattatacatcttttggctaaacatgctaaagacaaactattacttttagtatccttttggaatatagtaaatcaagatcaaaaatttgcagttataattcatttgaggcggaaaatcttggatacagactatatatcgccttacaatgatggtgacagatatacataatctctaactcatttatgatgatgacttttgatgtagttaaatgaccgagcaattattccatccgtatacaaaatggtgaatagaatggatgatgatgaattaaatacattattcgtagatagtgtctatatcaaacaaaatatgatactctaagacacaatacttatttgggaggaactaggactagtattaattaatttaatcatattctaatattgatggtgcaaattaatttgtaaataaacataattaaacaagggtatcatagtaaaatgcaagcttacctcatatgaattccagtagttttgtttagatcagttcaatcttattattatttgggtattggacggattgtaattacgcataaaaattaaaaaaactcactctttagattgtagtttcaattatgaaatcaacataccaaattcctaggaattatcgattataaaattttgcaattaccattaataaaagttttatattataattcatttgagtcttataagaatgtcaaacctattacaatcattagcagaaacaaaaattacactattgactatctttgtaattgctgcaactatttcttttctcccagtacaagtaaatgcgcaaaattctacttctagtatgcctgaaggtttttcactattcgaggatgcagctagaggttactctataatttatccaagtgatgcacaacaagaagacgccgatgaacgtattctttttacgagcgaaagggatggatgggaattttcaattacaggaccgttatctttagaaggtaaaactttggaagaatttgtctatgatgtccacgactttagtgaatttggctttggtaatcttgcagatgattccaaagagttagaagtaaatggttcacctgcaattatgatggatagttcttttgatgacctaaaagggtggaaaatttttatacaaaacgacaaagattactatgaaattcatgtgtatgcccaaaaagatagattctcaccatatattgatttgttcaacacaatgctacaatcaataaccttcacaagtagttaggtacagacatgaatcaattgaatctaaaaacaatccttttcatgtttctatttgagccttactcaccggtactactgagagtatctatcgggtaaatgcaagcccattaatgtaataaatatcttctgatgcaaaactacttatctaatacaaaagatttattttaagagcccagtcattgtgacctgaagcaattcaatcgatccagaataatgaaaaactccttaaagccgctcctcgtggacctgaggtaaagaataaaataacaataattaatacacagttaaatcacatgatgccaaaagcaaaagaattggcaggttctaataggtcaaaaataattttggcggtacataaatatttgcaaaacagcatgggataataagcataaagaaagtattgtcactagtggcggtatttttagggtttcttacactagcgttgatattgttatcgcaaatccaaacaccaacgatctatatgacttagatgtaataatagcaaagttttctttatgatatggataattaggctttttgtgctaaaatgaatattatcaacaacatgggtgggcatcctagtcattatggcgtttattagcttagttttttataaaagagaacaccattagttatttttattagtcttactattagagaagatgattaagacatggatcgatatttgctacaactaccagacagctagataggcgtacgggtcaaatactctgccttcaaaattataaatctattccaaggtgatttagcaaatatgtagaaactcaatttattaaatgggtattaaatccaatgattttccattatgtaacttttctacaaaatttattaatgctatcttaatatgccctaacatttgggagctaataatgtagttaataccatagatgggcgcttcgcctaaagatggtaatattagcaaataccaaaatggcttggaactccatcatattattgataatattcattgtagggaattgtttgcaaatggaaatagtgctagcaaagaaagattctcgaaataactatacttaaataaaaaacattttctttggtcagaggtctctaacaagaaatgcggggctatctcgagaattggatctacgaggataggagcaagctatcatcaaatctgtagattatgaaaccgccgtgcaacctcatctatttatagagaatatctttatagaaagataatttctcatactaaaagaatggtgttaaagtttcgatgagtaatcccttgcagaacaaaaaattactgtttagaggtcaatatttagtgggataacatagaaattggggttaccatatacatctacacatttagttgattctcttctatttaattcatcggtcgttttatttaaaaccgagaaaactagcaaaggatttggaagaagcagaacatacgaaaacaggcaactaattacaaggaaagttattgaaactattccattgtttagtatttacaaaatagtgtattttgctctatccaacttgcattttaagttattggcaaaagatccaataatatgaaaggtatatttttttacaagtcaaatagacatacccataagatcatatagaatgcatatttattcaactaaggttgtggaagatgaatcaattaattcggactaatgctattgcacaattttaatacatttcgattatgaatatgctttcttttagtgagcttttcttgcttatttttatcggctggggatgaaaatactaatgatgggctctataatagatgatgacactaatctaaaaccataattgttattaaataaacagaataattatcaagtgataagtggaagcgcaacccattaataaacattatcttaactcttcttactaatggtaaagaaatttgattaatttattaatcaaattgattgtaacaaaattaatgagcaaatattaacacgtattatatattattttacaacaattgagttgccatcagaaatttgttgggtagatgacgcactagatcggccgagaagttaaaggaatgagatcccgctcaaaaggaactttctatagatgatcatgcaatccgatggccgttaatcaacctgcaatggatggatatattgaaactcactaatcggtaacatattatcggaatactaagacaatcaagtcatgattgttgaagagaaaagatggctcacccttaattcttaattgttagtgaattttattgatttcagcatggtatagaacatatccgtatatgattcaaaactatcttttggcgcaaatatttgaagttcataataatcagctccatcctgaacccaaattttccaccatctttgaccaagatcatcttctcgggtcatcatttgtgcgggcaacccacctacctgcaactccttgtcatcatccagaacattaaagcctaattctcgctcaaagtctgcaatttccttaactagttgctgcaaggtttgatcacctagtggagagggccccaataccccaaaactccatccatccttttcattcttaaaatgggtaccaacaggaacttcttctttttgtgcatcgcttggataaattatcgtgtagcctctagctggatcttcaaataatgaaaagccatcaggtaaggatgatcctgaattttgtgcattgacttgtgttggaaaaaatattaaagcagtagcaaaaacaatcataagcagaactgcaaatggtttcaatattagtgattggatgaagaagatagaaggcgtgattgacatcgactgtgttaaaatggatttcatcataagtttacaaacaaacattgaatataaaatctttatctcatgtaggcttctagagcgcaatcctatgaaatatagttttaaaaacatcttaagaaaccaaagttgaaaaaatagtatcgatacaaccgtttataaacactggaagcatagtactatattcaccttatgacgtcaatattcttctaccgcaatcatgataaaagggatactgatctgtaactataccgaaatggggttgagtcgaaggcttaacaatcaaaggtatcagtagtaaataccttatttatcatttcaaacgatacctatgctggtatgaatattaataatgacatttgatattgagaaaggagcatatactttaggtattgtggctgttgtttcttcaaaatctactcaatattcctgttcacatcttgaagcaaaacatcaaatgcgacaataattccggtaacagaatttatagaaattccgtccaattaattaaaatataaatatagtgacatggcccgcatttaagaactaaatgaacgaattactaaatatcattttttagatttcccttatatttcagattctagatccatactgaaaagtatagtttcatagatttctatcttgctcatatataatttttttaggtttcaatacggataattgaaatatcaatcaaaatggataaaattttttgatagataaaaatatgcacctagtaacccgttggaatttactccatatttgataaattggcttcgataggatcacttgatggacatatgcccatgggatcatcacgaggatctgactgatatcgtcctatcccgattacaccgtccctgcagtttgaagattcgatcttaggttcagattctggacagggaacgggttcgtcagcgggcccgggacaatatcctggtggataacatgaaaattaagggataccagatggttccgtacatcgatttggtaatgtcagatttgagtcaattataccatgattttgattctctaaagtcgaatatacttgaggagatgtaggataaattagcactatactaattaatagtgtagatagtagaatagttgtaagagctcggatcataattttatttataaaattctcatacaaaaataatatgcaaggttggtaatcattaccattaaccaacaatggagttagaagctagctgtaaaactactgtgtccgtactttattttcttgtttcactaaagaacttttgttgtattgctaacccgtccattaagatattattcttgtcagagacaacagaagtcctaactttgtcccccgtatgatctcacctcatccagttatgtggagtttgtgacaatcatatatccccatcagctacaatccattcaatccctatcttttttatttctttagggctatccaagatatgcatagcaagttttttgaatgtttttaaaaataaaaaattaattgatatttttttatgcaactaatagaaaggtaaagtttaacctttgaatgttcattcaattcggtccggctagtattgataatttaataaaaagaaaaattaattggttggaatttctggcaattccgaatcgggaattatcgttgcattagaagaattattgttagatgatggagataattgttgttgattggaggcagaagaaccgcttggctctatacctaaagtagaggctaccttatctgtatcaaatgttaatgtactaatcatatatttagctacgggtagaaatttatcatatagatcttctgatgctacatatgttacaagatatccaatttcatttgaatcaatggtatagatatcaagtatatttcttggtttttcatccccaattctgagtgattgtactatagaacatgcctgtatcttgttcaacatgtaccgcagacattccgaaggttccaatagcttatagtcctcggaggactgataatacgaggtaataccttgtaagaaatctgctgggtcatagtatagagatacattcgccatcacatccaaccatgcaaaagagtcttcatcttcaggaaaataaacaaaattaccttgtattggggctattttatcttgttctagtaccttttgtggtatccagttagatggaatttgcaatgaataaagtccatccttctctttgaaagtttcccatgttgtttgagcaaacgcattattacccaaataagaagaagtgatgagaaacaacagaaccatgaatattccaaatatctggcattccttgatgaaaatgttgctgtgattcattaccataatatagcaaatacactaggctgtataaatccttttcagtagatcctacaaccgtattcatattgggaactataaaatattataatataatcgatacttgttatactctgtatacagctgtatccgaatttgataaaatcatgtgttcctcatatatgcgaaaaatatagtcaaacggaatctaccattaaggatcgtatacgtattactatattattccacctaatcatggtcattcacatagaccccagtcagacagtgttgttcctataggacattctaaagattcagactcatagtcagtaacagcactattatcggatgcaagttcattcggaatatccatactagtagatgaagtatcatttgggattgttaggactgacggttcttcttcagctattccttcctgagttgaagatagattacaggattctattgactgactactagaatcacacgacatatcaccttcaatgctattattgctatcttcacttgatgctagaggatcttgaatagaattgctatcaaaagaaatcgattcatttccaaacaactcattatcgtagttaatttggttatcttctactgtactagtattttcggataatgatgacggtgacagtgtctgtgactgtgatagaggttcaacattttccatcaagggttcagcagaaaatgatggttctaatccttgttctcttgggccttctccttgttctccttcttctaatactggtggacctacgtcagatgaagaattattatcagtgcttgaactattcaagtcatctgttgatggtacagtaagaggctctaactctgatgtaggtacacactggcctgttgattcatcaagtatcgtacctggttgctgttcttcacaggtatctgttgatgatgttattgatggttcaggtggggcacatatacctgttgtctcatccattagagtaccgggatcttcacaatcgtttgtagtgccatttattatcggtacatctggttcagacattggtacacactggcctgttgattcatcaagtatcgtacctggttgctgttcttcacaggtatctgttgatgatgttattgatggttcaggtggggcacatatacctgttgtctcatccattagagtaccgggatcttcacaatcgtttgtagtgccatttattatcggtacatctggttcagacattggtacacactggcctgttgattcatcaagtatcgtacctggttgctgttcttcacaggtatctgtagaggatacggagggttcaggtggggcacatatacctgttgtctcatccattagagtaccgggatcttcacagtcatctgtggaagatatcaggggttccataggtacgcactggcctgttgattcatcaagtattgtattttcttcattacacagggcttgtgaatctatctgctcactatcaccattattattactatccccctcctcctcctcttggttagtaggtaactctcttacaacgctgttatccgattgagatgatgatgatgatgatgatgatgatgatgatactgtagaaaatgatacgatgttgctatcagagtcattatatattggagataaatcatcaacaggtctaatagaagagtctttaaagtgtgcctgaattgtccagttttgtcctatttgattaggcactggaatttcagaaatgaaacttccattctcaaatgttgtggttgcaacacgagtctcatttactaatgctgtaccattgaaagttatctgtttattaggaattccaacgaaaatattgtttgtatcagagagttgacctgttatatttattgtgttagttgagtcaatatcaatcgtattgttttcgagtgaataaagagataaagagcttccaaggtgttgacgaacgggtaaagctgttagtggtggttctgatggaggggatgtagttggggttgttgacgtattgttgttattagacaaacactgctgtagtttcccttcttcagctttgatgtctctttcaagttttgtaatctttcctgcaatggccgcaacacctttttctccgccctttggattaccactacttaaaagttctgtccgttctctgtctagggcctctacctctgatttcatctttgcaatattttctgaaaatgacctacaaggctctggaatataatttgccggtactggtactgaaggtttgaatattactactagaaggagcaattttttttacaatatcaccagcataatgtgcctggatggtccagttttgtcctacttgatttgctgtcatttcaagtccgaaggtgccatcaggttgggtaaatgatacacctttattccatattcccgttccattgtaagtaatcctgtgttctccacccaatggtctacatggattggtaggttccttagttggattagtactatttttattattacagacttctaactttcctgttatggctaccccatcaggtgttcctacctttgcagtatttataggatttaatgtgagtttggtaggatattcatcagctgacgcaggcacccatttaagggtaaactcgccctttagaactagaggatcctttacggttagagcagaagcaaacatgtttacatttacaccgtttctttcatagtctactgtggtggttatctttccatttttttcgttaggattttttataaaatcaatgggattagatttgttgaatggaaaaagatcaaattgataaattggtttgacaggattattattttcattataagggtcacttgaataagttactacagatacctcgagtctacagttgctattatttggaacacattcttctggttttggaggtgcattgataaagaaattatgattcatactgaattccttttgtgaatcaaccaattttccagcaggaatgactttatagccatctggatccaacgctggaatctggttgggattgttagggaagtgataatacttattaggataatatgtttgagagtaatacgctttgtacataggagctactacagtatgactttcggtataacttccatcaggatttagattttctgaaacgttagaagatattctctttacgtgatgtattttatatggatgcaattctgcatgcccccagcatgccattaaaccgttttccatccaatataattgtcgaagacagccagagccgccctctccttctttaagaccttcaggttcccacatagtatgttgatgctcatgaacatacaatcccttgacaattatgcgatcaccttcgcgaacacaatcttcatttcctataccataaccccctcgatctttgcattgagggccttttaatggatcaaccggtgggctataagcagcatttgtacattcttcctcaggccattgatcatttggccaccatgggtttgtaataacaagcttttcttctgggtgacacttgtaagccgcatagaaatgggatggtctttcaagtttaattatagggataaatagctgagcatcattgaacatattagccatctcaggattaacaaaaaactttggaaatggtaacggaaatcctagttcatttaatgatttaagttggtttcccatgtttttgtaggcattttttagttcatcaaaggcttctcctgttggattattcctttgtgggcagggaacatctgaatagaagccaataatgtcatgattcaataactttccggccttggtatctataaaattacactctggactaagatagttcccaggcaaaagcaagttatagtagctgggatccggaactaaatacaaaaaagaatcgaccccgattactagtcctcttatttcggtttcaatttttggattatatccatagcctacaaattttttaaaatgaaaaggagagttaggtcctccagatataatgggctcttcgtgaaggctataaacattaaaaaaaggtattgatatagtaacagaaaaaagtaatagtgtcatgtagaatagagccgttatcatcttcagattcacattacaaaagcataaacgcaatagcatcttaacttacaaactaatttattaatttttatttatttacattatttcttggtcattgatatcttctccaaataagtgaaatatcctaaatatcaattaaatactaaaataaaggtataccaggattatttcctggtaatgaacttaaaatctatctcggtattggcccacaatctatggttagcgccaatattttgttctaaactaaggtgggactgctatgcgatgaaaaaactaaaaaaatttctctgttttaaaatcgatgctaacaaatgccataatgactaggatgcccacccatgttgttgataatattcattttagcacaaaaagccaaattattcatatcataaagaaactttgctcgcaatatgtctaaatctgataactcactattgcccggattcgctggaaaagtattaataccattaccagaactgatgccgccactggctccactgccagttgatataccaccatccttgtttttattgtcgcatgacttctgtatgcatttggctaactctttttctagtgccaaaattatttttgacctgtcagaacctaccaactcttttgctagtggtatcatttgatttaactgtgcattgattgttgttattttattctttgcttcaggttctggaggaggagtggctttaagcagtttttcattagtctggatcgcctgaattgcttgaggtaataatgactgggttttttgaaaaagctctttcgccttggcgaggttgttctggatttgaatacatttattgcaggtactggtttgagcgttcacagtactgccgttgtaatatgaaccaacaaacaatagtgttgctaaaaacattaagattattacttgtttttgcactttacaatcaagcattttcataaaaaatatttgattatacttaataataaatattacccaaaaatgcatgatatagaaagaccgttccaatctacaatcttttcaaatcttaaaaactatattatctgctattgagtacgtttctgcttatagacatcgatgcggcgagattagattagcttcgttcatacaatttgaacaaatgtgatgtcatagatttgatacaaagtctttcagcatctagttaactcgagcttgtatcatttctatttaatattcaaaagacttcttcttcgtattttttagcgccagtaattagaaggattaatttgttgttaaaggagtatcaaaatccttgagaatatccacatcaggttatctctgatcttactaaattcgactaggacggagaaaaactagatattaattttctcaatatacttggttcttatctgaagtcaaaaaatctatttcaatactccaatgcaatttttagtaatctcttaaatattattgattcgagacagttaaataatagagcgctcgttacaaaagcaatatgtttcgaactttgcgctgaaagtgcacacatgttaggagaatttcacaaggccaatgaataattttttccaggctttggaaactattcggagtgctgatgatttctttttttctcgctcggactcaagtagcttttctttgagcaaaagaattggtagataaaaattaataaaataactcttcttaagggcgataatgtttctaatgtcaatataatggaatgatttcgctgaatcaaacttttattggtttatcgatcttactgcaaaccaggttcacaattacattcataattgatataatattattaaaagttgattcacttggtgaactccgttgaattgaatgtatcttaccattattgatattaactgtaagttcttgtagagaagtatcaagaaggtaaaattcatctatggcgaccctactaggtaagtcgaagaagttattctcataaatggcttttttaacgacactttcttccgtattatttaaaatagttacagacatagcagcagaagtagtaatattcaataggttattgtcagaagaatacgtgttttggtatgtatattctgtaaaccatatgaattggtgttttcaaaagcaaaatttggttgtgaagaagaattgagtatagttaaattagaagaaagaccgctatcgttagtgtcgatacatatggaaacaattgacatgttatccatatttaatgattcaagtccagaagacaaattatgtgattgagcctccaaaatagtatcactgtagattgatgatccagacagcattgattggagcattggcggcaattctgagtctagaatcgtttatccaaaaataaattctttaatgattcaaacaatatatcagtctcttcgaccaaaccatcctgtacataaagctttccgcagagtcccgttcaagtggatcagcttacgacacattatcatttgatgagttgtagcacattttaagatcgtgttcctatgatataacaggaggattcattgaattttctattggagaaattgctattgaatttataatggatttgcgttattagcaattgttaacaacagaaatgataatgcactagagaaaatgaggttaattgcttttacgggtcataaaacacagacatcataattgttaaaggagacaattagataaatgttagcttgaaatatgtatctatactactagtatttcatacatgtttcgtagaatacgataaggttatgtgacttgataatcattatgaataaaatttatatacgtactgctaatgattgcatggctcatcatttactttacaatgttccaattatttctaaaacatttcgttgtttgaataggacattttcaaaagcattctttttattaaaatcagagtgatatatcatgagaatgatgagcccatgccactaatcagagtggatgtcaaacgaataaatatctgaactgtacgtatccattatgatcttcctttcctcgaaatcttgcatgcattcacctaaatttggattctcattgcatcaattgatcatgtgattttcttggattcgtaaaatccataagattggtgacagaaatgcacgtcaaaaacgtacttttcttgttgactataattgaattttgaattataccactaggaagaatctaaaatctttcggaatagtccacgatttaggacgtctacttgttacctttatcaggatttacaatggctagacgtcagtccttcttaacaaacatatcatcaaggtctaataataagcatactaagagaaaaaccatttagacactaaatcgtaaaatattctaatgaatttacaaaataggcgtggaaacattctgatgatctataataacaatgggaaagaaagcaggatctaattcactacagtgaattatgttgatattatactattcgcaacccgatatataagaataactaacattttacagtaattatttccaaaaaagatttgtaacaatcatcgccaaattcttataatccgcgaaaccgaacgagaaaaagatttgaggaattggtaattgagtcacataggtctatttttatagttagatcttcaaaagaaaatgacattccaaaaataggaacttcattttccattggtataaccgataggtattgtactcaaaacacccgttaattaaaacaggtcagatttgataacgggactccttgaccctacccacaggactctactattagataatcttcatcagatgtcaaactgctgttgttactattaagcccggaggaggaatttgaaaaagggttcagttcgtctattgaattttcggattgtatttcgggtggaattggtggtaactccggatcatttattgatgaattatggattgataaaatagatgacaattgtggcgattcttctgaagttatgatatgaattattttatctaaagagtacatcacatttctggattctgtaacaatgcctctcaatgattcaaacatattgttagtctgctgttgcaattcactttgctgatggacagtcgcatcatctacttcattcagggcagtgccatctaacaacaaattatactgttccgtaaatccgtcattaatgtgggggtcaacacaagccaatgctattctgttgtcgttactgataatactagatacacacaagagtgaggttacaaatatgaatataataagagagggaatgactttgatggattttggatttgtggatataactgacgaaagcatgaactattttccgaacacaagtagataaatctttactcagtaatatatatttatatcactgctctgtttatcaaagaaaatcttatggcttcactatgcctaattccctatatgattagtaaaagaaacaggataccctccaagtaaatttatcacggtttataaccatactattcatggttatagattaggagaacggctgtaagattatccagtcataccaagcgaacgaacgtcaccttatgccattggattcaaaaattcaaatctaggataatcaagacaaatcacaagaggccattcaagtcggttattgatgagacattgataaagattgatcctgaataagcatggccatgggttgcaataccggcccgataccagaaagattctctcgctagacgtatctatctagtgaaacatgtttgttacaaaactctttctctccgacattgtcagaaattactaaatgaagcagtttacaccgacggctgtatagaacaactagaacaagttctctatggtcctggtagttaaacatgtcattagatagtttgataacgcttgtttatagatcccacaaatattaatgcgcttaagaacaaagattgagttaatcgaaccatagataacgatgctgaacattgaaagtataataaaacgttggctagaaccgagttatatattattatgacaacggatgtaatgctatgcctaattggtagagtcaactaataaaatcatcaggattttcactattttcaacaatttacatgatggctatcaacatcagtagatctctattcttcaaaatatcccgtgttagtataaatcatgtttcaaatatcgatttttattttactagtgagaattccgataattaattcctattgtgctcaccttcagcattgaaattgctatatagatgtattacaaagtccttgctaaaaccctgatggttagtcattaccaagaatgcagaagtaatattctaatcaaattataaaatataaagttatcttctatatatttaacaaggtaccagaaaatgagctctgtccatgtgtcagtcctctataacacggggctacaccgttgtgaatatcgatgaaagatatcatgcctgcggataagtgcacttgcaatttttattgaatgcaacttcgataagtaataaagtaagggcaattggtgactgcggtaacttaggcactggcattactggaacaatgaatctaggcgattctcaatagtgtatattaattaatactactggtattttaaaatggacggtaccccaagcatcacaatcttaaataccatatactggatcacataatcctttttttaggtaagcagccacattaccaaataaggcaaccggtaatatccattcaatggattagaaataactaaactatttctattatagctttagcgtgaatatcctgtgaaaaaggaatgtttattttggcatcgaatccccaaaaaaattcagaatactttccaacataacttttatttgcaatatgtggaagttttgtctcaaaaggaattacatacttgatatttaaaccattttctttatttctgttgttattgttgttggaatagctaataggagccatatgtgataccgattttaacttttccatatcaaatgagatattctttatttgatattcttctgcttcaataatagcgtcgacgccattagcatatgagtattcaatacctctcagactaatttccatatttgatgtctcatcttttagcaaatttccatctataattatactacctattatttcttgacctggatagtacgagatcctatttttatttttgaccattttcctactgtcatcgtaactaccatccttttctttaccaataaactctattgtgattccaggatcttgttttgagtatttttgtctatgtttatggaaattgtcgtttactttgctaaaattattctgatcagttgatttgattttttcacccatagcaccatccgtgatcaatttttctgggtcctcctttgctattaattgatcttcattgaatatgttgatttcagattgaggattactatacatttcataattttctcgaggactggatctgtggtttgaattgctgactagaaataatagagtcttatttttatcaatccagttatcgcggtctgctgtagcttttatctgataaaatatcttggcatttgctccgtcataagacggaaacgcatcactaggaatactaaattcaaagtgaattatttcagtgcctttattgataactaccgtcgttttatctttattttttattccattcatatttagatgattaagcacggtagacaagtcctgagcaaaaaatatgttgctttgtgactcggtttttgagctatcatgtgaagatgacgatataaccctctcaattactgttttttcaattccctctgcacttagccttagtcctctaattttacaatccctttttgcaatgattctaagggttccttttactatttcatctcctctatattcctgcttgtttaatactatttcaaaatcaagatcattggtttttaagatcttgtcaaaaatcatgattttcttcagctttggatatatttaaacgatttatccgtaggtattaatagatattaacagccactaggaaaaaattacaattatagttgttgtcgtgtaaacctttgccaatattgtatctttactccacagagatgaaatatataggaaatcatttaagtttgcatttcactaaaatttatatttcattttcttctttgtactaacgacgttactaatcttgattcatagatgctatcttattgatcagtattattccttgttgctgcactcaatatccaatataatccaacatctttaaataataaatagaatacgattctgacatgtatagtcaaaataaatatcaacactgtccagtgtggtttgttggacatgattgcgaatatggcgatatggcgcctgggatgagaggtgtaacacattaataaaatttatcaaatattctaaatacttcttccaacttagtgataagccttccaaagtataaaacaagttcacttagaaattatataatacatcgactatttttaaagtatataaagcaaattttcacaatcactatacaacaactttgtgataatgaaacctctaagttttgacaatttaatacaaaatctttaaattctccttctttcacatgatcaacattgaaatataaaaaatttgcatccatatcaattggtacacttttagtattgagtataatttttgttagattatcttcggattttcaatcagtgaatgctttatgtggtggtatcatagagggtaaagaacttgaaggtacctggatctctaatgatagaaccaaaaatacagtttaccaagacatagattcggatggaaaggtgcatataacctggtatggcaagactcatgatgaattggcaagaacatataattatatctttgaaggtatctggactgacactaaaatagaagggacagtcacatatttgaatccaccgccaggatcagctccaacgttgggaccaggatacgccgatatggtaatcaacgtacccgatccaaaaacgccaatcattcaaaagagtccgccaattgctgaagccgactttgagagttataaatggaaaaaggcttgtgctgttcctaatggcggatcttggccatgaggtcgtgttttgtaagctgaatatcatattcgtcgaaaactagaagatgaatagttatttagtgtagaaacccctactaaaaaagaaaacttattatctaaatattttgatcatgaaccagataatgcaaagaatcaccggtcttaatcaactcggttcgtcacaaccatgcggtttaaactatacgattgactaatgtagagattgtatgttaaatatcagaattaattgcaaagaagactcaaggtcaagttttcaaagtttctgcaacattaaaggactctttagaacacagattaaaaagagaagggtacgtcacaagtaaagaaattaagaataaaagtatatactcgattacaccaaagggtaagaaattattgaaatggtggatctcttttttagatgcttttgagatatttttctgaatagcgattctgatcacctatgagaaaaagaacgttaattctttttcttgacaaaatatatacaaatcattgtcaatatttttcttaagctataatagattcaacaggataaatcggtcattattttcaatcaaattcatgcctttgtttcctcgagaaagaaggttccttctgggcaaaccgcctgtgtctctttttccatcagggtttaattattcctagtcaatgtctcgtcatgtagatcatctgttatggacggattatcacgtgcaatgcattccccagtaatttcatcaaaagtacactcttctgaattaactattttatttaaaaattcctttccgtttacatctttcgaagaagttatttccccatatactatattgtcatcaccttcgtatcccgcaaaatgattattaattttatttccatctaaaacaatatctatagtattgccatatttgcctgtattgatattcaattcgactgggacatttctaattattttatgacatgtttctttatagtccattatgccttttatccggagttcattatctgattttggagataatgaaatattgctattaattggtgaatatccaacatctactgccctgaaattcgataattgatgctcgtggaaactgtccaagttttcgccttgcatagtgaaatttacccaaaattccgttaaattgcctttttgtacactcatttcccaacttccattcaatttccataaagtttctggagaaactactacaggtataacagaataagcgactggtatgatcgattggtctttttgagaattatgggttaattcgcagctacccataggacctaagatttccgaatcaattatgccttcagcaagaaaggagtcaatggatcccgtctgtgtgaaattggttgtttgctttggaggaatagtttgatccaaatttttgtcattatgcgcaaaagataatgcagttcctgcaatattcgatttattggataaatggttattattaagcaaaggcggtaattctgaagctaggattattgctgaattagaagatttattgttagaagacgttgataactcttgttgatttggattagaagaactgtttggctctatacccaaagtagaggctactttctcggtatcaaatttcaaagtttttatcatatactcggctacgggtaggaatttttcaaatttatcctccgttgcggtgaatgtcacctcaattcctatttcattgggattactgactgataatattttcaatatctttattggctgattttcatgcaattcagtagaaattgtaaacgagcagccggatgctttatctatcacaaatttagaacattcaagtggctgtaataatttagatccttcaggttcttcgtatgcgatgatggaatcctgaagtacctttcttatttcacctattttatcatctactcctatgtatatagtaccgccaacatctatctctagtccagttggagtggttaatacatcttcttgatgagagaacttgtaatcgataggacctttatagccttgtggattagaaataatatttactggaacctcttgaggtacccagttagatggcatttgtaaagagaatagtccagccttttcattaaaggtctcccatgttgtttgggcgaatgcattaccagttagataagaagaagaaattaacataaccattgttattccaaatatttcagttgcggtctctagtccatctttgcgactgttgtccacgattttgcaacacagttgaagtataaatcctttgtatgttgtgaaagaaattaaagtataatcctatcgagatgtattatataaaataagtttattgatccattatagttacgcgtgctgaagcgaaagaaaaggagagtagatatatatcgataccctaattttgttcaaaggttagactcatacacgcggactttacgttcatatttgtcctctttactcacatactccccagtcagacagtgttgttcctataggacattctaaagattcagactcatagtcagtaacagcactattatcggatgcaagttcattcggaatatccatactagtagatgaagtatcatttgggattgttaggactgacggttcttcttcagctattccttcctgagttgaagatagattacaggattctattgactgactactagaatcacacgacatatcaccttcaatgctattattgctatcttcacttgatgctagaggatcttgaatagaattgctatcaaaagaaatcgattcatttccaaacaactcattatcgtagttaatttggttatcttctactgtactagtattttcggataatgatgacggtgacagtgtctgtgactgtgatagaggttcaacattttccatcaagggttcagcagaaaatgatggttctaatccttgttctcttgggccttctccttgttctccttcttctaatactggtggacctacgtcagatgaagaattattatcagtgcttgaactattcaagtcatctgttgatggtacagtaagaggctctaactctgatgtaggtacacactggcctgttgattcatcaagtatcgtacctggttgctgttcttcacaggtatctgttgatgatgttattgatggttcaggtggggcacatatacctgttgtctcatccattagagtaccgggatcttcacaatcgtttgtagtgccatttattatcggtacatctggttcagacattggtacacactggcctgttgattcatcaagtatcgtacctggttgctgttcttcacaggtatctgttgatgatgttattgatggttcaggtggggcacatatacctgttgtctcatccattagagtaccgggatcttcacaatcgtttgtagtgccatttattatcggtacatctggttcagacattggtacacactggcctgttgattcatcaagtatcgtacctggttgctgttcttcacaggtatctgttgatgatgttattgatggttcaggtggggcacatatacctgttgtctcatccattagagtaccgggatcttcacaatcgtttgtagtgccatttattatcggtacatctggttcagacattggtacacactggcctgttgattcatcaagtatcgtacctggttgctgttcttcacaggtatctgtagaggatacggagggttcaggtggggcacatatacctgttgtctcatccattagagtaccgggatcttcacagtcatctgtggaagatatcaggggttccataggtacgcactggcctgttgattcatcaagtattgtattttcttcattacacagggcttgtgaatctatctgctcactatcaccattattattactatccccctcctcctcctcttggttagtaggtaactctcttacaacgctgttatccgattgagatgatgatgatgatgatgatgatgatgatgatactgtagaaaatgatacgatgttgctatcagagtcattatatattggagataaatcatcaacaggtctaatagaagagtctttaaagtgtgcctgaattgtccagttttgtcctatttgattaggcactggaatttcagaaatgaaacttccattctcaaatgttgtggttgcaacacgagtctcatttactaatgctgtaccattgaaagttatctgtttattaggaattccaacgaaaatattgtttgtatcagagagttgacctgttatatttattgtgttagttgagtcaatatcaatcgtattgttttcgagtgaataaagagataaagagcttccaaggtgttgacgaacgggtaaagctgttagtggtggttctgatggaggggatgtagttggggttgttgacgtattgttgttattagacaaacactgctgtagtttcccttcttcagctttgatgtctctttcaagttttgtaatctttcctgcaatggccgcaacacctttttctccgccctttggattaccactacttaaaagttctgtccgttctctgtctagggcctctacctctgatttcatctttgcaatattttctgaaaatgacctacaaggctctggaatataatttgccggtactgtactgaaggtttgaatattactactagaaggagcaattttttttacaatatcaccagcataatgtgcctggatggtccagcctgaaccagttttattagctgtcgtataatactcaaatgaaccatccgcacgggtaaatgcatggccatcgttaaattcaccagttccattaaaacttattctttgttctggaaataagggtctacatggattagtaggttccttagtaggattattagtacctatttttattattacagacttctaactttcctgttatggctaccccatcaggtattcccacctttgcagtatttacaggatttaatgtgagtttggtaagatattcatcagctgatgcagatatccatttaagagtaaactcaccctttagaacaataggatcctttacggttagagcagaagcaaacatgtttacatttacaccgtttctttcatagtctactgtggtggttatctttccatttttctgagtcttatcagatagagggttgaaaatatttgaattcgattgagttttcactgaaacggataatctacaattatcattatttttgcattcttcaggtttgggaggtgcggatataaagaaattatgattcatgctcatctgtttttgagaatcgactaattttcctgcaggaataacttttacggcattgggattggtccaagcatcaccatttggataatgataaagtttgttaggatgataagtttgtgagtaataggctttgtacaacggagctactacagtgtgactttctgtgtaacttccatctggatttaggttttctgaaacgttagaagatattctctttacgtgagttagattatatggatgtagttctgcatgtccccaacaggccatgagaccattttctttccatgataagcttttaatacaacttgaaccgcccaaatcttcaggctcccacattgcatgttgatgttcatgaacataaaatcccttgacaattatgcgatcaccttcgcgaacacaattttcattgcccgcaccagaacctcctgggacttgacatccactttttgtcggatcaaggggaggatagtaaacagggtttgtacaaggtaattccggccattgatcattcgggaaccagctgtttgatatcttacgttcaccttcagggtatccttcagggtaacatttatcagatatatacttatgtgatggtctttcaagcttaattatgggaataaattgctgtgcactattgacaatatcagccagtttggaattaatgagaagttttggaaaagtgagaggaaatcctaattcatttagtgatttaagtttttttcccatttcttgataagtttttttcaattcattaaaggcttctccttcagggttttccattctagggcatggtgcttctgttttaaagattaaacctaataagtcaagttttaacacctttccagcattggtatcgaaaaactcacaagttggatcaagataatttccaggcagtagtaaattgtagtacgatggatctggaactatatatataaaagcgtctacgcctataactgttccccttatttctgtttctatttttgggttatatccatatcccacaaattttttaaaataatggggaggtttaggttcaccgaagataataggttcttcatgccaactataaacatgagaaaaagggatagaaacagtagcagaaataagcaaagtaaggaaacaaaataacgagattatcatccgaaattcttcgcgaaaaaataaactcaatatctttcaactttattactagttaattaatatttctcctcttttaatttaaggacaggaatttaatttttttattatcataataattattcagtattgtaaaaaggttttggcaaattatttcatatttcctatgttaatgatataatgttgataatttgcctgatattaattctgggtaaaaatatatgcattatattttcatgaactaagtctcgggattagatatcctcttaaactgaaatctagaattccaatttcattctactaataacgttactcttatttctgtttcaataatagttgtgagagtatcaataacattaacttcggagtcttctagcatccttttttgatattcctcgatttgtttatatgcatatgtcgataaagtcaacattgaaatgacaaatacgattttttttatattaaggatttattgttgttaactattgttttcttatcaattggattactttcactttcagtagataaatctcaagcaatagcttggatgaaattatcgacggtaggtggtggcgaatgctggactccagctaataaggatataacgaattcttccgataatcgtgttatatgcgctcctgaggattgtccagcagtgtcggaagaagacctacctccaatctgtgggggtaaaacatttccgcatatcccaccatcccccccaattccatgcagtatcgaacaatctgcgatacacagtgaagttagttataatgatgaacaatcaaacacggctagtttaattcctagtatctcattataccctgcagattacagtgggtcggctcatcgtattttgacctctagtgaaaactgggttagcattatacccatacaaggacatattttggattttggtggcaaaaccattacgtgtcaagtcccaaatccagaagtagattgtacaggatgtgttccttgtccggattgtaaggaagtcaataaaaagattgataagatgatagaagatatgaaaaaagaaaatcgagaactccatttcaagaatcagaagttagaaaatatgtttaattttgcgaaaatgggtttttggaatgcttttggccatcgactcaccatattgaacccctcgatcaatgatgttgatcgagggtgtttggatcagaaagtggtataaataaagtcatagggtggatttaacatcttagtatctgaaattgactacgttcctacattgattgtgctttgaagcatttctaaataattatggtaaaaatctttttgtccagagatcgttttatgagatgaatctggtagtatttctaaaccactactcggatgttctaatgtaaaggcaaatgtgtaaataatattcggttttctctgatcgtcaaaagccatataactcgattataagatacgatgagatgtatataactattgtggtttattggcagataatagaaataataaaaacaaatagtatacaactatccgaggtattgcagtaacaggcataaaacagtcatagataactgatttagttcttaacaaaaatatcattaaggcttaataataagcatcctaagagaaaaactatttagacgctaaatcttaaaatattctagtgaatttacgaaataagtgcggaaagattctcataatctagacaggcaatcggaaagaaagaaggatccaattcatctacagcaaatgagattgatatggtactattcgcatttctcaattctattttggaaacaatcgagttggcaaccctatctataataataataacattttataggaattacttccaaaaaaggatttgtatcgaatcatcgccaaattcttaaaatccgcgaaaccgaacgggtaaagtgctcataagaatgaatgatcccaacggggttaattcgataatggatgttagaattttgcttcctctattcgtttactgttttctctttcgaattcttttttactagtatctaagatagcttttaaggtatattcatcaatagatatattatttttctttaaaaatctatctattgttaagaaccttttagtctgcaagctaagatataataaaatgggtcctgactgaattaactcagttctcttatgataacaattcatgataaactccattatttttagttgcaatttttgatccttttttgtactctctagtagatcccaagatcttttaagcaactcggtagtgccggacattgaattatgtaattcttcaaatccgatctttcctatattaaccgagcttctctccgactgattatatagaaatgcaatatctcttgatgccgttgactgattcaaatgtaacttagaaataatttcttgttgagtatatcctcttattagtaagttgttgacttttctccttctttctgcaaccattttttgatattttttaacagtaatatttgcgcgatgattatttttcttaatccgggattttttaattcttccctcagatttatcttcggtctttgaatcctctaattcctttatgctattactatcaataatagacattctttaatagaaaagccatatcaatttcttttaagggttatccatattggatcataaaaaattatgacgatatagcaggctgtaagatttgataactaatattaataaacatttatattattgtttcccactgccactgttttaccacaattggatttaatttattataaatcagctaaataaaaaaagaccgcaaagaataaaccgacatacataacaaaaatagattctaaatatgtggattttatctcatattaccctcggataaaaaacatataacctttaattcaaatattttgaatgtaatttattcatacgttattcacacttaaacttattttgaattgaattttgagcacaagatttttttattttcccgcccagtccatcttggctgcatttatgcgaattcccgtgttaggtcatagattttttaacttatttaggcatagttaattatccgttatagtaactatggtaccataatttaattttaatcttgggttaactataacctctatggaaccatatatggaagaactgtctcccggttctttcatttttttcttccataagcaaattctttcgttcatagtattcgccttttcgtccataaattaattttattaagttacgaaggtatggaagaaaattactcgctaatgcccgcaggtaatatttcaaaaaaaacatcccaaaagacagttagaccaaatgctagtttctaatgattaaagaatacagcaatagaatggcgcctaaataaactacatttatcataattctaaattgaacgaattattgaactttttgaactaacaattgaacaaaatatccattgaattgaacagtattatatactttctgccaccaagaagagcatggtcaaagttacgcatcctctcagatctgcaatcattcaaaaatatctttacgcactatcactaaacaaaatagctaatgaaaccggagtttcaaagactactgcacataatgtgatttatgactggaattctagattagcgtcaatggacttggatgaaattagaagattcacatctgagatgggaaagtcgtgcataacagttcaacagtgtgtccagggttttcgaacttttcaaatgttaaaagaatttgagatcaatgatgaatttgatgcatggattgatgaggataccgatatggaggataagaaccttgattccaaaaaaaatcaaaacgaaaactccctgttagaccatatcatgtccggtagtctcacgtatcaagtaactaaaagatccaaagaaaacaagaactcagatgataaagataatcaaatatcttatttcataaaaagtatatacaaaaattgtaaaacccacggcatcgcaccgtctgtagtcatcagatggatggaagatctgtttgatagcatttcaattttagatactcaatcaaacctaaacagaatcaccaacgcccaaaaacagaataaagattacagtaatgaagagatgacccaaagtaatgagttggataagaaattaagtgatgaaatacctctgatttcaagaatatcgcatttcatagaacagaaaaagaaagaaataaaacatctagaaaattcaaaaaaatcgatatatcaagatatagatcgactagataaacgtaaagaaaacatactatctgatcttactaaaaccatcgaaaaagaaaaaatagcttttacttatctccagtggtacaacaacctaaaacaggaattacatgacaagtatcatttagcaatcgaagagaaatacggagaattcgcaaaggtaatcaatgattttaaggattacgattttgatgcatcaataataataaatgagtataaagagattgaatcattaagacaggaaaaagatctcatccaaaccgtcattaatttaaatgcaccggtaagaaatgaactactaaatcagattgcacaattacagcaacaaatgatttattcaaagcaaactatgaatatttacaatgagttattaaagataggatttggattaaaagagcttaaacaactgcatggcactatcgtggaagtaagtctggctaataaaatgaagatagatgaagcagtatccaaattccttaaagatattgagaaccaatacgataacaaattgggtttagagacaacgataaataaccttaaatatgaaaaaaagaaattggaagatgaagttcctcagtatcaatggtatttgcaactacagggtactgttgctcctataatagtgcatcttaatagtaacggtgtaacaaatgaggatatcatcagtatcaatcaactagtaatcgcatttaaaaataccagttttgttgatgagatatctaatcagcaaggagaaggggaagggggtagcaagatgattgataaaagtaacaggagtaacaacgaatattggaaattatttatagaaaaactgaaaagtcttaaaaatataaatttagagattgctcggcaatctactattttaagcagactaaaaacacacatcaataacttaaatggaaaaaagcaagagatcgaaaaactttatttaggttcagtcagcaatcttaattacatcctcacacaaacatcatattcaatagaactaaccaagcaaatcaatcaacaaatagacaaaaagatactgatggccccacgcttttctccagtttttatgaatttgataatggcaaaaagtaaggatgaaaaagaggaagatgaggtataatatttctcaagatggttaatcataaaaataaaataatatccgtgttgcaacaattagttcattttttttgaatactttgaaggaatttttatttgcatcgtttaattgtgttattaacaaatatttcgtaccaatagatttatgattatcgaagagcagttctcagtatattgtaggatcatatatcttttaggcaatttattaaatttgacgcaaataggttaaaccttaaaaaaacatcattgtattcactttttattcgtactcgtactgaatatccaatcacttgtaaataaaagaaacaataagtgaatgaacttgtatccattgcactcatattacatctggaacaaatccgtctggttttaagagcaaattttagaattatttgaaaatatcttgtacagttaaccctttatttttattaaatttgttgaccattttctagatattgattaatatttttatacttaatatttttttgattattccaaagtctgctattttattttcgttagcgaatcatagaactaactgttattataagggatgcacagtacaattcatttttcataaataggattttatctaaagaatcaacatcattatagaagaggatcatcgtttcgatttgcagtatcactttcaatttgaattcctccactactcccacctccactattaatgtccgtcgtagatagatactgttcccttaccgaaggtgcaggtgattcaacctcgcaattttttagttctacttcagaaatattaaagtgaagaacttgtccatcgaagttttggactagggtcttgggcaggtgaaaaatattgtggtcgataatacctttttgaactacaaccttgtctcccactacttcttgaacctcgcctaaatctaaatcatctatccctcttgcttctttttttatgattgcattccaatctatctctatatccatacttactgtttaagatttatactataaatagaataaagataatctcggatcatttgtccgaggattatgtaataattttttgatttttgttctcgacaacgtaatttaaaaagtttcacaagttaactaaataacgcggtaactagatagtttaggtacaacccgtaacacatctaatcacgggttttatttctggtaggcatatgagatagtgaatgctaggttataagattccttagatgatctttgctatctgacgatcatattgttaaaattgtgtttctccaaattggccaagtacttcattcattataactgctttggtatcactttcataaagatgtcaaaccttaatttaaaggaaggaattgcgaaatactggtttatcgatacaataatatctcttaaacttgacttggaattaagatgggtcatcttacgcctgaattgttatccttcaaatacttagaaaaatattgtatataagtattaataaagtcatatatgtgactatgctagagtagtttgattgtcttcaaataaaaaattacttgatttagaggaattgaaaaaccttttgagatctgcaattcaagatatgcttactctagatgttatcacagccaagggaaattacgatgttgtaatacccacccaagatgattgggacgatctcgttagtaaattgagtcaaactcctaataatataaggattcttgcaaggacccatatacaattagacgcagatcgagttagtatgttacctgaggaatctttgggggatttctcccaggaatatatattaaactaccaccaaaagagtgtcgaagtagcagagaaaactaggatcgacaggctaaattttatcaagagtattctagaaatcattgtaagtaatcccggtttacttaaagagaatagcaagataacaactgatggtaaccaggttcaacagaaaaaaaactaatcgtaccattcggataaaaacaattggaaaacatctgaatccagaaatgattattcgaaataataaagatacatgtcatgagttttcttttcgattgaaagatttgtccattcagtggctaatagaattaaaggatggaaatttcatatgtcatctcgctttttatcgagataatagattagttgactttcatcatctggatcataaccaaattgaagaaatctacgacaagtgttactccaaaatcaatgaaagcgctattgaaaccttcataaccgaaagaatcaatctattcgatattttcaagcagcatataaagaaaaataacatgcttagagactttgttggaaactttgatagattacgcgtacaaaccttcttcagttctgacaaaaaaaatagcgttcatacaataagattcttgaatgagaacgaattaactataataaatgaaagcctactagaaaacattccagttattctttttcatctaataagtctcagattaatatacaagatacgtttgaataaaataaataatgtaataagtacattcaaaattattatactcatatttaggataattttgtatatattaggtttttttgcatcctcagtaatggttacatactcaatattattcgataacctaatttatggagctttatcggctttactaatagtgtctactttaatcacgactactttcgttaccaagagaacaagaaaatatatgattgataaaataattaaatattttaatgcaaaggataagatttcctgatactatcatattcattttttcaatctaatctatgagtattggattagtcaccatcaacatatgagatacataatttggggctatccacattttagaacctgtgctgtcggttattcttttccagctagttgatcttgccatatatcgacaattatacgcaaaacaatgcaatcaaaatagaaatataaaatataaattagttttggaaacaagttaatatgcagtcgtaagtagcttaattaagttcctcttataggactaccattgagtcaaaatgttcaaatatagttaatgtcagcattgtgtagcaccattggaggtgttattgccaacagttaggcaatacttagtagaactaaaatgaatatccacattttttggatctatatttggataagtaccgactgtatcttctatttctatgacatgttgcccatcaggtaatggtggtgtaattagaaaatatccagcaaccatcccaatcagttctcccctatcggttacactagtattattctcggggatataaaatttggtccatgttgaatttaaataaatactttttatttcatctgcagttaaaaaaagattgtctattcctatcttgattttcgcctgatcaagcttccaatctgcgcactccttgaattgttggggagtctcaataccatcatttatagtgcaatgacttccaactatttgaatcattactgatttacctgaaggaatattgcattctctcacttcaggtgtatcaatgtttggtctgtggaggccgtccggtaaaaaccagactgggccatcattttgattagaagagcaaccaatcagatgatagctctcacgtaccctatcgggatcttgaagattgtcatttgaaaagagataattccaatagtttgtagcccaatatgtaaaattatgcccaaagggattttcagttgattgataaaatagcttttcattttgagaaaaagaatctttcgtgtgagcatctaaaaataataaaataaacgacaaaataatgaagataaatgaaaatggcttaagtatcattatatatttatatttagatcaccttataaagataattgttatggagaaagaatattgatattttactcatgcttgttctttctatatttttagttatattttcaattattgacaatgtgacaagctcatccttgttatatacataccaagagcgaactaccacagcgattactctttttgtttcgatcaatttcgcaaacatagcgatacaactttgtattctgtatgtttattttaaatctggtaccaaattcttaactggaaggagaaaaaatactttatatttctatatactgccctttttgtttctctatagcattatttcgtcactcatatttcattcgattgtctttgaacatagatatctcttatcgatgttcttagcttctgtattggctagcctaattacatcaatgacgatattaagtattttgatttatagattagcacagtggtaccataacaatcataatatctttattttattttttgtatgttcgttcctactgttctttgtggtagtagtcttagggcttttgtcaatcgtttctgaattggataaaagagttactacaattaatgcagaatctaatccttggaataaaacctcattaaaaaaaataatttatctggattattttaaattatttaactttattatgtttggttttacatggattggaacatcactgctcctaaaaaactatgtctataactatcttcgcaatggtagaaaagtgtattggcttcttgtaggttctcctggtttttattatattttgacatcagatttctttacaacatatttgaataatttagtaaatgaatttcctttcttattctattttatgacatatattgttggatccgcaaagcaggtatcaggcattttctttggccttttattcctagtaatttcaaaaaatacccttaatgttaacttaaagaaaaatctaattatcttggcatccggggttattatcttatatagcagtatccaaatatcaataatccaaattttgcctttccctccatttggattggtaacttattctataatgccattatcgacatttatgatttattgggggctatacaattcatctcaaattattgcgaatgatactaagtttctacaggagattcggacccgtttgaaatttcgatcatcatcgtttatggaaaatgtaggatctgcggaactgaaaattcaattggagaattcagtcaggcatttaatagacaaagttgatgataaaaagggaatagagagttctaatttaacaaagggtcaggtagatgactacataaatgatgtaattagagagatccaagaagaaaagaaaaaaaattaagtagtttttatccaattccctaattcacacataaattctgcgatgttgagactttgacaaaatgtaatcttgtgttttcgttttgttattgtagctatattccaattaaacagttttgagaatcattgagatggaaaagcataaatgctacaatggcgagaaagtaaattataatggcactgttaaaaagattaatcaaagttagatctacaaatgacaaaattcttgaggcatatgttagactaaatttagatgatgatgatgggatatatttgaatgtaattgcaagagatgatgatacaactgtaacttctgatgttgagggaaccaacattattaaacgatccgaaatttatcccaatgaaaatgttacaggcctagttttggatacaaatcacgcagaagaacctaatggatacatcatctctgtttgttttcatacatttaataataataatagtaagctgtacatgggtagggtaagtataaatggtggtaatgttagttggacacagtgtgccgactctccaaaaacataccagaattcacaaattctaggactattttcatcctttttaactttgaatggaggaacgcctcttaaaacggttgttatgaaagttgcatctggtgatgaaatcataatccacgagcgtcactaactaagtcttaaggaagagagggggatgattcttaaaagtaagtgcaagtttattgcaggtttttttttaattaatcttgtcctttttttaattcctacccaagaaaatacagctgaaatttggaccaaagatgtgataccaacatgtaaatttgaatatggtaatgaagatacttcacaagattgctataagctcaacatcgaacgactagataattgcctgacttccccttttgcttttaacataactgcagtcaaggatccagtagaatcgactgtcaacttccatgatcagaatttcaccactatatggaagtcaaaagtacagcctcagtccatgcctcaagaaagatacgataatgttggtgagcctagtatagcatctaatggcacacacgtgttctataccggaaaccattacgcagcaaaatcaaaaatcggcgagaattggtctttcgtggatcctagatttgattttaaagggatgttacatcgtgggcaacctggcaatgaaactagtagcaataacacttcagtcgatttgtataaagctgatcaaagaacaatttatgatagcataaataatatgtatatttggattcgcttaggtgaaccatatgctgaaggtgagattaccaacatcctaagaatatcagtatcaaatgatacaaaaaattggacggtattagaccttattccagttacgctatttcaagaacagataaatgatggcttatttgactatccagatgttacatttgactatcctgaagtaacaatgactgataaaaatctatttgtaactgccactttgattttaggagaaaattgtcaaaaagcatacgcaactatttttcgaattccgctcgatgacttaagtcgttctatttctaatcctgatttacaaatttcattcgatacaatagtagatagaaacgttactggaataagtcctgttgaaggtacttttaataattccgcatattttggagcacatttcaagaataatagtttgatgaggctttatgaatggagtgaaagtactaattacgtcgacaatacaacaatacctatagacgcttggaataatattcacttactagaagcatgcggggaggatccttcacagtcagaaaaatggtggtgcaaagccaatacaagtagccgtattagaagtgcatgggtatataatgacactttaaattttatgtggaatgcaattgcaactccagactatgggaaaacttggaatccttacattgaagtagccacatttgatataagaaataatatgagttatgaaagacagtatcatgttgccgaccaatataggccttggatatttggagcagtgattccaagtaataatcaaaccttaggatttataggttattatgctactagtgacagcaaagatccaaacatagatccctatctaaatttggcattcggtaacttcagcgatactacaaagaagtgggaaatgatgacggttctaaatagctcatcctcattaccagtaagaaatgaaacaatgagtgcagattataatttcggagatttcctgaccatacgtaaacatatgtcgtctacagatgattataggtgggatgcgggtggttatgtgatagtcggtaaaaattataacgatgttgaaccatactttttgatgatcaagtaatttttaggattattggaaagaatttttctattttttcagaaaatttttctcattaacaccattcttactattatatttggaatcagcaaaaacatatttatccaaaaccaaaggctctaaatgtaaaatattgggcaaatgatcaaaaacaattactaacaacttatatatagaattattgtattacattggtaatgtataacaatatcatcatattaaaaaatattattcgtaattcgtcatttcttaaatgcaatgaatgtctaaagcaacttaatcacgcttcgttgatgacagtctgttaatcacaaaaaaaacagcattattagcaacaacttttgaattgggatggaaaatgagtagtagaaaatacgataatttattaaatgaaaacatggaaacaataaatagaaatcgttcagaatttgaacaaaataatgatagatcgccagataatgagattacctttgtcaactattcaaacgactattgtgtatgtattattgatataattaattctacggacaatacaatcgaaatcgtagattcgaaaaagatcaaacagtactattcagtatttcttaacactatgacttcaataataaagcaacataatggtaaagtagttaaaaactccggcgatagcctgttatattattttccaagaacggtgaatcagggcaactatatagattttcaggatgtaatagaatgtggattatcaatgattgatgcaaaagatagagtagatcttttattgaatttaaatggtttacctctgatcgattatagaatcagtgcaacctacggaagaatagaactagcggtcgccggtaattctcaaagcatagacatttttggaacccctgtaaaccgttgctctaaaataaatcatttggccccggctaatgagatgatcattcatgatgatctttttcaagtcgtaaataaaatgtcatactataaagattatgaatttaaggagataactcggcgagatgatactaacaaccataatagggataattatgatcctggcaataatggtaataatctaaattcagcagtttattctgttcatagagcggaagacatcaacaaacaaatggaaatagaaaataagatacaaaagattcacgctgaacgtaaacgcattaaaaaggataggactaacgcgtcttttaatattttgataattgacgatgacaaagacatcctgtttacatttacatctataattaaaagccaaggatattcagcgaaatccttctccaatcctttcgaggctctgaatgatttttccaattccaatccctatacttatgatttaattttgatggacatacgtatgcctgggataaatggtattaaactatattctaaattcaaagtcattaatccagaaataaagataattttcatatccgccctggatgcaataaatgaaatcttgagcttttttcctgaaattacggattcaaatgttctgagaaaacccatagaagccgatcaattactaaataaaattaatacagaaataagaaattagtaatggaagaggattatttcaaataaaatcctctttgggctagttatccttgctttgcttgcttacttataatttgggatctgatagaagacagagactgatctatctggtaaatggctagtttgtcgccaccaagtaagtcaaatttttggaggattgtttgaaataaggtctcttcttctatttgttcaattacaaaccattgcaaaaaggagtatgtagagtagtctttttcttttccagccatatcgactaaatcataaatggatttggatactgtttgctcgctctgtagaccaaattgaaatgcagattgaagcgattcgaagccatcctgaggtttattaattgcaggaactatggcttctgccccagccccatttagataatgaataaatcttagcatatgttggttttcttcgctagcttgttcataaaagaaggctgcactaccatcatatccagttcgctcacaccatgatccgattgcaatatatgcattcgcagatgaagcttcataagaaatttgttcgttaattgcttttgtcatttcgggtgaaattcgcatatataacaatcatgttttatattatctaagtttttgcattctgtgatagattttttcattcccaaagattattcactaagagaaaggattgaacagtggtgcttttcatttagtcagattctaataatgccaagtttgcattctttaagccactaaagcagtttttttttgtaacttaattctgacagctgtatagagtaaaaatattaagaaactagatgattttttaatctacgctaacagatggtaatatcatattcataaacaagtaatacggtattatggttttgcaaggctatttgaatgtgctgtataaatacagaattattcaggcattcttagaatgttcttcagtcttcaaagcgccatagtcatagattgtaccacttcaatcaatgctttcatcaaccagagccccagataaattgggttgtatccttttaaactaaatcattttatccattactttaagaacctgttttgtctatgaatactttataacaaacatattttgaaggattttactttatccatattctcttccgattgaattatgatatcggctttgtcagctaaatcaaaagtttttggtatatctttaattagtaatttggtattatatcattccttgtttagaatctttatcgttttttgattcaaaagagattttttcgttatactatacaaatgattgaaatgtattagatcaagttatgattcatagagaataacaaataacaaaaccatttatttttgaataactatctggatttgaaatattttttatagttgataatatactttctttctaaatatactcccaaatgcaaaacgaaagatatctaaaagagaagaaaaaacgtgctcattgttttcgataaattttagtatttcaccatcaaagtaacaaaagcattcaaatgtctatatcaaatgtgtttggatacagatttaaatctagtattaatttatcttaaacattcatggatcctctcaaaaaatttttaataaagccaacaaccaaattatctgcaaatcaaataaaattaaggaattgggatccgcaatatagtggcaataaaagtaaaattgatatgataacagaattggaacaattttctaaaaagataggcgaattacagtataagctattcgctgccaatagtaaatctttattaattatcttgcaaggtgttgatgcctcaggaaaagacggaacgattcgtcaagtgatgggagcactaaatccccaaaattgttatgtaaagtcatttagggttccgagcgaaactgaatcagctcacgactacctgtggcgaattcatatcgaagtcccttcaaagggtcaaattgcaatttttaatcgttctcattatgaggacattatagagccgactgttaataatatactctcaaaggatcagataattctcagatgcaggcaaatcaatgaatttgaaagatacttgtcagagaacagtattacaataataaagttctttttaaatattagcatggatgagcagaaaagaaaacttcaagaacggatccaggacacttccaagcagtggaaaataaaagaaagtgatatagaaagccataataattgggataaatacatgggtgtctatgaaaaggtgttaagtagttgcagtacaaagtgggcaccttggtatattataccttcaaatgtaaaacacttccgtaattgggccatttcttatatcatactaaaaaaactagaagcaatgaaccctgagtttccaagagtaaaaattgatccttcaaaattcactattgactaggttgcatcctttcattctataatatggttcattcgtcactaaatgtaccaaatcagaccgcatgactgggtatagtctttttttataatttgtcgataatggctagtcggtgtttaatatttttattttctaaattagtctttgaggttaaaataatcaaagttagggatgaaacaaacacgattattgtattagtaaaatatccagtctttcatcgagtatccaaataaggtatcttgtaaatatgttcgtatagatgagttatgccataaaagaagctagtcctaaaagacacgaggaatctagaaatatagaaaatgttcttatgatgcaaggcggaggctctttaggggcttttgcatgcggcgtgtataaggcattagttaaacataatgtgcacatagatattgtagcagacacttcgataggggcagttaacacagctataatagttggaagtaaatccgtccgggcgcccagacaaagaccttgaagaattttggatggaattaggtgagagcaatgttaaatcgataccagatttatggacatatggatgggacagccgaatcaatagtatgtgcctaagacaatttcatcagcatccgcaaatgcatctttcttcggggtccctaagatgtttgttccatgatggcaatggtggaatactagtaaaaactttcaaggtatgatgggcggactagaagaacagtactttgatccaagaaattggacatttttgtatgaccacgccccacttgtaaaaactctagaaaaatatgttaattataacaaacttaatcttgctgcaacaaaagaagagctgccttctgttttgaggctaataataacagcagtggatgtaatgacagccaggcccctcatctttgataatacattgatgaaaataaaaccagagcatattctagcaagttcaggatatctaatttatggattcccctgggtagatataggaaataatatcaaagcgtgggatggtagcttgcttagcaatacaccaattagagaagtactatatgtgtcaccaagaaatgataaaaatattttcatagttgaaaactacccacaaagaatcgatagtcttccctccaatttcataggagtagtaaacaggtacaaggatattttgttctgtgataaggattttgaaagtattaaaaatgcaaaattagttactaggcatataaaactaatagagaaacggtactacaaatttgaacaacaagttgaccattccattcttagcaagaaggaagtaaataacattcaaaatgagtataaagatctgatagaaaattacggagcagaaattagatcagttactagaataattagaagtgaaattgaatctccttcgatcttaaagaatagtgatttttccagtaaaactattagagagttaattgatcaaggcgaaagcaaaactgaagaaaaattaaaaagactgataccaaagtgaaatatcttttaaaaattcatcttatagatttttactagcgtcaatgaaaggattctaaaaatacgactacctattttataggtattagaccaccttccaagtgataatcaaagagttcctttaggaaaaaaaagaaattgtgatatagagtcgtggcataatagtttgttcatccaccccattgcagtttagctgcccctttctcgcttcctcctcgatccttttaatcgaaaaacagaaaacaaaaattcacaaggtgtcttttttcgtagcatcaaattctattacagctacgctagaacgtactttatttttttttagataaaataatgtgtggaccacagtgcgtgtttttaaattcaatgacactgaaccaatgttattacttgctaacactggagtaataccgtaacctttaggtgttacaagcattctgtattcaccccatttaggaagctgctctatagaatcactctgcttatcaatgaaataacgattaatcaaactggtaaatacagtccttattttgaaaagaaaagatgttcctttggggtgttttgaataatttttattttctttttgagatatagaagaagctagactattttttttatataaactcccattttcaatcatttcaccaacatttccgtgattactgtaactttggatattatttgtattcataaatccactgcgggtgacattcttctttgtgattattattttatgtgccaaatttaggatcattattgctgcctttctttttatcacactattacttcttagtgggctacttgtcaattgagctgcatgtatggagtttagtactagatcatctgcctctaaagacaaacccatttgatttggatgatgtgaaggagtgaatatatcaaaccttgccttcatagtgaaagcataatgaacatcacccgataaaattatgcaataatcgggactaaatgtattggatagaaaagccaagaattttataaatcccgcttcatttgctctccatgtctccagatcccatttgtaagttcctgagatagacgtcaaaaatctctgcacactctctgcaagttcaaatccaaaaacaggggtaggagaaataataacaaggggatcgccctttacatacccagaggcataaacaatttttttgatgtgattcaatgcttcgtcgtttaaaagtataggaggtccatcagggtttacaaattctctctgtgttctacaatctagaaatatggacggcggataagtaggagccacatatatccatttttttaaattccaaatttggtcttctaacattcggattctggcccctttatttatcctgccactatcataatccagatttgagaccgcataagtttttttaagattaagcaaactcttttgttttcttaaatctaaatactccttgattatttcaataaagtcatcattaaatgaatttgggtcgttcccccaaccctgaaatgcccaataagcgataagtccattgacaataatttgagatccgtttatgctgtttttaacagagtcggaccacttctgatctatgttccaatcgtcagtaatttcatgatcatcacaaatcatgtaagttggtgtattggcaaggagtcttcgaactttccggataattttgcgactttgttcaagctctcttaattctttttcatatttttgctttaattttgaacttggatgtagtttaaccagattagaaccaaattcccgaggccaaagcaatggattccaagcaactaaatacattgcagcaaactcgccaaatcctagtaagtgattatcagatactcccgaagaaaattgagacttggaatttactatctgtttccgacccccaattggtatatcttctaggttactatcaatcccgtcgatattttctcgccatcctagtaagtcggttcccaatctagataagtagcctatcagaggtccagatacgccatcggcgtaaatttgatcacctataagaaatagacagctgggtcttttctttagatctgaaatagaggaaccaacaagcttatcccctaaaatcaggttatcttcatcatcaccatgtaattttctacaagaaccgtagataacatttagttgagacccacttttcccaacaggaatatagaatgtaggcaaagcaaacaagtcatttaatgatttattttcatgaacattgtacccaggcagttcttcaaaatcagaattttcataaagtattgtattttcaccagataacaatcctagatcctttaagcgcaatcctttttctttatccccatgagacaaaaaaagttccaaatcataagcaaggatctcatctgtgggaaaagtggataacaagttttgttttttattttcatctatttgagttaaagaaaacggccttgcaattatgaggctcacatgtaggttttcacctagttttagagagctatcattcccattgcctataatatgcatattaagttgagagaaccttgtcttggattctttatctagatctttgttatcatcttttttgtttatgacatgaccattaattgatcctttacggaaaatctccactttagaatttactgatttgctagttgctatccagatacacacctgtgttttgtcgactcttcgaatcattggtccagccagtagtaaaggcaaagtggattcagtcataatatctgaattcctgctagtcttataccaggtttgcaattgcagtctcaaggtcgcctatcctgacatttaacaaagttatattcattttacaattataacttggaattctttataaagagttattattactattgttttagaaataataataaaacttgtatttaaacgtaaaataatcggtattaattctataaaaaaataaatatcattcccacaacacctttgcttttcccttcaatctagacaaacatgaaatcaagacccgattattagaacactagtcgaaacaacaaatcagcaattgatatgtatacatgtaaagtcattattggcgtctattaaaatataattagttagcctctattttctagctggtgctttatcattatttcttttacggtctcgtcacttacttggtcaaaatcggtaaaattggccgacagcagaaaaagcctcttccatatgtaaaattacaacatcgtcggctatgttggcaagtttattcactgtttcatctctggctggagctacaggtactgcaacaataagttgcttgcaattaaaattattctttacccattctgcagaggcgattatggtagagcccgtagctattccatcatcaacaagcacaacaactcttccctcaaatttagagtgataggaaacctctcctctaaattctatcaagcgtcgcttaatttctttttttgaaattctatctctttttctaaataagcattagaaatattgaaaaggcgtgtgattccttcatttaaaaagtagcttccatcaggcatcattgcaccgactgcgaattcttcattgaattcggaccttatctttctagaaattaaaagatccaaattgcatttgaaatgatttgctataatgtcacctaatactacaccacctcttggtattgctaaaactactaactcattaggggcattagttaaactcatttgattttttttaatatctctgctaatttttttgccaactcgtgcccagcttgcttgcgatcccgaaacaagacactcataatattacatatccgactccattattaaaatgaaaaaatacatggagaacagttttcttcctgtagttctgatgtattcattttttaaactttttagttggtctataccaaaatctggttaccttcaaggtaatccaaaagtattgcttcacctaaaacgaatttatgtagaaataaactacatcgtacacgccttcattttatttacaaagttagttagtataccagccatcagttgagtatatcattggtcacccccaaattctgaggaacaaactactaatttaggatgcattcttgaaaaacatggataaaatttttgaccttgaatctatactgttaaagctcgataaagaaagcaattcaacttattttttagattttttgcgcaacgatagttttgaagccggagtgcttagactcaatccaggtcaaaaagacatacaaggtcctcacttagaagacgaactctatttcgttatagaaggtaaaggatatatcaatatatcagaagtgaatcatcaaataagcaaaggctcttttatttttgttcctgccaaaactaaacattattttcatggaaacaaggaaccacttgtagttctatatgtatttaatgttttaaagaaatgatattgcttacaacatgaaggtaaaaaagtagtaattattctctatcgctttaacctacaaattttcggatagacctcttttagaaaacattctacagtggctgccaaaaatataggatttgtttattacatatgtgtttactttattataggatcacattatctaaaataatttgtgttgatagtatgtattcttctgcagtaaatttatgcatattttaacagttatttaatctggagacattatatctgcgattcgtgttaccctatcctcaggattgtatttatcaactacctcagataatggcatcctttttccgcccactattttaatatctatatcgattttgccatcctctcctatatcaataatattgtaggtatcctcaaaaacacctctatatctccacgagcaggctgttccggcataggctattttcatagtacctagattccatatccatggtctgtgcttgtgaccacagataactagatctacatcgttagccaggcacgtatttaatacatcacctgcatcagaaatacctaccacattggtatagccagtatcaggtatggcaataaggtgatgatgcattgcaactatctttattgttgtcttgttcttatcttgctgttgttgctgttgttgctgttgttgctgttgttggtgcgccttctggtgcttatcggtagtatgtcttgaaatgttatatttttttagaattttgtttaaccaaaggttttgtctatatccgacttcaccctcatctctatctgcccttgaggttccaactgtagtaactattactgtttggttcttgttctttggatcaatatatttgtaaactctcgaaccgcttggtgcagaaacagggaagaattgtctaaataaaagatagccggtatgtctataatcatggttccctgggaatattattaaattcttgcacgaaaatttttttatttcttgctgtgcctgttcgaactgaaagaatagtccatcatctgttaaatctccagatataattatgacatcgggttttagatcattattaacctcatcaaccaaagtatcaaaagtatcttttttaaataaaccaccaatatgtaggtcagatatttgaacaaatctcataatattatcttattaaatagtttgaaagctaacgttaaatactttaacaaaaaaggatatgagcaccatattattcaaattagttgacgcttacaagtatacttatcatatcatatcatttcatattatatcgtataattaccatcagtaaaagtgtataataatcccatgtcaagatcatggtcttttgaatgtgggtttgggaatagtaattttgataggatgcctaaatgcaggatgtaccaagataaattcacctttgtgtagtttgctaataacagatttggtagtgtcgtctaccatcgaataagaatttgatgaaagttcggacagacccaatttggtaataacatgtaaaccagtattttcgttaatgcttggatcaatttggctcttgaattgttgtgcagagaatagaatgcagtgcctggacttgcctgtaatcaaggtctttaacaattcttctgcaactgctgaacgattagacattgaaactccaagacccgtactaccagattctccccttggcaaaaatctattaacttcgtcaataaagatcacaatatattttggtttttttgccgtatttgttattgtattctccttttcatgatcaatttcagcatcagccccatcaaaatcgtcgtcatgattatttacatgaccaacagagtacatctcgtttatagttctcattacatctccaactacgaatgcttgttcgtctaacgttgaaagcctagctatatctattacaaaaacttcatttcttttcattttcttaatttccttgccaagatacgtacttgttaccttcttatctacaaatagagtaaatggttttcggtatctttggatcatcccttgaaactttaacagtgttgttttatgggtaacaatctcttctgggtaatcagtaaagttgatcaagtctgtccaagtttcaatcttgtcagaatttctcttgtcattgccaccttggctcaagtttggccaaaattcataaatgtaatttaagattgatgaaatattatgctgtggatcaagtgttgtttcagaggaaaataacaattccaatcgatcataaacatcgggtaattcaaaagaatatgtcatatagtttttgtctggaatatgtgccgaatttggtttaccgtcttttcctcttggaagaaaatattttacattactaaatggagtcaagttcaacccaagcaggtctagtacttgtttatcctcgagtgtataatcttcatctctttccttatctaaatacaatagatctttttctttagtattgaataagattatagaaataccttcgtccgatagtttttggtgaagaacttgtaataaaaataaaaggtaactagtcttcatgtttcctgaaattccagtggcgttaacgtgagtggtatcaggtccaaaaacatacgttacatctagatctatggggattttactgtcgttagtcatcgaaattacacccgaagggatgggatgttccatttctggaattccaagagatgaaatgacctcctcgatagtagcaaaggtaacgagtttaccttcctgaactggcatgttgatgctcaaattttttgactttacaggctttttgctatggcttgaatcatttgaaaaatattcctcttgaccgctggcgacgaattgacggttagcaatcacttcaatctttgccacagtcaggccatatccaagtttttcatctgtgttcatgttaagattcagcagagaagaatattgatttttagcaatagattctagatctaaatagatcctttttagttctttaacaattccaatagttttagtgttttgaacattttctacgctaataaagtcgaaaggatttatcaggatttcaggtttaattatgatccagaatgaatcaatagaattagaaaaattttcagatacgaaggtaattccgaggggtttgatatcttgcatctgtaaaatcttaatctacaaaggttataagaaaccaagttttagacaaatagtatctgaacttctttacaaaacatttatttttataattccttttttcaaaggaaaaaatttatgaataaactatgttgcaatgaattttgtgatttcaccatggctaaacgttcataaaaaaattgtaagtagccaactgaatataagtaatgtgagtgagtgttagtaaaaatattagcagatatacatgttgaattcctacaaatgaaatctgtaattaaatggcatttacatgacaaattcgaaactacccgttagttgtatagaatattgtcaaagtggaatcaaggttgaaatcgacaaccaaatcattttgacagccaataatcaattattaataatttctgttcatattaaatcttgcaattgattgtagatattaacattaacatatctgccagcgtatcaaatttatagattgataaataattcaaaaagagagataattacactcatagttcttgccataacgatagttatttttggatatattgtttatcagataaatcttatttcagttacactaaactcggtactggagcaaaactcattgttctatgagaaaataagtagggagaatccagaactatccaagttagaactaaacaacagtaacagcggtacacatagtaatggcatttcggaacaattaacattaagcaatgtatcgtcgcagatggcatctgaatcacggacttctggtagtggtggtagtggtagtggtagtagcggtggacaggttgtggaatccaggccctttccgtacgatttgatacataatgccatagcaacagatccatctactattttatcagtagttgttaggaccgcaataatcgcaacattggtttttgttatagtaaaatggcttggtggtaagggaattggccagttgtctccgtttggattgctaatcgttgtgggactaggctcagcaattggcgatcctatgctttataaagaaatatccatcacccaagcgatggctgccgttataattgcagtaattttctttaaagtaatagactatctcactctaaaaagcaggcgatttagagattctttagaacctaaaccaatcctattagtagaacatggatcgatagtcgctgatggcctaaaaaaagctaaaatggatattacagaatttgaggcagaaatgagattgaagggagtagaagatgtaagagaaattaaatatgctcgtttagaatctaacggtaggataagcttcataatgagaaagaaaatggcgtcggatggcttcaagggagatgaatgaataagaatataaattcgtctttgaccaattgcttggttagcgattatgaataatttaaacaagtagttatattaaacctaaacagtagtaacaatcttttgaaggtgaaatccttttatgatacttactggaaaattgaagtgaaaatgacaaatgtgctaatggtaacctgatgtaatactttatagatatggcaataactaaggaggagaacagttaatgcaactctatatcagaggtgctctagagaaaagcatatgatttgaattagattaataggatggtgtaacttcaaggataattcatttctatcaggttgtttaatttatataattcactctcatttttagagtattgaacagcaatgacgacataaaatacgttgtggttgtaagaaaagatcttggaatgggcgtcggaaaaattgctggccaagtcggtcacgcctgcagttcggttgtgtggcaaaatccggaccatgtagcctcttggtttaactacggtggccaaaaaaaagcagtcctaaagattcaatcagaaaaggaattaattgatattataaaaaaggctcaagcatataatattataactacggtgatcagggacgctggaaaaacacaaattgaacctaacactatgacatgttgcggatttggaccggattattcatctaaactggataaactgactggacatttaaaattactatagtattaacagagttgttgattagaaaacgagtttagttcttattaaaaaaaatcatgcgactcaaaatagacgattcaacaaaaaacctaagacatcaagatgtgagaattggtaataattgcaaaaattgatccgtactatattaactatcgaaatattaaaagaaactttcaaaagcagtaaaaattgctccaaagaattgcaatctctatttttattctataataccaacgaatttgatgacgatatggcaggactaaaatatgcccatactgaattctaatcacattttttattacctagttttaactgttttatcttcgtcagcaataggtctattattcccaaatgtaggaattcttatagaaccatatttattattatggcttggtcttttacttttgtttaatctagtcaatatgaatctgtcagaactttatacagtgttttcccatcctaagaatctgattattcttactatagcaaaactggtaataattccggtcggaatatacgtaattatgaacctgatttcagttactattattcctgtaagtgcaagtttaatgttgtcagtgtttttattatcatccatctctacaggacttggatcaccatttgttgtaaactttgttggtgggagattaccaatagtagttggtttaataataaccacttcattggcggtcccatttatattacctattttgatatttcttttttttagcagcaactttgcaattcctattttcgacatgatagtacttcttttggtagcattaattttaccgttgatagcaagtcagctcttaaaaaaaatttcacctcaccttacagagcagatccataaacaatcgctaaacctttcgcttgttttcattttcttgattaatctgggaatttttgctaaatattcttatttctttttttctagttccactataaccatagaaaacatcgttttagcgttcatcctatttagttgttatggattggcaggatatggcctctcgaggctaatgggtttatcaaaggatgatagaatatcaactatcatttcaatgatatatgttaacaatattttgatagtagtgtttgcccaacaattctttggaactgagatcgcagcattggctgcattttttaacatcccttattacgtcggtattttgctactaaaaaaaactctaaggccataatgaatttttgctgttaccattgttttcatggttttatatagcaaaaggttaaagtagttcatattttagcataagtggatactttagaaccaaaaccaaattcaatcgtgactgtttgattaaataattattgaaggttatggatcgtcttgatattttaatgagaaataaaatccaggtatcttattgtcatgattgtatggtttaatgctccatcattattttctgtagtgtactgcatatgaattttgtatcgttgaattcaaatcctttttaaattgattaccaattaagctaccatatactaccaaatctcttgcaaagctatcaagtctgcctagcaatcgagcgtttatgatttcacggtcattattaaaatcttgggttgagtttatcgatattccataaggtaaactccaaccataacattgccttatagcagttctcatctgatccattacagtcaggcccttttcatgcgaagaacagatgtacccaaatgtctttccggcaaactctgcccaaaagtaatctaaaaagttttttagggatcctgccattgaaccatggtagtctggtgttgcaaggattatagcatcagcccagttaactaattcaaaggcatgcctaatgccgcttattttttcatcgtattcagcagcatacatgggtaaaggatttgaatagagattcaataatcttgtatctccaccaattttgttaactttatttaatataatcttcaatgtttctgtactaaaagaatcttgcctcatactaaatccaacaccgaggacctttaatgtcatatttagaaaatacctcctgtagtacttgtaaaaataaaaatattacttgttttatccacacatattattcgtaatagtaatttataaatataagagtttacaaattatataaattatgactttaagatcttatattggtaaatacaaacaaccatagagcactaaatgaattcagccttttctttaatcaagaatttacaaatagaatctccttttgctgctctatgagtaacttctactttagcatctaaaacatgttcgaacaattcggtttcaatagagcaagcctcccaatgcttttctgctatcattattatgggacaattatactccaggagagtatgagaattgccttttctgtcctttttggattcggcaatatagccttcttcatccctaatttttgctaactctcttatcttttcattaaattccatacccttcatacggatactatatttttcaaatagttccttttgacgttctcgtaataccgactccactgcatccttcccaatttttttttcaatatagttcaaagcatgtgttgctatttcaccgtatgattttggaaatgcagtttttccagaacccgttaatgagtattgcattatgggtctgcccacaccgtttcgaatttcaatactttcgaccaaacctctatcttgtaaatcactcaaatgcttgtgtacagccattctagaaatcttcatagcttttgacaagtctaataatcccgcttgtctcatgaccttaagaaaatacaatatttttctttttggatcggattgtaagaaggcttcagatttcattttattatatccatcattaagaatcatttaggacatttagataagacacttataattaatatacaattaggtttattaattaagttaagaagttagcttagaagtacctaattaactagatatagaaataatacacaattaaagtcttttcttacttagaaccaaagaataaaggagaagatcaaatcagccttcatttcagaattagtcctttacttttaaataaatgtaaagcaccaaagtttaaaaatggttcaaaataacaaattataggttgattattactaaacctcacctggcaatagtaggtttgataattataacgattattctaatatattactattactatgagatagtcgtattgcgagaaaagcaaccagagccagagccaaggccccaagaagtaattactcctgaaggcaaagacatttttggggttaatgaaatttatcccactgcaaaaaatggaagagagtggtttattgacatggaagatcctttaaatgacaaatccttctcaattacatcagatgttcccatagtaaagaatgtagaagatggtttatcttggtcaatcaatgatactcagattagaatgaacgtcgatactccagacagtatacaaccctggaaaaatattgagatgacaggctatatcaagattaggtcggtttatgataccaatcaagaagatagagaaggaattgctagtggggatttggaatctctcgctcctgatttgacgtggcgtgcacgtggaggatcacataacagtcagaatccttgtgaaggaaccgcattaaatggaggaatagatgtggtaaacatggaagcatcttggaaaaaagaaatttggcatactggcggatacaccgattctaaaggttccgctaaggcaactgagaatacattattagatagatggatcggctggaagacgataatgtacaactttaataatgataccagtgtaaaaatggaatcatatattgatgataataatgataatgtatggaaaaaggtaaacgaagttactgatgaaggcggttggtttgccaacagttctgatgaagaatttagcagtgcaaattgcaataaggctaaggactacgtaataactaattcaggaccaatcgcaagttttagagctgacaacattgcatttgactttaagaatcttagtattagagaaattgagccggcctgaaataatctaaacatgatattttttattagtcctataggaaatatgaaattaattttgagtagtagttgtcttaacaaataagcattgattgagcatgagatactctgatgctgggttttgggctattcttgagttctaactcctactgcaaatttccgattaacatgatagcaattctttggtatctaagtagaaataaagccttaaagcagtatcacgatggtatttcccatctgattttgatggtacggataatttgtcgtggatattgatttgtatatcgtacatctaaactttaaaacttaaccttggctaacatttattaacctagttaagtaatatagattatgcaaaatttcaggcggttagtgctgcccattttttcaattgtattggttgttacggtagctttgataatgtctacctacatacttaacccgttaaacccatcttttgatacccatgctcaaaactcaaccgacaatagaaaaatggttggaagccatacaccaggctatcccgtatttcgatcgactggagatatactagatcctatttctattcctggcgactcaaaaaatgcagtagtagatcctaatcaatatttacgtgaattcaactatggacaggtttcagaatattcaaatggaaccgccctaagagaatacacactggttgcttcggattcagaaataaaagaagtgtcaccaggggttttttacaatgtatggacgtacaatggcacgatacctggtccgacaattcgagctaccgaaggtgacaagataaaaatcaatttcattaataacggttcaaaacctcattcaatacacactcacggaatccacccagcagaggtggatggggtttttgaaatgattggaccaaagggcaagttcacctatgaatttactgccgaaccatatggtgtttatccataccactgtcacatgacaccgcttgaagaacacataacacatggactctatggtgtgatgattattgatccaaagactccaaggccgcaagcagatgaaatggtcatggtcatgaatggatatgataccgactttgacacagaaaataatttttacactgtaaatgggatcccttatttctatatgcataatccaatagagatcaataaggatgaactaacaagaatttatctagtcaatatgttagagtttgatcctataaacaacttccacttgcacgctaacatgtttgacttttatccaagtggaactagtcaaactcctgttgagctcaatgacattgtaactatgagtcaaggagaaagaggcattttagaattcaagtataaatatccaggaaattacatgttccatgctcataaaacagaatttgcggaaaaggggtggatgggtatattcaaagtgatagagaatggtcaagacgataaaaatgcgactgatctaagtagcaacagttcaaaaaacccaaataacatatccgtttctgggaatcaatcttatgtcttagcagattcaagtcagaccgttggaaatgatattgactttgaaaatagtaagatagtgtataatcattcatcctataaggttagtaacaactcacttcatgacagcaacagccaacagcacccaaacaatccaagtgctttaatttcttactatcaggacgattcaaactttagccaaggagcgacctgagaatgaaagataagaatttagaaaaagcagataaggataaagaattaggtatgaataaggaaaataaaatatttgccaacacttttgacaatattagtggacagggcgaaaagaaaccagatattggagatacaaaagagctaactactattggtatcaacccagctaatgcaaacacaaaagcgaccaaaggaaaaagaaaaaaaattacatccttgttcctagccattacacctctaatcattctggctggtatgatttattttctttctagtccgtatggtcaaaacttgataaacacgggtgttcccctaccagaagtaactatagaaaaagtagagtttcatgaaaatcaagtggtagcttttatccgtaatacgggtcccgagcaagttacgatttcccaagcagacattaatgataggatacaatctgcggcaatcgaaccttcccaagtattaccaaggctttcagaagctaaagtcataataccctttttttggaacacagcagaaccttatgaagtaggcataaccacttctgatggaacaagatttagcaaggtcatcgaggctgctgctccagctccaatccctaacattaaccagttctcagtatttgccatgttgggaatatttgtaggtgtgataccagtacctaattggacttgcatggtatccgtttatgaggaaaataacaagaaatcaatacaatttctttttgagtttaaccgcaggtttgttggtattcttggggattgatgcattcttagaaagtaatgaaattgctgcgaacaatttagctgcgatttttaatggtcaacttttaataccagttattatcatagcgacgttccttggattattttatctctctgagtatttcggcaagagagcagagtcaaaattatcctatgaatatgaaaacgaaaaggcggggaaggacattgcgacaagacaaatagagactcaaaataattcattagagtcttctgacaaacctatatcgaaaacaaggcttgcatcaatatacctgccaaatcagctttctaatgatatctcagatataacacaaggggaacaggaggaggtagatgaggagaagacgaagaaaaaagaggaacagctggcccaatttattgataagcgtgatatcatcaagcctcttactctatcgctaatggttgcaataggaattggcttacacaatttcggtgagggcctagccataggagcagcagtgttactcggcgaaattgcactaagcacctttttgatcatagggtttacaatacacaatacaacagaagggctggccatcgttgcccccctagcaaaaacaggaagattaatgataagacgattaattgcaatgggactgattgcaggggttcctaccattttaggtacttggatcggtggatttgtatattcgccgttagcctcaatcatattcttatcggttggagcaggtgcaatatttcaggttgtttacgccctcgcagtatggatgagtaaatcaattaagcaaagtagcaagattaacaacaccgaaagcagggctttttgggaaaaatcagttaaatccggagtgaattcattatctgtctacgagaaaaatcctagtgcggctataatagccggatttatcatcggattgttaataatgtatattacgggattgctggtgtaatatgttagtcttgcaaagttttttatcaaagcttggtttctatataactaactaggtgaactatacagttgtcaaataatacttcaacttttggagaaaacacaataattgactctattaaaaaggtcaatagttcacagagaaaggaacgtacagataggatggaagactatcttgagattatttatgaattagttctacaaaaaggatatgccacaagcgtagatattaccgaatgtttgaatgtctcggctcctagcgttaccaagatgatgagaaggttaaataccacagggtatttagaatatgaaaaatatagaggtatacgattaacccaacaaggaacaaatgttgcccaaaatatcaggagaaagcacgaattattgacagagttcttcacgtttataggcgtaagagaggatattgcaaactcagatgcggagggcatagagcatcacttacattctgaaacgctagaaagactagaagaatttcttaatgcaaatagaagaaagcaaaaatgagagagtgagaccactaataaaaacaatcaaaaaaatattagtaaaaatcaaaacaatcgtaaaaaataagacatggatgaagagaagacgacagaaaatccttaagtaatttttatcagttggtttttctatcaaaagccataatacataaatgaacaagtaaactataggcgcagtatcaaaaaatcttgtaatcaagaataaagaataaacatctaactgggtccaaaggtgaacttaatctaatctaacaatatattcaatggtagaaacaagactcgatccttaacttcagatctttatcctaaaatgtaatacgacccatagtatcatcataatttattgaaatctggattcgacttgatgtcagcgtaaagggatgaataaggaataagattatatttttttataataatctactattctagacatactgctattctttcgcttctttctcttttctagtatagttttccaatcaaaagaataattttttgttacatctgttatgtcagcatttgaaaacgcaagcacatattgatactttttattccaatttttttcataataatgaggattattgattgaaataggatattcaagagttgaatctacgtgaatccaatttccctcaattagagcttcgttccaacaatgatctagaaaatcatgaactattcttgattgtatcgataaagaactgagaatagctccaaatagaaaggaccattcactacatctgccgattcgattaaatgttatattttctatctcaccatatcgaggaaacactattgtaaaagaacattgatggcatgtatgatattcgacacttcttactatccaagaattacctttaacatatctaatattcaatgataagttgcatgacggacatacgggactcttatccatccatttcatgaaatcatgtttaaaccaattgagcagtaattgcataggcatcatcaagtctatctttccactcatccttttatcaaattcatttttaatattgacaggcactaaactctgaatggattcaagtaaatctgtatccagatattgcctagcaacctgcttatacagaacaagaatatcctttgtaagtggataaggaagcccattatttgctaaatcaaaaaagtttagcactagttaatcactaaataatcatttaaaaatcaagtgctcctatgctagcctcttgcatcaaaaatttcatctaaaagttattgaaatatttatgtatagaaattcaaaagaatgaaaatcctagagttgggaagactaaaacccaaggcagaaaagtcaatccagtaagcatcagaggatttacattttcatgattctaattctattctattttcaatagacttatgtttgaataagcgcttatgggtaaatgataaaagtaaaacgacatgatacaatttaacagaaattcaatcaaaatggaaaaaacaaagacagaaaaaaaaaggtttgtttttcctggaagtaaaatccacactactccattcttatcctatacgattgagcatatgtcattaaagataaagccagatcttgtgaacaagatccttattgattgcgaacagcgaatgaggataagagcatttaaagatttatcagaaatcatgttagatatttctgatttaaaagttacaaaggtacactcacagtcgataaatatttcgaaatttagatgcgttgataacaagcaagttattattgaattttcagatcaatttagagccggaagcacagtcgatattgaaatttcatattctgcaggttttacaatcattgacggcaaggaaaaattcgattctccaaaaactggttttcactttattacaaagggtgatcaaggtaaacgatctccatcataccaagcatggacacaaggtgaagcaactgaatcacgctcctggtttccatctattgatacacctcaagtcaaatttactctggatatcgaaatttctgcaccacaaggatatatggtaatttcaaatggaatattacaatcaaaagttagaaaagatgaattcatagtttggaggtatgttgaaaagaaacctcttccttcctatcttgtgtcagttgttataggcaccttctcaaagtatgaatcaaaatatagagatgtttcgctcaactattactggccagaagaaattaaagaagaagatgccatgttaactttttctgagacttcgcaaatgctaaaattcttcgaagaatatttcgatacaaattatccatttcaaaaatactctcaaacagcagtcgataattttgagtttggaggtatggaaaataccacatgtactaccctaaccagaagagttttgcatgacaagcaagcatctaaagattatagaaatgatatttttttggtggttcatgagcttgcacatcaatggtttggagatatggttacatgcaaggactggcctcacatctggttaaatgaagggtttgctacatattgtgaatctttgtattgggaaaattctcggggaaaagatgaatttcactacaacctgatagaagccacagatatctattttgaagaatcaaataaactctataataggccaattgttactaatgtatataagcatgtagatgatttgttcgatgcccattcatatgaaaaatcaggattcatcctccatatgattcgaaattatataggagagcataattttagaaaatcacttaaagtctatttagaaaaatatcagaatagatcggctgaatcacttgacctattaaaagtgcttgaggaagtctctggtagagaaatgacatcatttttcgatcaatggatttacagaaaaggtcaccctaaattgaagatcgagtacacgttagaacataataatttaaccaagaatgttaaaaacacccaaaagctaaaaattaaaattcaacaaaaaaattatgatgaaagagttgaagatttatccaattattaccaatttcagttggagtttaaaataagcattgtggataaatctggacaaaaaagccactgggtacatttaatgaatgtggacaacaaggattcagagtcttttgttaatatagatatcgattcgaatattgaatatatatccattgatccagagtttaagattctaaaagagataagatccgttaaagtagtaaatgaaaccagagactttcaattaaggaaattgctatataatcagatgaaatatggagaaaccatcatagaaagaattaccgctttaagatatcttaagaaactaaaatcaatcgatggaattagagtgatatccgatgcaattgttcaagacaaattttatggagtagccgttgaggcggctaatgcaattggttctttttatgataaaaatgattatgaaaaatctgataattcatatcagtctttactttcaatactaaataacaaattaacctttgatgctttacgatcagagaccaaaaaagcaatcataagaaatatcgggaaatttgaaagaattgaatcaattagttttcttgaagaattgatttacgaatctaatgtcgaaagtaattttgtaagatcatcggccgctacggctttaggaaaaagtagtaaggagatggagaaagtagaaaataagatcctaataatttcccttctaaaaaaccttgtcgaaggaacaaatacttttcaaagtgttttagccactggggctttggaaggactaaaagagttaacaatggaaagagatggcaagatacacattgagatagctcattttattctggaaaatacacttgactcaaaggactactttgtgagagcaaaagctacgttaaatttagccaagtttttggttaacaaaaatgatatatcaagcgcagaaactagcgatatgaaccaagcggtgtttaaccgactaaaggaactcttaagagatgacagacgaaagataaaaataaatgcatgttcagcactagcggatgaagatggtagatttcatactataccagataagagaacttatgagacaattgaagtgctaataaacgttgcgaaaaatgatttggatggatttgtaagaagaaaagctgaacacagtgcaaatatcgttagagaatggatcaaagattgggcaagcaaacccttgttaattaattgtgattcaacatctatttcataaagtatatatttacttaggattcagcatttacctaaattaggaccttcatttatcattagtgataatattatggtctatattgtaatagtataaattgatggttcttaaacctttatattttcccattagaatttttctatgatgatcctaccagaaatcaaatatactttatcgggaaaaatcgctttatttcttgcttttactagtttttcattggcctcccatatgataatagagtcggttccaactgtatcatccacttttggtcaaactggttccttaccatcaaacagttccaattctagtctattaacgatgaataacgaaaatgtaattggtgatccattttataccgaaaatacgaaatcaacaaacattaaagtactaagtcttgatcccattccatctgttgaagttacctatactggcaacagcactatgggtggagctccaacccaaactattggtacaacagtagataaaatgaacactgacggtactgtttcttctaaaggtcaagcaataatactgacagcatctggtcaagtcataacctacagatctgaatcgataggtacctacaatccggatgggagtttctcaaataacggagtaatggttttccacttacctttcaaaacaaattcaactagttctgcaggcatctcctcgaattcaacagacaccatttacacacaatttgataatttatttggcatctacaaaaaaacagtagatcctgagggaaatggtcttaccaaggtttggaagtggggatagacaaatcaaatttcatgatgtatatggtaggttattatcttccttctgaataattagatgttttctatttaccaacctagtaataaccggtattcataaaagaaatgaaacctaataatttatgtaggttggtgttttttctatcgcaaataggtccatagttgtcatatgtgagaaaccatctgttgcaaaaagaatagcacaggcgctaagtatttatcatcgccaacacagcaaaaaccattcagacaaacctatagatcaagaaaaaaaagataggtcagcgtcatcaccatcaggatcatcttttgccacatcatttcctaccattagaggaatggaaggtcaagattacattatctgtcatgctttagggcacttgtacggattgtcagactctaataaaggaaataaaaaagtattcccaatcctttacccaacttggttaccattatctgtactaaaaagtaaaggaccaagctcaaaatttctggctttcaagattgagaaaatattaagagagatttctgatatatctaaaaatgccgcaggctttattcatgcctgcgactatgaccaagaaggtgaagtaattggatacaacatactagagcacgcgtgtcacaacaaatactctatatctaaaagagccaaattttcatcacttacggatgaagaaataatacaatcatttaacaatttgttatcccctaatgaaaagctaaaggatgcagggacatcccggcatatgatagattttatttatggaattaatctttcaagagcgcttacgaattccgttaataagaaagattctgttggagaaaacaagaagggttaccatcaactatcaataggaagagtccagggtcccactctagcatttgttgtagaaatggaagaagaaattaaaagtcatatattcgaaccttattggaatgttatagcagattttcaaaaaaatacgcaaatcatcaaaactaattattatcctcaaagaatcgattcaaagttaactgccgaaaatataatcaactcttgtaaaaatcaactaggtaaagtaacagacatcaatattcaaaaaacatcaataaaaccacctattccttttaaccttggagaccttcaaaaagaagcttataggatatttaggtttactccgagttacaccctttcaatcgctgagaaactatatctagctgcacttatttcgtatccaagaacatcaagccaaaagttacccccatccattaattatgaaaaaatcattaaagcagtttcaaatatggacaataatttacatcagaacagttcgtatggtaacaaaaaaactaaatcaattctagcttattctgaaatctctttaaaattgctagccaataaagtcctcaaaccaaatgaaggaaaggagactgatcctgctcacccagccatttatccaacaggtcaaaagccaaaacgaaatcttgaagattcagaattaaaactactagatctcataatcaggagattcttttcttcatttggagaagcggcctcttctagtcaaatttctgtcacaataacagttaaagacaagtatacttttaggtcagaggagaaaaaaattatatttgaaggatggattgaattttatagaccctattttgatttatcgggctttgtggtcttagactcgctatcatttctaaaaagaaacgatattttggaaaatgtaaaaatagcattgttagagaagtatacccagcctcctcccagatataatcaatcgacactgttacaaaaaatggaaagggaaaaaataggtaccaaagccaccaggtctgaaataattagcactctttttaagagaaattatataaccaattttataccctctgataccagtaatcaatctgttactaaggattcaaggataccatcagagagtgcttcaaattccaatgttcaaaaagaacagctaatcaaagcagaatatacagggatccaaaaatcaggattgagacctacagaaataggaatagctctcctaaattctatgaaacaatacataccaaacattgtttcaacgaatctaacaagagaaatggaaacacagctagaacaaattgaatcaggtaatactacaagtgtacaagtagtcgacaaagcacgcaaccaaattaaacaagcaatacagtctttcaatctcaacgaaactaaaataggccaagaaatctcctcagccttggaagtcaataaaacagccagtttatggcgaaaacccataactattgtcacactgggtacttgtcccatttgtaagagtggtaatttagtagttaaaaaggcgattaaatccaaaaaaagatttgcaggctgtacgaattatgcatcagtaaaatgcttggctacttccccattaccgcaaaaaggtataataaaaagtaatggaaaaaagtgtgaaaagtgcagctggcccgttatctcggctagtggtaataatcaaggcaaaagataccaatgggagttttgtattaattcaaaatgtcctttgaaaatatctagcaatagtagcaacatacaagatacatcttccaaataaatctaaaaagtcgattcaaacatcgaacataatgcaggctctggacaaagataggtcaattggatttgtcgatgtcgactaatgttataaataaataagtaaataaataaataaaaataacttgcaggataggcaggttaatcttgtaatgactatttttttatctatattatcttactacaagaacagggcaatgtgaatatttcaccacttctgaagcggtacttccaactagcattttcttcaaaccagttctgcccttgcttccaattaccagcaagtcgacgtttttggattcggcgtaatcaactatggttgatgcagctgaagtttcggcttcaataatagcagtttcaaagcttgaatccgttgaatcagtaggattagaatcagctgtgttactaggggcgttggtagtagaggtggaggtggaggtggaggtggttgaagtagcagtattagtagttccttccgaaatcactttatcattactaggcatcaatatcttctttttatttgatttgtacttttctctaagtgaattcatcaattcctcaaatttttcgcgttccttttctaacttgtcagaaccgtatgtaggggctaatatcacacttgaaagtaagtatgggtacttgtaactatccaatacgtgtaaaatgatcaaagatgaattgtatttagtgcctatttccatagcggattcaacggcatccattgaaggtttcgaaccatcaaatgcaaccaagattcttgaaaacatctggctttttgtttaaactataacttattttaattgtttgattgaatatagatatcatcattttattttgaaccataataactatcatttctcacaattacgaaataatcatcccagattatttccataatactagtaaaccagatattaatgaacagaaatcatataattaattacaattttttgactttttctgaattagcagccgaatgcattagtgataaatattggcaagtgcattttaaagtacgtgtcttctgtatgtcaatagatcaaaattctatgaaattgaaaggaaaaaccaccaagacagacttggtttcaaaagtatatgaaaaactacaaagaaatattcagagatataaacaggtttcagataaaccgctcacccttggagaaaaaatcctgataggtcatcttgatgaatctactgattttatgacttttaatggtttgacacctggaaatggatatatcttgttaaatccagatagagttgcgcttcaggacgttacaggacagacaactattcttcagtttatgcaggcaggtataaaacaggttttagttcccaccacagttcattgcgatcatttaatccaagccagggtgggcagtgaatctgacactaaagcagcaatttacgaaaataatgaagtctatcaatttttagaatctgcctgtagaaaatatggaattggattttggaagcctggtgcagggataattcaccaggttgtcctagaaaactacgcctttccaggtggtttaatgattggaacagactcacatactccaaatgccggaggacttggaatgctcgcaataggggtaggtggactagacgctgccgaagttatggccgggctgccttgggaggttttgtatcctaaaagaatcggcgtatatttaacaggaaaactaaacggttggacatcccctaaagatatcattctatacgttgcctcaaaactttccgtgtctggtggaacaaacgcaattatagaatactttggaccaggggcaagaaatgtaagctgtacaggaaaggccacaatcactaatatgggagcagagattggtgccacttgctctgtatttccatacgaccccaaaatggaatcttatttgatttctactggcagaaaggacttagcagatattgcaaataaaaataaagacttgcttgtacaagatccgtcaattgaggaagaaattagccagaatcatgaaaacgcctccaaatattttgatcagcttatcgaaataaacctagatgaactcgaaccctacattgttggcccacatacgcctgatctagctagacccatctcaaaaatggcccaagacattcaaaagaacaactatttagacaccatctctgtttctttgataggaagttgcacaaattcttcatacgaagacatgtctcgtgcagccgatatcgcaaagcaggcggtagaaaaaggaatcaagacaaaatcccctcttcaagtgacaccgggctcagaaatgataagagaaactatagaaagagatggtcaaattcaattattaagagatattggggctaatgtattagctaatgcttgcggaccatgcataggacaatggaacaggccggaaataaaaaaaggggagccaaacaccatagtcacatcctataacagaaactttccaggaagaaatgacggcagaagggaaaccatgaactttattggcagtccagaacttgtgattgctcttgcactaggtgggcgtctttcctttaatccattagaggacgagcttgtagcaagcgacggtacaaaattcaaactaaaccccccaaaagtagcctccgaagtacccaataatgggtttaaagatacagcggatatttatgtccctcctgcgctggacccagaaagcttagcagtggtaattgacaagaacagtcaaaggcttcaagcattagagcccttttcagaatgggatggaaacgactttagtaagctaccggtattgacaaaggcaaagggaaaatgtacaaccgatcatatttcgccagcaggtccttggttaatgtacagaggtcacctcgatagactaagtgacaatttgttactaggtgcagtaaatgcatttagagagggagaagtaggtaagggattgaatcttttaaataacaacattgaaactttttcccatattgctagagaatataagcagaatggattaaaatggataattatcggtgataaaaattatggcgaaggtagcagccgtgagcacgcagcaatgtctcccagatttttaggatgtgctgctgtaattgcaaaaagttttgcaagaattcatgaaacaaatctaaagaaacaagggattcttgccttaacatttgttgaatcttctgattatgaaaaaataagagaagatgataaaataagcataattaatttgcaagatcttagacctaaaggagtagtaacggccataatataccataatgatggctcgcaagaacaagtacctctaatacattcatacaatgaggctcaactaaagtggtttcgtgctggctctgcccttaacatccttagaactaatgataaagtttaatggttcattcgctcattcactaactcgctttcttctttgttacctacatatatcccacaaacaaggcaagataacaattaggcacgcctggtcagacaaaacagagtttatttagatcatcaatcttaagtgcaattttcgcttctaaaaaatattcaaatcagagacctcaaaaaatcctaatttcccggaatatggaatttcttccctgaatttaacagggtcttttactaagaaaccatacctcttaaatgaatgatttgattttatgtctggtgcaatcaagaaatgcttatgccggtcacgcaaaaaaacatccatcgttgcgtaccttattacatcatataggaacgcttttccaataattgcgcccttaactaacttgttttcgtcaaaacctaaagcagagcatgcatccatatttacattttttgaggcatgtattaaaaagggacctcgaaagttagtgttccattttctgatttcaatagtttttttttcacttgcaagcagttcagcataaggctgttttaaagaaatgcatttcaaatgttttaaattttgtaataataatatttaaagtataatgatgtttctcaaagaggaatgcctaatttgctttcacatattctcgaattcatatagataggaacgatcatccaagtgatagaatctacatgtactcagtcacttctcaagcgtaaacacattttgaaattcacattcaatctattaaaatctgattatcctctctcttcttgaataaatcaattattagccaagatcaaatatattggataaaatctttgatgcgtttcctctaatagaaaaatccattattgaagtcatctcagtaacattgagatttatctctatgagcacagcgtggtttttgatagcataatatggtaaagtattggctggtgatacatttaatgatgagccaataacaaacattacatcacattctgttgataactggactgcctgtccccacgcgtctacaggtaattgttcctcaaaaagtactacatcaggctttaatatactattacatgctgaacaaactggaattttattttcattatagttgttaaaaaaattggcatgattgtactgttctctttttccgcattctagacaaactattccaaaaatgtttccatgtagttcaatcacattttgggaacctgcacgttgatgtaatctatcaatattttgagttataatccaactccgctctggttttattttttcaaatttcccgatagctatatgagcattattacaatcggcttcgactaccagtctttgccgtgaataaaagaaatcccaaaccaattttggatttgaaatgaaggcagagtgcgatgcaagttttgatgggtcatacgttttccacaatccatctttatctctaaatgtaggaattccactttcccttgaaatccccgctcctgtaaaaaatacaatattttctgatccttcaattattttgcgaatttgagctatgtcgtagagataatcgtcctgcttgccatccctggtactcattcttgcttataacgaaagaatctgaattcataaatgtatctggttcctaattctctaggtatttaagtgagaatccaaatggtgatggtatattttaaataatatagacggacaaacgaacggattcttctatccactcagaaattcaatagggaagaagcaagctcttttaaatggaataactttccgatattgtggatctgaatattatattcatcaatgtaatagcatattggtcaaaagtctgaatgactgatttactcaaagtaggtaaatcatcaaacctacaggtattcgtgcttcacattgtcctgaaattttgataataatttttgtacttttggatcaatcacataactacagtatggtacatccttgttgttatcgtagtaatccttatgatactgctcagctggataaaaatttttgaatggagtgatttcagtgataacaggattagagtatactttcattttctcaatattttctttcactgatattgcgatatctttctgttttgcagtttgataaaaaatagcagatctatattgtgttcctatatcatttccctgtctattaagtgtcgttggatcgtgagtataccaaaatatttcaaggagtttttctaaggagattatttgtgaatcaaatcgtatttggatagcttctgcgtgaccggtttcgccggtacaaacttggtcatatgacgggtcctttacgaatccccctgaatatccaggttcaacagacaggattccacgaactctcttaaaaacggcttctgtgcaccaaaagcaaccgtttgccagaattatctcttcaatactattagacttgcttgaattttcgctgttgcgattcatgtgaatagtctaggtgaccaccatattagatttattgccttgctacatctattcaactgtatagatttaaagaatgtaaagatttggacaatatattgtctttaaattaataatttcataaaaaaagaaattaaggatagaatttctagttgacaagatacaggtccatcttgatctattttctaagtttagttagttcctttgcaacagcatcaatagtatacgttactgtgaagggctctccgctggttttgtgaaatactaatgcattacctgcgaaatttagtgtccctgaacttatccctgtaccattaatttcgattgggacgtcaactaaatgtcgaaggtgagttatcgcaatactcttatttccaggcaaaactgcatgatatggctctgcatgtgttgaatctggattttctataggtacataagtatgaagaacctcgacttctatcggtttacttgctgtaaatgttactgtgcctgaccaaatattcccgtcaatccttagaggaagggcaaaaactacttcatgggatggttgaccaggatgcctaactggtgcgggtacagacattgaagtgttttgaatggttatctcctctagagctaataggttaaatgatggtatttcagcctgggaacttgtggtcccatttgaaatggaatttgatgaatttgattctaagagattatttatgtcatttacaatgctcaaaaaggatccagctgataagttttcattatctgtcaaagcagtcatactggtttgattatcaccatcaccgctaatactactatcgctactgctgcgaaggacattagatgaatccagttgagcatacgaaacttgatatgggaaaaaaattatcgccgccataaaaataaatgttgcaataccagtttttgcaaaaaagatattttgtctttcctctttatataccatttctatattcattatctacctcataaccgatgtaaaagaagtaaaaaaatctttgctaattggagagaactgtttagcaatcaagctcaatttgattaacgattcaccacaataaaatctgtgatatccatgatctttcgctaataggcatgtttgcttgatttattcataaaccttatctaaatttgagggcaaaaacggacatcgttcaataaaacattaagccatatgataatctaataaaacattaaaccaacaggataaaaccaatttcgataaatttgcagctttggaatataaaagacatattgtatcttgttttgtgaaattttatgatgttattgcaaattcctaatatggttcaaaataaacatcaaaaagggtcaggcaagtcacttgatggtcaaaatgttagctattcataaaatattattcgagggccagatggccaaacttagctacctcaataaagctaagatagcacagaaatagggtcgctttaacagttactttgcttcttactccacataatggtgatgtattaactgatcatagaatcttatagacttgatatttacaaattcaaacattccatgcttagataattccctgccaaatccactatttttaatcccaccaaatggaactcttggatctgatacaacgacattattgaccgtaacgattcctgcctgcagtaattttgagtacttttcggctttccccaaattttgggtccaaatgcttgctccgaggccaaattttgtatcatttgctatttccaatgcttgttgttcatcttctaccactattacgggtgcaactggcccaaatgtttcctcttgtgccacctccatattaggagtaacgttttttaagatagtaggtttgtagaaatatcctttttcatgtcctccaattttttcactcaagcgttgcccacccgttaccaattctgcgccctcttttaaggatctctttaccatctcgtctatactttctagtgaagaagaatttaccaatggtcctatatctgtctcatccgacaaaggatctccaatctttaacttttctgtcttttcaacaaatttttcaataaattgagaagctacgtttttaacaacaataaaccgtttggatgctatacaactttgtccacaatttatgaaacgtccttttacagccccacttgacgctttatctatatctgcatcttcacaaacgataaatggatcgctacctcctaattccaatactatcttttttaattgagcggttgcattcttggccacctttgcacccacaggtacactaccagtaaaagtaacggcactaacatcttcagagttaattaaatattctgcttcaacagaggaagcaataacggtcttaaaaacgttgtcaggtaaaccaattttttcaaaaactttctcaatttccaatccacattgcatagtaacacttgaaggtttcaaaatgatggtattaccagcaatcagtgacggtgcagcgaatctaagggcctgccaatatggaaaattccaaggcattagactagcgattacccccaacggttcaaatgtgacaatagatttcctagcgtctgtattgataacttcatcatgtaaaaagactgcaccattgtcagcgaaatattctacagcccaaatacacttgtctatttcggatctagcttctttaatggtttttcccatttctgacgtagctattcgtgcaagcttttccttttccttcttaaactcatttgcaaaggcataaaggaagcttgttctcttccgataatcctttttccattctttgaatgctttcttagatttattggctaaagcggtgatttcatcttttgatatgagctggtatgctttaataatttcttcagtagcaggattaacagtggttataatactatgatttttttctttacttcttggtgtattgttttcttttagagggacattgttagaattcaatggatatccaagcatctcctattcataagctgcaatttatatagtacttttaatgattattggaattaaactttgctaatgtcttctatagtgcaatcttggttttgctatcaactcaattttgtgacctgacataatatggctacctagttatctgaagctgaagttaataacacgcgtatctcgcattcttacagggtcggcttaatgccattttgattttgaaattgataaaatatgaaggcaattgttgtttttgaaagtcaagttttaacctttggtaaattccaagcatattttatagctaataaccgaatgcccgtagctgagataattccgctaatcgctgctataacgggatctgacaaaataatcaaaacataaaaaacaattacgcctacaaaactggctgtagcatatagttctctaaccaatactagtggtatttcattaactaggacgtctcgcaggattcctcccccagtagctgtgattagaccgccaatagaaactaggagtaaatttggaccaaaaatagaataagcaatgcttgccccgattactgtgaatacccctaatcctaccgcatcgcattttagaaaaatattccaatgtcgcttcaatctaggatacaagaaaaaaatagaaaaacctgtaatgattgataagatcaagtacataggatctgataaggcagtaggcggatattttccaaaaataatgtctcgtgccaatccccctgcgagcccagtaacaccggaaagaataactactccgacaatgtcagctttttgatctattgctttgaatgctcccgtaattgcaaatgcaacagtaccaaaataatcaagaaaaagtatgatctctggatagtaaataaagacatagtgcgagtcaatcatacacaaatagtaactagaataagacatatttgagattgcatcgttgcgatgaaatagataataaatttggtctagtaattattaatgattgcatttagtcgattcgaaggttgttttagcgctttgttgattgatacaatttgtgtttactctgattgttgcgccataaacatgctcatagatagaaagaccttttagtgaaaatctcagactaaaatacaatgtctattctcgctggttctaatattaccagcaagaatactataagtggataaattgaataaagatatcaaaatagttattgtttattttctataatttgaaaagatttggaaaggttaaaagggattaggaaatgttggcaaaaaaatacccactattgatactacgatccagataacaacagcaatcaaaacagccttgagccatcccgcaccatagagccacttgagggatattaaccaaacaataccccctattgcggctgctaaaacgccatttccaaatatataagaaacaataccaaacataattgagcctaaaagagcagcaaagaaggcagttttaattccctccttttcacccaataactttgtaactacatagattagaagagttgataccactaaaccgatcaagaaacttagaattcccaattatatgacttcgtattatgaattacaaatattaaggttatccagtttgggcgagtcttttaccttaacatagcctccgtttaaacaaccaagataacatgtgtagtcaatacaattttcgtatcgtcgaagccttcataaaaatgaattatgactgattcattttcacatataaaatttatgtagttttatagggaccaccataatatttgagaggatttcaaaatttattcttcttttttaagatgtttaaatatagatgagatgacctaagaaatcgcttatgaagcaaagaatgttccatttcccgtggaaccctgcgaaatggcagatgacgttttcatcaaaggtaatttcacaaaccggatggacaaaaatcgttgaagtttcgtaatgagaatgtccaaatatgatgcaattatttttgactcagccaaaagatttgaaaatatagcagcacccatgaaggctctctgaagtcgaaccagtgatttatggatagaggatcactcatagacgagctaagtgcggtatttagtgcagctactttagtttatggcgatcagaaaagtactactactatttcaatgatggttccagtccttcagcatggaatgataattgtaggtgctcctgacgccgtttccaaactaactcagagtggagtgtcctatggccttagaagaagtgtaggacctagatcaaataaagaaatttctgaaccagacaccaagataactagggcactaggaaaaagaatatctgaattgacacagaaactatgacaaaacgctctttggaaatataaaacaagatttcctcatccaagacaataaatctattcaaaattacttgttgatactccatacttccaattgctattgttcattttgtttatgaaatctaaaacaacccttttgagaatatctataatttcctgtcccttttgaactgatgcctcttttggggcgcctgttgcaccggttgtagtcagttcactaaatttccagtaaagtcgaatatcatcactaggcaggttcggaataatctgttccggtgccgagcgtatgtccactagatcaggtcttattgccatcatgacagaagtttctgcttctccaccatgccctaacccactccacacattgaaaagatttgagtttttttgaccaactaatacccaccatgattcaagacaagcaataatcatatccggatatctatttttcaaatttcgagaagctacctctattggtgcaatattgccatcatgaccatttattataactacttttttaatattattttttgccaaactatctaggacatcttcaatcatagaaatcattgtggaaaattttagactcatggtcatttgaaaatcattgtgatgtatactaactccatatgggatgacaggcaatatgaaacagttatgatcagaagagggattgcttttgacaatatcatcggaaatgattttcgcaagattcattggaaatatagagtcagagccaaagggtagatgatctccatgattttcacatgaaccgagaataaggaaagcaatagaattgttgttgaccacttttctaacctgatctgcgttcaattcttctaagagtaattttctatccattaaatcaatcaacttctaattgaatgtgctatactttaaattttcattcttaatacattaccattaagtttcagacagtttagtgcattgttggataatcttttggaattatatggctgcagcaaatattatgattcaatcaatcattttagagtgaattaataaactaaatcttggtctttttccttgatattaattgataattaaatcttctttttttcttttctagtatcctgagtcaacacaccatttgatccaacaagttcttcaatcttgtgtgctacaaataaaactaagtgatctccatacggaggacctattgtttgaaggcctactggaagtacaccttctttctcagaaacaaatcccagtggaattgtaattgcaggaattcccatactgttgaatactacggtgttccttagtaaagattttcggacattcagttggagatcatcgattattatatcaatttttcgtagtttgggcaccaagataactgtggttggtaatagaatcgtgttaattccactattaaaaactttcataaattcatccttgattttttctatttgttctttggctcgagtgtactcattagtagttatgtgatttccctctattagcatttttaccacatcagatccaaataggcctgcatttgattccagcctttttgcatgaattttagaagcctcgtataatctcaccttcttccagctaaaaaaaagttatttgtatactttatgtgaaaattctttaccaatattggagattctaaaacaatctttaagaaatcaaaaaacattttcttaattcgatgatcaataactttaaggaaatatccgttcggaattcctacaactaatgaagaaatactcaaatgtttgttgtaaagcaatgtatttttttttactttcaagaaatttttgtgattacatagtccttcaaatattgcatttgagtcccacacacttcttgtcaaccagccaacatgatccaaagatggtgaaagtggaaatatgcctgaatttcttattacaccataagtcggcttcatccctactacaccacaaagggatgctggaactcttacagaaccacctgtatcagtacccaaagaaaatacaaccataccagtagctacggcaattgcagagcctccactagaacctccagatattctagacaaatcccatggatttttcgagtctccgtatatagaatttttgcctgtaattccggacgcaaattcgtttagattatttttacccataagaatcgccccttttttattcaagatttttacaactgatgctgtagagttagatacattactatcataaaatttagatcctgcagtaaatttgatgccctttacatgaaccatatctttaatagaatatggaattcctagcagtggattcaaaagatcattctgttttactcgtctatcgcattgctcagcgaattcgaaaattttttcttcgtcgagaacagtgatgaaagaatttagtttatgattgaattttttaatttggcccaagcagaaccgtgtcaattccgtaggaagcaactcgccattttgtatggatttggataggctttctatggtaaatggagatattggaggcgtcaaatcaaacataatttcaagtataccaaccactctttagattttaagttatttgataagtatcatattcagaaatttactttgatatatacattccaaacgtttttctattgcaattacctttccagctaaaattgatgaagttattttattgtcaaaagcagtaaagagtgttaaactacaaagatgcattattggttttattatgtttaatagaatattgaaagatttattacaattctacgttattgtttcttccttcagtgccaaccatatttcagtttattttcactttcaggtatcgaatagcctcatatgatttttatgctacggacaaaaatagggttaaaaaagattttaagctaaatacgtgtatgaaagcattgatataatttttaaaggaaaaaataacatagactatcacactaagattactgactatgattcgtcaaaatgattggtccaaacattgttaaaaaatgggtaaataggatataatacttttcaacctgatgaacaaaatattaacaggaatagtttcagccttactcgtagtaggaattgttggaatgtatattccaaatgtatcagcaactattgaacattgttctggtaatagtgcactagcacaagaaggtagtagttcagcagagcaaagcccgatgcaagggcaagcaagtggttctgacgcacaatctattgcaccagaatttaatgctttaactggtaacagtcttaatttggatacacaacaaaatggcgattgtttatcaccattagctggacttgaaaacgaaaatccattagcagctacaacagctctccaaaatagcaccgccaactagtataacaactacccctcaggggttttaatattttttctttacttttgtttttctattgattttcacaatattaccttatattggctatagtctaatatcaatagataccataactacgttattatattgataaattgtttctaaataaatgaaatcgattactgaatatttaatattcaataccgaatcaaggtttgagctaatcaatataacccttgatgtggaaaagatcttaaatcgaagcgggatcaaggaaggtttatgtttaattaattcaatgcatatatcttctagtatattcatcaacgatgatgaaaaagggttgcataaagattttcggggctggttagaaaaattagctccgcacaatcccataaatcagtacagacataatgacacaggcgaagaaaatgctgatgcccaccttaagcggcaaatcatgggaagggaagtagtggtcgcaattaccaatagcaaattagacttcggcccttgggaacaaatattttatggagaatttgatggaaatagaaggaaaagagttctagttaagattattggtgaataactgcttgttactaggctactctagcataattccaagtttagtaaccaaattaaactgcttataaagggatcccctccggtaaatacaaaagctttttcctccaacaatatgactctacctctttagtctaatcagaatgcctaatggggagattagaagtgataattactagacatacatacagacaaagtttgatatctgggtgaatggccataggaatttgttttatgtgtttattgagaaatcttgtcaagattctgaatggaaaatcatcataagaatttacacgaaccgtcattttttgagcaaatttatcgactagtatcagaaataatttgtcaacattatatacctccttatatatagtatattggatgattttttgacccaaaataattttcccctaaaaagttggcatattgaaaatatggaaaagacagttataaaatatgttaaaggacttccacaggatgcttcaaaatgggagataagaaaacacaaaaaatatggcaaattatcaaatataattagaaatatccattatgacatcaaacatggcgttactaatgatcaagtcattgaggtattcataaaaatccgtaatgaaccactgttctgtgatttacagaataatcttgatgcaatgaatagactcggagatttagaaagacattggaaagaaatatgaatgcctatatagcagccgtttaatataggccttaccaaagcactccaaaataaactttcttagcacaaaatatttaaccaggaatttaatcaagcaaaatttattggtcgaaggattccagggttcaaataactcattgactttattttggacatacaaatacagaatgtaaataagaatcatttaatcaatttctcattcataaaattaaagtaattattattctaaaaaagaaactcatttttataaaactgattacagacttcatctaggtctgcaagttttcaaaaagaagtcattcttttcaacagaaatatagctatcttctaggtcttggactcgtattcattctacgatgtgaagaagaacaataaccacaatattctgtgatgcctgcttttccatggcacatacactcacatttacttcccgctgaaaatttttgtctcatatgtataataaatacatcaacccttataacaattggtaattttagatatataaaaatcgaataattacaacttagattagatttatttaattgcgaatggatatacacgcttttcaattttagatttaatggcccctcactctgtataacaattactcccggtttagtagtttaatgtattctaggacttttttttcaataatgaatattgaattggcctctatatcgaacgagataagaagataatatttactttcgttgacaccaggtaatggaatcgtagcacgtatcagtttttcatacttgcccacagaataatccaaggtacctaaattcttctggaaatcttcacgaagttctgccctaaagactgcttgcatggcatattgttttgtctcatcgtcattcattaggggatttaattgttctcggtaggaagttgccaacaatgtacccatcccatttgctatgcctacaaatctgataagaggatccaattcccttatgtgtttgcagtgaatatttgcgaaactctcattagcaaaatccaataatactcaattaatatcaaatatgatcacgttattaatttttcttctgatccctcaataatttgaaacctagaattccaacatcatccaactcattatgaaaaactaattggtgaaaaaccaataaggtagcagaatatgttatccattatttttcatggaaacgatttattttatctcttacagaagacatcgaagacattgaaaaatgtcactttaataaatttaatattagaaaataatccaatttttagatctacaggcaaaacaagattttggtttagcctgtcattttatgcttttttctagttgaaaatcaccatgatagagaccttatgtaacaggattacataataggaacggaatagtgcttttcattcccagacaattttttttgtctcactgcctttgacataatcgcatattctggatttagatcaattgcttgattcaagtaaaatacagaatcaggtaattcatcatcatccaatttcgttttagaaacaaagcatctgtaccaaacctcgggtattaagggatcctgttttaatatatggttgtaaattgagactgattctttgtaagagcccatgtgttccattatgtatccatatgtatatagaacatctatgtcggttggatcaatgcctaatgctcgctttattgtttctaatgcttcgttaatacgtgcagggaattgatttgcaagtatccacgcttttccatttagtgctttgacgttatcagaattaatttccagcgttttttcgtatgaaaagatggcttctgcaaattttgatgtggctgatagagccattcctttattatagaatgcatctgcatgataggggtttatctcgatggccttgtcaaaagatgatatggcttctgcaaattttgatgtggctgatagagccattcctttattatagaatgcatctgcatgataggggtttatctcgatggccttgtcaaaagatgatatggcttctgcaaattttgatgtggctgatagagccattcctttattatagaatgcatctgcatgataggggtttatctcgatggccttgtcaaaagatgatatggcttctgcaaattttgatgtggctgatagagccattcctttattatagaatgcatctgcatgataggggtttatctcgatggctttatcgtagcaggctatggcttcttggttgtttcctagatgatacaaggacaagcccttgttgttgtaagcatctgcatattgtgggtttatctcgatggctttatcgtagcaggctatggcttcttggttgtttccagtaacagataacacgatacctttattacaaaatgcaagatcatactcggggtttatctctatggctttatcgtagcaggctatggcatcctggctcccaatgtaatacaaggacaagcccttgttgttgtaagcatctgcatattgtgggtttatctcgatggctttatcgtagcaggctatagcttcttggttgtttcctagatgatacaaggacaagcccttgttgttgtaagcatctgcatattgtgggtttatctcgatggctttatcgtagcaggctatggcttcttggttgtttccagtaacagataaggctatacctttgttgtaaaatgcaagatcatactcggggtttatctcgatggctttatcgtagcaggctatggcttcttggttgtttcctagatgatacaaggacaagcccttgttgttgtaagcatctgcatattgtgggtttatctcgatggctttatcgtagcaggctatggcttcttggttgtttccagtaacagataaggctatacctttgttgtaaaatgcaagatcatactcggggtttatctcgatggctttatcgtagcaggctatggcttcttggttgtttcctagataatacaaggacaagcccttgttgttgtaagcatctgcatattgtgggtttatctcgggggcctgatcaagggaagagacgggtttttgatcgctatcggtagaaagagtagaactgtttgcatatggtgggtttatctcgggggcctgatcaagggaagagacgggtttttgatcgctatcggtagaaagagtagaaccgtcgtttgtagaaacattactaatcttgcgaggtattgatttaatcaaattcgccaatccctcaatttgagtttctatggatgctttgtgcttcatagagatatccgagtttctaatcttggcatttataatggcggtaatattatctattgaatttcgtacagatggatcgagatctataagagagtcattctttagagaaatttcgcaattgtcatattccgcattatcgatatccgccacataatcatccttattcgtattagcagtattattatccctatttacatctctagggatattgttaactttataattatcatccaaataatttctatttatattatcggtatcatttatttaactattatagcagtcttatctgacaatgaaaaggcgtatccggcacaatataaatctcatattaatttataaaaaaccttagaaatcacacacgtcaagactactatacatatcagtaaatcgtagaccagcgtatacaaattttttgtcctaattgttcaatgttttgagtaatatactcgcttagattgttttctgccaataatcattttcctgtaaataattaaaagttgagattatcaatgaaattataatcaaacaatattgttcaaataaatcaaattacgtataggatattctaattattttgaataaatgttagtaccttaaaatagaccgttcttttataatttcattaagttaaagacagtctgaatcatattattaataaagtatagtcaagcattcaggtgactttgcattcgctatgttggaagattagtcaatgttgttaatggatacttttcaatttagaaagatgatttaaaactaggcttgtaatgatatcacaaaatgaacaatagacagataatacctgaaattatatgaaagaaacatagaagcttatatccataaatcataactatcctattatattattaaaagtataaatagtcgactcgaatattaatacgttgccgttgaacaccaaaaccctgtgtttaaacttgtttgaagagttttaacagggcttgaatgatcaaatattgttagtatcatctatttattattgaacagtgttactataatgataactcataagttttatacgtgcttatataatatatgaataaatttacaaaagaaatcgctaatattttagcagctcaaattgataataaaccatacgaaatcgttcaaagtggtcttaatcaagaacaattagaagaaattaacaagtttgtaggcaaatataatagatccagctttggcccatttcctttaaagtcaagataaatcgttcgcatttattaggatgtttaaaacgatattaatcaggatttgtcaataatataacatagaattaagagatgtggatagattgagaaataataaatgtataatatgtggaaggttctatgaaacgaccaatttgccgagcttatcagcaacatccgagcccctagtagataagaatgattgctatcgaatatataaaaagttattaggcgtttatgggaatgcatatatcgacctcttgagttctttttaatatttgataaaattatcctctaattgggattctatcacatactatacagggtaactggtatgttctaattttgtaaagtaatcattttggtatgacaaagttacttaaaaataaaacgttgaaaatcgatttatgaattcttaactttttaattatagaaaagatggattgatatttttgtaatacatggatagttgtcaattcattatatttgctcattacatagaggtaaaatattttgaaaaccatgatgtagaatagccttatcctgcaaattagtagtaggtaatttgtaagatttataatttctatttatcttcaaccatatagaaatgccaaattaaatattaaaataattctgattctattggataaaaaatagaaggtaattaagaaatttatgatatatctataattgtagatactaagaaaaaaagggttcacaaattaaatattcaaataggagactcagatatgcctaaataatgaaggcttccattaatctcagatctgtaactggcaattcaagagcagttacactttcgatttcggtctttattttattactatttgtagattattatataagttcaatctccgatgtagcaattggttttattcaaacaacaacagggagtgttctatttgcgacaattatggctataagtctgttagggagcttcataataattaaccacattttgacaatagtgaacaacagaaaatcgatttttagtaaatacaaaattcttttaagagtaattcaattaattctttattccttatctgcatttgtactttttgatatgattatcgataacaaatattatactataaatttaaccttaataaccatatttagttatggctccagtatagttttgagcttattagttagttctaaattactttcatggtataaagaaaataagaataaattttccctcttattcggtatttccatattttttatgtttatcaatcttttagtttctatattcctttttgcaacgctactttctgaaaaaccatctgaaattactatatctaccccagtagttttcaattttgagtgcgacaacgatagcctttattgtatttttaaaatgagtgtaataaccctccaatcatattcaatgatggcctattttgcgttactttggatttgcaattactttctcttacactatcaaatcaaaaagataggaagaacaaggttttttattttgacgagtattccattgatcctatttttctttgtattcatttaccattacgatgaaatttattcgctagctgagaatatgaattttgatgagagtattgtgtttatgtttcagatttttatgctaatactttcaaccacactttgtggaatattatatggcctaggattcaagtcggtggccaatctacttaaaatatcaccaaaagttgaggggcatttaaaaatggcgtcctatggaatcattctgttctttatctgtgccaatgcaaccatagtaggtgcaggtttccctccctttggtataccaagtataatttttcttccattcgcctctctattgttctatgtagggacatattattcaattattgccatttcaaatgatattcgagttagaaaatatatcaagaattcagcatacaaagaattagaaatcatgggagacctggctcagtctcaaatgatcgataatatgaaggaaaaggttttagcaatgaccaagagatactctgatgaaattcatcagggtagtgaatctgaatcgatggaaacggaggaagatctaagaagttacatggacgaagcaatcagtattttcaataaaggtaacagaaaataaattttattctagattttctacctgattaactagatctttcatctttgtcgtaaatggatgctctggaaattcatttgtagtcaaaaattccttttccttaaactgaatgtcacaataacacggaatctctagcagtgtatctacttttaccaatccgcttacgaacttttccaattcattgtctatcttatctttaaagacggagttcccgcttatgatatctgtataagtagggtcaatgttcacataaggcacacaatatccggaaaccctatttaacaacaatttgcaaactgatccgtgttcgattaaagaggagtaaatttctttaatcattttaattgttcctcttaaatccaaatcacccatttttaacgttaataagactatatcagatatcactatagaattaattgaccaatatcgtatcccgggacttgtatccattactataaaatctgcttctttattgaccaataggtcttcgcgcatcgcaataaagtttctgaactgtcgtacctgttgttccttatcattaagcaaactaccttcgagttgatatatatcctcttttccacctttagaaaaacctattgataaatccccttcaaatttaaaatctattagagaactgaaatcaatcataacatcatctaggtcagctttgtttttcagataatcatttatccaaaactttggctcaatattaaaatatgtatatagactgggagcgtaaaaatcgagatcaagtaaatatactttgtaaccctttgaagccagcagaaaagaaaaattggcagctagtgtggttttgccagttccacccttgtaagaatgaaaggatatacattttcccaatctatgtactttaaatgttcatttaaaatactttgtgcaatagaggtaatggcataggtcagggttattgtcatctctaataaaacttataataagtgtaacagactattttatgggtaattcgattgtaaaagtacttccgaccccgttctcattatttctccctttaattctacccaagtgcttttccacgattattcttgataggtagagtcctagtcccgttccaagtttatcagtggtatagaatttagagaatattttttcaagattttcctcattcataccggatccagtatcaataaacttgagtacaaaatatctttcagtctgtcgaatggatattacgattcgccccctttcagtaaactttatagagttacttaataaattatctagtacttcaatcattcgtatcttgtcagcctttatcataatcttttgggataaagtatccaattctatcctgatgtgctttttgttgacttgaatagtataatcacctattaattcctcgacgacctggacgagatcaaagtattcaatgttcaaattaaaaatattattttccattctggcataatcaagaatattatttgtcatgatatccaattttctagcatttctagaaataattttcagcaattcatttttttgatcggtgtctagcctcttattattttgaatcagatctgaaaaaccaagaattggttgaattgggttttttagctcatgagcaaggatccgaacaaagttatgattggaagtattatttctattcaattgattagaaagatcctttactctattttcgaggatagactgcttccagaggctttcaaaaatagctgaattatgccaaactacagaatctttcaaagatatcacattgaagaacgaattagggaatcctctttcaaagttactcttccattcagagaataatgatacagatttatctactccagcaatgaaatacttaaactcatcttcatgaatacgctgtatttcgacaaaaggtagttcagaaatgtttattttctttaagaacgaatctacctttttgcttttaggaaataacaatctaatctttggtggaggtctgtgggtttggctaacgcgtaagaagaacccttctaaaacatcaataaactgttcaaatataccagtacctggaacatactacctgtaattcatctttagtttcatataattcatcaacgagtctccgcttaaaacttgaaaagtcagaaacaacttccgaactgctgaattttgttcttttgatatcaaacagagatagttgaacaagatttcccgatccagtcccccaattaatttgatcaaggcccagctccgaaaaatctttcccatatacagagacaagtctattataaaaggtataacaatgcttgtgatgaaaccttttatctacatcatttatctccttaatgaacaaatcagcattattttttatatgttttccacataagtaacaaacaactacagattcaggttttcctgattgtgaattagaattacttctgattgttatatagtataatgatgacaataattaaataaacttatctcgctgcatttgttacttataaaaaagaagataaaatttttatattgttgaaataaacgtaagtgtgtctaagaagccttttgtttttaattttctagagaaattaaattatagaagaatcctaatgaataataccaatcccttagaactagttgaacgattaaataaatctaaaaaaggaaactcaattactagacctaaagtattgatattaactaagaaaatagacatagaatcagatctcctaggcatccaattcctgaaaaatggaattgattatataaaaattacagaagaggatatacctttaaattttcgttttgagtttaaagtaggaaaattaaatgactccatactatggcttagaaatagaaaagtcattcctgatgaaattaaaatagtattgtttagatattttgacttaaaattcttgagtttttatcctgggggtatatatcaaatgtattttgctcaacagtggtatcaagcttttaactgtatatcagtagcaatagatgctctatggataaataatccacaaagaacctttgaggctgaaaatagattgaatcagttgctgtgggcgcaaaagatcggttttagcatacctgagactttgataaccaatgaaatggcggcagctaaaaaattttttaagacatttcgtaaatcaacaattgttaaagtacttcatcatcatgagatttatctaaaccaaagatcctttaggttccttactaataatattgaaaccagtcatatatcaaaattcgacgagttaacttacgcaccagtaatttttcaaaaaaaaattaataatagttcagaaatccgggtaactgtagtaaatgacaggattttttcatgtagaatttcaacaactcaagaaaagcacaatttttctgatctgcataagataaaggaaaatgatttgatattttctgaaattagtatcggtaaaaaaatggaaaagctttgtattaaattaaatagaaaattaggattactagtttcaagtatagattttattgaaggtaagaatggggaattattttttctcgaaattaatccaataggtgattggaattggattgaaaagcacactaatttaccagtaacaaaatcagtatttgattttgtaaatggttttttgaataaacatcaaagcacatgattagtacaagaatgattaattgctaaagatacggccttaaccctttatgaaaatgagattataaccaagaatttagtacaatagaagtatggaaatgtaaaaatattttaattggtataacaattgataaagtattctataatgggaaataatatcatagtaatagatgatgatgtgggaacagcattattctttaaaatttgtttggaagatcagggacatcaagtgagtatttacaatgatccgaactccctcttagaggaatttgaacccggaatttatgatctcctgataacagatatacggatgcctagaattaatggttttgaattggctagtaggattagaattatggataataagattcgaatttgtctagctactgcttttgaggaatattatcaatctattataaagtcgtattcagatttaagttttaattgcataatcaggaagcctattaataaagatagttttttggagatagttaaaagcagattgagtgaacccgcgtagactttgattagttatgatcaatgtttttatagaaattattgctgagttattttaatcgtccctttctattttaaatccgattctaacttccacctgatattcaatttgctgatttccattcatccgaaaggtcactctccccatctccccccattgtatatttttcacggttttagatgcttccttaaaagcgttggtgacagcttcatttattccagttggcgacgttcctactatgtcaatatatttgtagaccatgattgattttaatttcggtcacataaaaatataatcaaaaatatacaaagagcagatacatgctagccatagttgaaaaaatttcaacaaagaggattattggttagtaaaactcgccctaatctttgactgattacattggttgcatccaactaggcttgttcaatgatctgtttcaaaatatgacggtgacatttgtttgaattttctggttcataacaaagtaacacaacatcgattcttctcgagaaatcttttatccactttatattggaaatagatcgtctggtgttcatttctttttgatacaattctgtgtactcactaatattcagttctccccgttcaagcttttcagtcaaactcttagaaggggataattcataaaaccaagcatccatcttgtgctggagttcaaatggtagtgtagaagagacagctatcctgtaaaaatcacttttatatctcgaaaggttggttagtgaatcagtatatatggtcacaaaactaatgattgcgacatcattaaaatcgtttttgatgtgaaaaaaaaaatagtgaacggtacgagatttgaattttttattatttaaatacctgattatggtttaagtttatttgataaatgtcaaatagatatgctcaccccgaggtcttggttgacacaagttggactgaggatcatttagaagatcctaatgtcagaattgcagaggtagactatgatccaaaaactaactatcatttgggacacattcccggtgcagtgttatttgattggaagaaagatatcaacgaccctttgagcagaaacatcatttcaaaagattcgtgtgaagaattgctcaaaaaatcaggcataaacgaggatacaactcttgtactttacggagattttaataattggttcgcggcttttgctttttgggtattcaaatattatggttaccaaaatgtgaggataatgaacggaggtagaaaaaaatggcttgaagaagacagacctcttgataaaacaattccaacatattcaacaggcaacttcaaagcatccagccccgatgagaaaattagaacttacctaattcacgtgtcagaatctcttaaaaatagacaaagcattttagttgatgtcaggtctccagcagaatttactggagaagtgactgcgcctgcagaataccctactgagcatgcacagaggggaggccatattcctgcagccattaacataccgtggggaaaagcagtgaatgaagatggaacgttcaaatctcctgaggatttgatgaaactttataaggaaaatggcattctgccagaaaaagaagtaattacctattgcaggattggagaaaggtcatcccatacttggtttgtgctaaaatatcttttgggctacccagatgttaagaactatgacggatcttggacagaatggggcaacatgataggaaatccgattgaaaagtaaattcttccattaaacttaatcttttatttttttaataataatattgaataaaggattattactagattttgataatgaagattgaactgggtttatctcttgcacaatttcaacaatttcttgtttgttttgatcagcccaacgctgtaattcaagatcagccgtaggatcatcagaaaccagtcttatgacatgtccgatactcatattattcatcatgaattcactcaattttgctaaagtggctgaacactcagttcctaattcatacatctgaaaatcaggaaataatttaaaacatttcacattgaatttctttatttgagattcgagctcatacttacactcattgattctttttatcgatttaagacttttcagattgtctttagttttgatccttgcaatccacccataatcaaatggggagtcattaacaaccttaggattatgaataatttcatcattaatttccacaatctgtccggaaactggagaacgaattaatccaaagtggtttaaactctcaactgtacccaaactcttatctctaacaatatcagtaccagccggtttcaatttaaatttgagtatcttgccggttatatacgaataaactggagttatacctagaaggacctgcttcatttcatctgttccatcattaagttcatctattgattttatccaagtaaagttatcaagattataaaagtaattgactggaaatacacaattctcaattctattgtctaaactagtcattattccaaataattaaaggaaattatttcaatataatagtaatcattttatcatattatttcacggtcacggatttggccaaatttctagggtaatccggatcaacttgtttctctaaagctaaataatatgacatcaactgtaatgggataatttccattattggataaagataattatcaacatcaggcaattctacaaactgatcataaatatcagcattcttgtttgaaattccgattatgtgggccccgcgtgattttatttcattagaactagaaatcacgtcttgatatgtttcatcggtagggtttaagacaacaactattgattctttgtcaatcaatgcgagaggtccatgctttaactcacctgcagcaataccttcagcatgtatataggccaactctttaatttttaaggccccctctaatgcaattggataatggatggatctgcccaaaatatatatatctttaatattcttgtccaaagatgaaacaagattttgaatcacactatctaatcctaatactttttttaccatcactagtaaattcttttgattgatttcatcaaatggcatttgaccccgagataagatattgacgattttatagattatcatcagctggcccatgaaactcttagtggcagcaactcctatctcgggaccacaattgatggcaagaattgagtcgctcattcttgccaaggacgaagtaggtacgttcactattgaaagaattttggcaccattttctttagctttttttactgaatgtaaaacatcagcagtttcaccactctgcgaaattgctattacagctgacccaggctccaaatagtcagatgaatattggaattcgctcgacataattacctcagtttttatttttgcaaattttgaaagaagttgttttcccagtaaaccagagttgtagcttgttccgctaccggttatatagatgttagaagcatttctcaaaaattcgcaaaaagtttgaaaattggtatcttgaaatggttttaatagagttaatgcttgctcatgaatttcttttatagtgtgatgcgcatactttcctttttcagtagaccctagttcccatgcaacctgagttataggacgggttgctattctttcattcacatcgaatatatgataaccgtcattgtcaatgattacaatatcgccattatctaagaaaacagatttatcagtatgctttaaaaaacctaggacatcgctagacaagaacaaagcgttatcagatattcctattatcaaaggttcatcaaatcttgcaccagcaataatgccgttatcgaaaatagcgacaaaggcaaaagaacctttgaggatccgacaagttttcatcatcgtttcgtttacattatggtgagattcttcgtagtatttttctaacaggtgagcaataatctcactgtccgtttggcttttaaaaatatgaccatctttggttaggtctattttcagctcttggtaattttctattattccgttatgaaccaaagcgatattagatgaacatgaataatgtggatgtgcatttttatcatttacgctaccatgagttgcccaacgtgtatgtcctattccaatttgtcctggaagtttattgaggttcatttccttatcaacttctgcaacttttcctatacccttgctcaccaaaatactgttgtcattaaaggtggcaatccctacactgtcatatcctctatactccatctttttcaagctctcaactagtaatggagctgcgctgattagttttccgctatacccaataattgaacacacaacattacttaaaaaaatttatataaaacctttattaaagataagatctttccgttataaaaaaagatataatcgatccctgtatttgactcgttgttggtcacaattatttttttattataaaaaaaaatatataccggcaaaaaaaaaattataacatcgtatattatgggaattgaaaaaaaaataatctatgaaaaggagggaagactttatgagaaaaaaatcatactatttgaaaatcaaaaagaaatccaagttttatcaaatccgattgcctggaagatactgaagttgatttccgatagacccagatacacagctcaaatagctaaggaattagagatttatgaacaaagtgcttattactatattagaaagttaatttcaatcggagcaataggagaatctgggtcatattttgtcaagggagggacagcaaaactatactcagctatcagtccagcatatggaattgaaatggaatggggagagaaattatcccttgattacaatctggatgattggaagaaaactacagaattcagggctgctagaaaattcttaaaagaattcattgatgaaaataacaaattcaacggcctagtcatagtaggatctcctaaccctcatggaatctttaaaacatcagctagagacgggcattatgcaattcaattggctttttttctaggaaatatatgcaatttacctcaaggatttgttgtaaagttagatgaagatgcaaaagctgaaaaggagttagaagataataacttgataataattggtggccccggaacaaacatagtttcgtctgaatttaaccgatacttaccgatcaagtttaatgaagagaacttttggtctgggctcgtagacaagcctggaagaatttaccatttagacaatttgggaattattgcaaaatttagaaatccatttaatgggggaaaaactataattttgattgctggggtgagatcaattggaactaaatcggctgtaattgcatttaccaactttagtaaaaaaacattttcagattattcaggagatgagcaggaatgggaagctctggtccaaggttatgacatggatagtgatggcaaaatagataacgttgacatagaaaaggttgtaagaacttaggtcagtaaaacctaagtatttttcacagtgtctgacgcttcgatagcaggggtaaaatgtacaagtatctggggttcttcctcttttcttaccaaatacccgggtagatttatctttctatttcctaagcttacatgaccatgaacaacaagttggcgagcttgataaggtgatttcagattagattttttcattataattgtttgtaatcttctctccagaatatcttctatttttaggttcaaaacgtcatccagggatgaaccgctagaaacaagaccgagtctcgaaagatagtttaagagttgtgtctccttttcgtgtctgacatcgatggacaaagataaaagtgcacgagcttgattccttatcctggcaatttctgtttgtgctttccacaactcacgcttatttcttaaaccataagagcctactacatataactctgaactaatttgatcactagtccaaatactacgaggtcgattataattcttctttgattttctaggatctcccattcaaatcatcactattatttagatccaggtgctccagctggtgcctttccggacgccttcttaactcccacggcacttgctttcctgccagtagttctagtgcattgacctctaactctcaaaccaaacatatgcctgtaacctctccaactcattacagacttctccctctcaatatcattcgattgtgtaaaatctaagtctgatgtaattaaatgaatatcgctgcctgaatccatatctttccttctatttaagtaccaattaggaacacctacggttcctatatttcgtatagaattttcaatatcagaaagttccttatctgttaaaaatcctacccgtaagtatggattaatatttaatgactgtaatattacttgggataaattatatccaacacccttaacttcacttaatgcaactactgactttttgctgccttcaatatcttttccggcaattcttagaatatgtttaaactcttcggctgacaacttgcttataaatgagcattccattttcctaaataaaaactatgctagcatgtttatctcgaaagcatgtcctgtcctaaaatatttacaaggttaaatcattattggactctgaaactgtaaaatttatattaagaaaatcgtgataatataataattatatatcgtacagcggaaacggtcaaaataagcgttatattcagcttcatacaattatagttaaatgaatgaaaagatcattcagaagagaaaggttgtggaaaacccggatgaaagagaattggataattatcaagctgacatagaactagctatagaaaaccactgaattgtggattatcaacaatcagattaagaaacgttggaaaatctatttcgttgttttaagtaattaacatgtttgtctaacttattcgaaaggaaaattttaataagtcgctagtgatatacttattataaaatgatatctgactggttatccagagtaggtagcgctattcctaggggattctctcgccattatatcctagagttattagctgaacaaccaatgacaggtaaggaaatcatagacaaagcaatagttcagacgggtggaaaatggaaaccatcgccaggccttatttatccattgttgggaagactgctggaggaaggattaatcgaggagcacgaaaatggtaggtatcgtataacaaagaaaggcatatcaatagcttctgatattaaatcagcccataatataatgcagaaacagctggaagtaatgttccgaataggcaatatgggaaaattcatgactatggacttaatcgacagaatttcagcaataggatccacattgagttcaaatcttgatagaatgactgaagaagaaaagaataagtataaagactttttagttaatgaattgaaaaagttgaacaatcaggaaaaaattcaagttgatgatagaaaagttgatgatagaaccatgacataactaaaatgaataacgattcaattaaacaaggagcttattatctattaagaggaggtaccttactgtctgagccttgtaaaaaatgtggaaatcttcagataaagtataagcaagatgtaatttgtatgaattgccaaaacacagaacagggtaaaaccgaactacagaaaactgttgctaacgatatcgaaactgaaacagaggccagcaaggctgatagcaaggaagaagataaaggaattactaatgtatatagcaatatcaatgatgtgctgagtgaaatagaacgtcaggtgcttttaactttagtgaaactcaacaaggaacaagatactctatccagtcctaaaaaatataagaaatatctaaaaatcgttcaaaccagcttaaaaactgttgaaatgatcaaaagtatcaaacagacttcaatatagtgagtatttactaaatgggcccaaatgatatatttatttctattacggatttctcaactggggtatataaggtcaagaggtgtgttcacaatcaacagaacaattcacacataatggcctttaatatatgtaacttcccttcattcgaaacgaacaaagattaaatgttataaagaatcctgattggttcctttattttgatcttctgagaccttgagagtaacacataattgatgatgagtttattaaagattttaatattaaagaaaacagtataatcgacaaaaatgatgaatatttcggttaagatactcaaagaaataaagttagacaattttattgtttttgcctccctgccagatatgggtaaggttggcggactggtatcagaacatttgattaaagaattcaaggtagaaaaatttgcagagatcggactttttgaaaagccatgggtaaaaaatgagaatggtttagtcaaacctgtaatagatacatacgacctttacataaattatgaaaataaaattatagtcatgacgggtaaagagcagccgcaagatccaagtaacctctttaatttgtgtataaccacctttaacattataaaagacgtgggagttccaaaaattatttatactgcgggaggatatcaccagcctcaactagctcaagccccaaaggtatacgcagtgtcaacagataatgtgatagtcagtaaattgaaaaccctaggaattaatgtctttgataaagaaattgaagttattacgtggtttaatggagttatgttgggagtggcaagcgaaatgaagtttaaagcaataggccttttcggtgagataacggaaactaatgaaaagcaacctttagcggcaaaatcggttctaaaagtattttccattttagagaacgtttcacttaatacagatgcatttgatctagagtatgagaatcaaatgctcgataaaaacaagcgacacgataactatggtgaaccatcaaataagtcgggacctggaataggttaaacttttcttatattaatagtagaaacaagaaggaaacttaagattacgaaataccagtgtaattgatattcctttaaactatgtattattcaataggacgaataacggaattaaactcccagatccaaatagtatacttactaaaaaattatttatttcttcgaaagaatgatgactgaataccaaatgttatcatttaatttttgaaaggaacaaatgaaatcctagaagggatcggtaaaaaaaaatcaaaagccaaaattgatttattgcatctattaagaaatagaaacattgcaaccaaaaattctagtaatcgccaaattcgttcgagtattcacactgtctttataatggttcttaaattagaatccatcatgttatcagtatctaaataatttttttggaatccgttatacgatataaaatgaaggtttatagtacaatattgtgatatttagaatttgtcctgaccttttctcgcgctaatttgaaatactcgaaagtaatcctgaagttctttagatcctgtttttttagtttactatttatggtagtaacattcattgcatctgatttcctatgttttcttagaaaattcattaaagccaaaattgatgcatgattaatcattccttcaatttgtgccccagtgaagccatcagttaatttcaatattcgatcaattgtcacggttttttcatctaaaggctttttttgaagatgtattttaattatttgtcttctagcttcgactgttggaacaggaatctctataactctatcaaagcgtccaggtcttaaaagggcatcatctattaagtctattctattggtagcaccaataacaatcacaccatctaaattttcaattccatccatctcagtcagaatctgactcatcattctggcagtcaattccgttccctcactctcctttttcctttgaagcgcaatcgagtcaaactcatcgaagaaaataatacaaggagagacctgtctagcctttttaaaaacttccctgattgccttctcagattcaccagcccatctagaaatcaattcggcaccttttatgctgataaagttagcgttagaattcgaagcgacagcttttgccaacaaagtcttaccagttcctggcattccatagaacagtaatccctttggaggtcgaatgtcggctatttcatatatttcagagtgatttagtagccagccgatcaaatctactaactcctcttttaaagtatctaatccacctacttcactccacttaactgttggcttttggatagagaactccctgattgctgatggggtaacatctttcagagcattattaaaatctgaatcaagtactgttattttattgagtaaatcttgtggaacaggcgactgatcaatattaacttgagggatcaaccttcttaacgagcgcattgctgcttcctttgtcaatacttccaagtcggcacctacgaatccatgagttaatcttgatattcgctttaggtcaacatctggactaagaggcattccctttgtatgaatatttagtatttccaatcttccatcatcatcaggaatacctatttcaatttctctgtcaaacctacctggccttctaagggccgggtcgatagcatttggtctatttgatgcagctattattatgattttacctctcgagtttattccatccatcaacgtcaaaagctgagatactacacgcctttcaacctctccagatacatcctcgcggtttggagcgatagaatctagttcatcaatgaaaagtattgatggagatttctcttgtgctttttcgaaggtctcacgtagtcttttttcactttcaccgtaaaacttgctcataatctccggtccacttatagagaagaagctagtatttgtttcatttgcgactgcttttgctaatagcgttttccctgtgcctgggggaccatataataatacgcctttaggtgcatcaattcctaatttttcaaatatttcgggatgtctaatcggcaattctatcatttccctaatttttagaatcgaatctttaattccaccaatttcttcgtaattaattctcacaagggcatggaaattacttttcttaaaagtaccaatcgagaattttgtggtatgctttactaataaaggactggagctaggattcaagaaatttaccaaaaagtcaatcctcttccctaccaaattaattgggatagtatccaatctagaaatcactcgaccatctaacatgttccctaggaaattcttaaacccagaatattctagttcttccaatgggatcaaatgaacttccttagccacacccacacttccagcaggactgaccatgatatgatcatcaattcctgattccagaatacctcgagtgtaaccatcaattcgaattatctttctaccatagtcggaagacaagcctgcagaaagtttcacaaatgtagtccctttttttccctttaatttcaatacatcaccgacatttagctggatatcagtaagtattttgggatctaataaggccaaacctttaccaacgaatttgatatcagtttcagctatttttaaagagatctcactagtattcttcgtagtaatctaccccgtacatacaaagttggaaatttctatagcatatatgaaaaaaacagccacgttacaaacctattacattatgaaacaatttatacattatataaattatatgaatagatagtaaagtttattttattcgagaagtatttattacatataatgtatgtccgagatatctcggtcccccaagctgtaaaagagattattttgtctaatgatttatacttaaaagcagtaaaatctggaattgccaattataccgcaattgccaaccagatacgacctgatgtagaatcagttactggaacgcgagctaacgtaggtacgattgtagtagctataaagagattcgcagatttgataaataaatcaagaaatttagaaaacttacgttcagaagatgaaccaatgggaaaatttttaagcagaaacgaatctcaagagcaaaattcattcatatcttcacaagacgcgaggatgaaactgactggaagcatcattgatattgatctgggtaatcagaattcgttcaagaatgtaaatgacttattagacgaatttacgcaagaaactctgatggattacaatttgatacgaacaaccgaaaaaataaggatagtaactgaagatatgttcaattcaaggaaaattattacatcattaacagaaaaatgtaacggcaagataactgacggattatcaagaattacgataactttgttttctgacaatatggtaggaataagacaattgttgtttaagatattcgatattttgaacaattataaaattacattaaataacgttatttttagcagtaatgaaatagttctgatattagaaagggatcaagcaatacacacctatgatctactacaaaagaaaatttttagaaattagaaaatcactaaatactatatgcagggcaattatgatctgataatcttgattctttgtttgtggttttaaagataaataaaccagacgaatacaaggtaaagccatgtcaaatgttttgagaatgaaaacaggtgaatgggatttgtcagaactcttgaaggatcctatcaaaatggagtttaacaaatcattgaatgatgttagtactaaagtagcaaagtttgaagagaaaaaaccaactttaggaaataacatatctataactgattttacaaaattgatcaaagattctgaagaaatagcagaatctctaagttatgttaccggctatgctcatttgaagtatgctgaaaatacttcttcaaatgatgcgggtgcactggttacgaaagtgaatatttttgctacagaaatatcaaataaactgctattctttgatttatggtttaagaaggtgttagatgagaaaaatgccgatcggttaataaaggaagcaccagatgtttacaaagactatctacttcatgagcgttccatgtccaaatatactctgaacgaggcagaggagaaaatagtaaacatattagatgtcacagggatgagcgcattgatcaagatttatgatagaatgactaatggctttgagtttgagtatattgaagaaagaggaactagaaaaataagaaaaaccattactaataaggagaaactaatttctttagtaagaagttcaaaatcttctgaaagagttgctgcttatagatcattgctgtcaacttataagaaaaatagcggagtcctaggtgagatatacattaaccgaattttaaattggaataatgaatatatattacttcgaggctttccaacacctatttctgtaagaaacttatcaaataacatcagcgatgaaacaattatggcgcttctaaatgtatgtagatctaactctaaagtttttcatcagtattttagagaaaaggctaaaatattgaatattaaaaaactagagaggtatcatctttatgctccattgagatcgcaaactcaggagaaaattacttatggagaagcgctaaaaatggttttagaagcttttaatgattttcatccagcgtttaaatcaatagtacaaaatttggttactaaaaaacatatccattcaaaacttcaagacaataaacaagggggagcattctgttcaactataagtcccaaagtcgatccttttgtacttttgaattttgatggaactttgagggacatttctactatggcgcatgaatttggacatgctattcacagtgttcttgcagcggataaaccgattagcgtacagcatccttcattaccactggcagaaacggcatcagtatttggagaaatgatacttaacgatcgcctattaggccaggtcaagaagaaagataagaaaataatgttagctgaacagatagatgacttttatgcaacgattatgaggcaagcatattttacaattttcgagatttcggcacatgaattgattgggaaaaatagtgctacaagtatagacgaattatcagagagttatatggataatctaagagaacagttcggaaattcactaaaagtatctgacgattttaaatacgaatggttatacatacctcatttctatcactcgcctttttattgctatgcatattcatttggaaatttgcttgtaatgtctttgtatcaacaattcaaaaatgaaggtagagaatttataccaaattatattagcatactgtcagcaggaggttcgaaaaaaccagaagatttactcttgagtagcggcattgatatttctaaagaagatttttggcagagggggtttgatctcgttagtgataaaataaatgagcttaaggatattagctagcatcactatatttttattgtttaatttgaaatcctaaagtttgattatgtaatcctacagacaatcataatcaaaattatcttaactaataacgtaataatcacatatccttgcatgttggtttcaaaggtttatcatggaaagttaaacgcacggataatgcaagtaattcatgatcatgagagattatcaataagtggttgtgtggttatgacctttggttttaataatcatcaataattatttttatttactttaggtattccaaaaaattatccacaataagattgatacaatcctataacaaattgaaagcatatcaaaaagtcggtgaataagtaaactaaacagtcagtaaagaatgccataataaaaggcaaaaaataaaataatatttctgagagactttcgaaaccgaaagaaaacaagactttccattaccaaccgttagtccaaatatgtttcctaattgtatggggaataatagtaatggaagaaccattaagtgatattcacttaaagactatccctgctacagtaccgtgtattaggataaggagcatatcatatatttaacaacagatgactgctattgacccattaagctgtcccatttagtccgaatcagaaaaagctctacaaacattttgatagtccccttttgtcatcctggttgtcaaaacgatttcgacctaccatttggaataaaatggcagaagttatcaatattaaagttattgcgatagttgaaagaatctgatagatagagatccctaataataatcccagtactgaagatactgcaaaaataattacaatgatcggtacccattttttgagaagtatcattttatcaaaattaaccatacagaatacaaaagtgtcgtataacaaattaagggttacgggtagcaaaaggaaatgttatttgataggtggtaattggttaattattaatcaataagttctataatgccctgagttaacatgattctacgtaattctttagctaaatcagtgacagtgatgatccctattactttcccattcgatataacaggtaatcgtcttattcgattgttgatcattcgttgaaccgctacgtctacaggggtatctggtgctgcataggtctggatcttggacattaattcagatattttcacctccgaggatgttttatcattagcacagacccttttaacaaagtctcgctccgtaataattccaagcaattcctcattatcctgaactattagagagctaatccttttttctttcatcagtacagcagcatctaatgcagttttatcagaattaattgtaacaacatgactagacatgatttcacttaccacttcttgcataacagtttcttacaagttaaataaaaaaagatttctcttggtggttgatttcatactattgataatatttcttgtcggtacagagtgtatagtggataatggtacacctttcgcaaaagatttaaaaataattgtgttagactatgtacatagaaatggaaaataataacttttttactaagattttaaataaaatccgtctcataaaagcatcaagaaagcataaggtaacagcatagcttatgcagaatctaatattttgtttttattaaataagaaaaattgttaagaataactaaaatattgattaataaagatcccgaatattcatcagaattattcaagtgagatttagtagaatttatttatattccattaatgaatgctaaaataaaaaaagaaaattaaattacttgccacggtcttgtagcaaaagttactccaaggccagcagcaataattatgctctgatagatgatgttattccatggtattggtttaagtattggttcgccaactacctgaatagtttgaccgggacccaaacctggaccgacatttgcgagattgagttgagtgtgaacgtgataaattccaggttcaagggcctttgcttcaattcggtaaggaatagtttcctgtggtgcaagctcaagtatgtttcccggagggtctcgactaacgaattcccatctgttaccagcattagtagattcactgaaaagtgatatccaacctctcatatctctatttaccaaactttgaagttcgcctgtaactaccaatgtgtcacccgtgtttagggattgtgctgaaaaagcttcattattgatcctaacgaatctgctttgaagctgagcttgaactccgtgaccatcagccattggaagtagtgcaataatactagttaacatggatgctcctgcaataaaggttacaatcagaaacaccatagcgggtttgttgccgctctttttgttcatctagggattcaacttgttacatagataaaaagtttgctgtatcctaaattagttaaacatcaattttttataacaatatttaaaatttgtcaaaattccatattgtacccaagtttaacgccattcgggtttgaagaggaaaaatgatatgagatgtgttagttcacaatctatttatgatcacaatctatttatgaattgactttgtaaaagcatcccaaattatttctaatactaatacttacacatgacaaggatttggaatgcatagaatgaaccatctcattgccttttaggataatccaactgtaatatttgattaactcataaactagactttgatatttaatttaagagtcatatttggcggtatattcgaatattgtttatcgctgttaagaattttgtcaaatgcagtatgggctaattaatttttttataaagggcattattatttccggatcttctagtaatggcatatcattacgtaatctaacttattaattgacttagttgaatcttggtggaggctgaatgttatgacaaaaagaaacaattcctctaaactatgcataaatcatatctatgcaataactagtttgtattgatctaaaatagatcatagtccaatgatagaactaaagtacaagtttaatgataaattctgttcaaaccaagggtataagtattaatacaatgatctgattaaaataggttattgaatcaaggaactgatttccatttaactgaaaacgaagaaaatgttctatgtgatttttgtggaaatgttcttgaagcttgtatgtgcgtatgcccttactgtggtagaggagacaaatgtgagtgttgtcttcacgactcgatgacgggcggttaagtaatcatcccggttaagatcgattgaaactataataagagcaagtgcagatattagtataattaatggttatttctagagagtccatttcttgggttataggtgggcctcaaggaagtggagtagattcagcttcccacatatttctaaaatctatagcaatgtcgggtttgaatgtatttggtaagagagagtaccactcgaacataaaaggagaacatagttacttctctgtgagattttcaaataaaactgtaaggtctcatgttgatgatattgatattcttgttacttttgatgctgaaacaatagtaagacattctccattcttattggaagggggaatattaatctatgatccggatgttgtaggaaagaaaatcgaggatattcataccctagacaggtcatccgaaaagagaatagcacacatcttaaagactaagaacaaggaatttagtctcgcaggaataatacaggagctcaaggagagaaaagtcatactggtagaactaccatatactaaattaataaacaagttttcagaggagattcaggatcattcattaagtaagttagcaagaattaccaacgtaatgtcccttgcagcttcattagcagtattaaatttcgatatcccccttatggaacaggggatacttgacacatttgttaacaaaccaaagatagcagaacttaatgtaaaagcagcaaattacacctattcgtatgttaagcagaatttcggtacgataccggaaaaattttcagcagtcacaaaaatccacaatgaagcaaatagcagtttcattattgcacaaggaaatcagacgtcacctctaggaaaaatggtggcgggctgtagatttcaaacatactatccaattactccagctaccgatgacagtgaatatctggaatcaaaccagataattgagcaagatgataaaaataatgggtctgtggtagtaattcaaacagaagatgagattgccgccataactatggctattggagctgccttaaccggagtacgggcatgtactactacctcaggtcccgggttttctctgatggcagaagcattggggtgggcagggataaatgaagttcctttgttggttagtttgtatcaaagggcaggaccatcgactggactgccaacaagacaagaacaaggagatctgttatttgcaattaatgcaggacatggcgaatttccaaggatagtatattcctctggagatatcgaagaaagcttctatgatacaattagagtattcaattacgcagatattttccagacaccggttatccacatattagacaagtatctttctaatagcatcattacttgcagtccatttagatacaaaaacctaaagattgaaaggggaaagatattggataccaaatcattagacattaagcaaaagggcttttcagatcattttaaaagattcaaattaagcgatgatccgatttctctgcgtgttccattaggcacagaaaatgggatattctggaacacaggcgatgaacatgacgaaatgggtcacataaccgaagatccggagacaagaattagcatgatggaaaagagactgtctaaattagatttgatacagaatacaatacctaaagaagagcaaattactattgaatttgaaaataatacaggtaatacaccgaaaaaattagtgataatacttagttggggatctacgaaaggagcaattctagattcgctagaaaaaataactgaagcaaatgatacaattcaattcttgtaccttcaaatcaaattattaaatccctttccatcaaaacttttggaagacattgtaaataataaaatagaaaaagtgcatggtaccgacaaggcaccctccaacatggagacaatagtaacaattattgagatgaactatttgtcacagttggacattctaataaaacaaaatacaagcttaaaatcagatcacaatatactaaaatacaatggtagaccgatgtctcatagtgaaatatataattctttaataaacataataaacaatcaatctcaacggagagttatattaaaagatggagtataaattagctgattttaagacacccgtccataatgactggtgtgcaggttgtggagactttggtatacttaatgcaatacagatgtctctttacgaattagaaatatccccgcatcaagctgcaattttttctggaattggatgttctggaaaaactcctcactttattaacacatttggaatacacacgttacatggcagagtgttacctttcgcgcaaggtgcaaagcttgccaatccgaatttaaaaattctagctgtgggcggcgatggagatggattaggaatagggtcgggccattttgtaaattcaggaagaagaaatatcgatatcacttatataatatacaataacggtgtttacggattaaccaagggacaagcatcccccacattaaaattagggatgaagacaaaatctttgcctcaaccaaatgttaatgacagtatcaaccctatagcattggcatgtattagtggtttcacgtttatagcgagagggtattcatatgacataaagcacctaaaggagataattaagaagggaatcgagcataggggtttgtcatttattgatgtattgcagccctgtcctacatataatgacataaacacgaaggagtggtatcaaagttttactctagatgaaaataacccttcaataagaattccaaagatatacaagttagaggaagaaggttacaacggagtagtcgataatgacgaagaatcttcgaaaaagataatcaaagcaattgaaaagtcgaaagaatgggaaaataggattcctgtaggagtattttatgaaaataagaaaactcctacatatgaagaaagattacaaagcagaattgagaactacagatcttatccaccagcgctacaaacaataaaagatgaaaacggtaatccaaatatcaatatagatagattgatcgatgagcttagaacgaaataagttgttactgaatttagtattaacagtaaaaacttatgtacctttgcttttgtagagatttgtttcaaatgaaatcacgattcgggcctctatgttatttcctatggaacaacagatatacattcatagtagagaaatgttttgcagttgagatctaataaacccttaaaaaacagtttgtactctgatcctaatgacaacttggatgaggggtgtaagtcgcttttagcactgaatgttttaattttaataacttgactagtttgtagaatactaactataaaatgagtattgaatgttattgcagtcttcatgggtatcatcatattgtggttgtccatgcagctaaaatattgaactcgtgtacaggattctttcttatttttctctaaccagggccaactatagtgtaatggtgaaacatccctggaattaatccaaaatgattagttagtgatttacactatttgtcgtgatgatataactcactatcaccttgaagaaaagtctaaataaaacaagtcaatctaaggaaaggctttattattgtcctatttttacaaaaaacttctaaggaacaagtatttcatattattacagatatggttaatgaatgattccagatttctaatttttatagtaaaatatttttattttcttcaataaatcagctagtttctaaaataaaaaaagaggtttagtcccacttactccatgcagccatccatctataagtccaagtattgagttttgcacccaatgccgctataggtacacaaagcaccgctccagctcccgctcctaaggcaacaggactgttatagaactttcctacctgtggttcaattggagtcatatatggtggtaaggtgggcctaggatatttgaatgccatttccaatgggtcagcaaccaacaataagttaatcatattaaatagtgggagtgacattcctaccaatacaccaccaattaatattgccgcgtgtttgtttcttcttgttgcccagtacgccaaatccaacaacatagcagatggtatccaaactggtaccacgacaaaatcgtacgggtatcccaacgcgaaccatgctcctttggcaatccatgtataaatcgtcataatagttgcataataagtagctgtgccaggaacaccagtaaacaacatatagtatatagctcctaccacaagcattgtggattgggaaatcgagaatacgacgaatgatgtccatgcccagtcagtatagaagatataatctcctgcgttgattgtaagcaacgtactatttactgcaacaacaactatgaacaaatagtgagttgtacgtcttaaccagaccattattatgctgttcttataggtaatatataagattttgtgtgtattatttccaaaatctacaattactttaccaaataaattaaattatgaccgtctggaaactataaaatctttaaaattttgaacttgtaaaaagataaaatggaggatattacatcctaactggtttttcaccagctattttcagcatccaaatcatccctaaaatttcaataacggtcaaaactgatagtgcatatatgccacttggtaacggatatgcccatggatatacagtaacaccaacataaacacctccagctgtagctacccaacacaatataaagcctaaaacaataatacctctcatattttcgactctacggccaatcatacgttcgatttcgtctctgcttgctccggaggaactaccactactaccactactaccactactaccactactaccactactacccgatccagtttgtccactaggtttatacccttttggtaaagtcattatttgtaataaagacggttcctttttaaattttgctattggatttagactgattgagactagtaagcagcgggtataattttatgaattttgctaaataattatcatgtaaatattattggatgagtagatagtaaaagtcaccaatttttttgtctgaaagacttcatccgtattgaaaaaatatacctatatatcgttttatttaataaaaaatgtggctatttcattaatacccgcagacagaaaaatgaagggtcaaaaggtctcaatagtaggagataacaagattgttaaaggaagtactttattaaagaggggcttcgcccatatgcaaaagcacggagtaattatggatgttacaagtgtcgaacaagctcaaatagcagaggacgcgggagcggtagcagtgatggttttagacaaattgccttatgatgttaggaaggcaggaggggtcgcgagaacagcgggagttaaaacaattcaagatataatgaatgcgatttcaatacctatcatggcaaaatgcagaataggtcattactctgaagctaaaatgcttgaaacttgtggggtagatatgattgatgaaagtgaagttttaactccagctgacgaagaaaatcatatttggaagtgggagtttaccacaccttttgtgaatggtgcaaagaatttgggcgaagcgttacgaagaatagaagaaggtgcatcaatgataagaactaaaggggaacctggaactggaaacgttgccgaagcagtaaaccatataaggaaaatgaataaggaaataaggttattaaaagcagcctatttggacaatgattatcaagaaataataaaactagctagggaatatatggtctcaatggaggtagcattggaagtaggcagattggggagacttcccattgtaaactttgccgctggtggtattactactcctgctgatgcctctttcctaatgaatttaggttgtgatggggttttcgtcggttcaggaattttcaaatcgacagacccatcgtctagggcaaaagcaatagtattggccactacattttatgacgatgaaaaaaaggttctagaggctcaaacgatggtagacgaaaaaaaatctcttatcggattagatacgaaaaatttagatctgcgaatgcaagagagagggccttcggtttgacccatatgttaaaagtaggaatcctaagcattcaaggcgatattgaagaaaattcaaacgcaattaaagaatcatttgaagaattgggaatcgaaggttgtatagtctatattaagaatttaagtgatttagacgaactggatgggctaattatcccaggcggtgaaagtacagtaataggcatgctcttattcttgcaagggattcagatcgatttgctcaagaaaaagatccaggacggtctgccgatattaggaacgtgtgcaggactcataatgctatcgaatagggcatatgataagactataggcgaaacaaaacaagaattgttaaaagttctggacgttacaatagaacgtaacgcctttggacgtcagcatgaatcctttgagtcaaagttggatataccttatataggcgagagaagattcaatggagtttttataagagggcctgcaataactgagattggtaaaaacgtagaagttgttgcaaaatatgagaataagatagtggccgtcagacaaaataacatcttgggaacttcatttcatcctgaacttgctaacgataacagattccatactgatttaacaaagttaatggtagaatacaataaatccaagaaaaagaacatgacgagctgatcttactagcaacagtagcagaacccttatctatgatttataataaatcttccgattactggacagatcttatggcccagtatagatatctataacgctaatttatactcgtaactgcactaataatgttaatatcaaagcatcatctcaaatatttagtttcaaatactgtgaacagatggatatccaaaacgaatttctatacttttgatagtttacaatttgagtgataagataaagcaaatagtatgaattcgtcaagtctaaataataagtaggtcctagcacagggagtatgtttaaaactaaaacaattcaaaaaggtgcggggggtgggatttgaacccacggacccctgagagacgggatcccttatatagatcttaagtcccgcgtctccaaaatactattatttatttggccaggctctacaacccccgcccgattaatgttaattttaaaacactaataaatatatcaaataccgaaagagatgatttgtggaattgccctaaaatttagtagagtactagtccatctgtatgaacctcaacttcttcaattccaaaatagatcaaacaaaaagttaatccctaagtatacatcctgaaacttagaacgagtttaaaatatgaattaataacagtcaaaaatatataattaattaattgcttgatactggatactgtaaaaataatgtccattttaactgcgtctaacatttatcaaaagaaagtattgattatgaattaaaaagaacggtaatgaattttggattatcaagttatttagaatatcaaaaaattaggttggtaagctatagacattacaatcccaatcttggatcttgtttccaaaggtgcactcgatatctacttcaaagtaatctatatctactgcagtgctaattgcctcagatagttgttgttggatcgtagtgctaatcgtctcttgatcaacaaaaggatttggtagggccggtaatgcatttgttgcattggtgattgaattggaggaattattttgctgcattatatagcctgaagtaggtgaaattagaaagtcattaattattgtcgagttaatgatgttctgcgagctattcaataagttactacttccactaattatatacgagatatcaaaatatggctttatatacgcagtttcatttacaattcgataagaattagcagatgtttttgatatttcaacagagggttggagattatcgttagagttttgggcatttaaggaaggtacgcccatgctaattataagtaatatcaacacaccaatcaaaccaaacccaatggccaaacttagttttggaaaatagttaattttattcaaattatcaataaatatttatttatccatataaacattttcggggttttttaataaatttgttaccatgaaaaagaagagacaggtagaaattaaatactagaaagatcttttcacgaattgctacaatcaagacgttataaatatacttgctaaacattgttacttgatgagctgagtatggaaaatttagaaatcatataagaagttacaagccggtagacaacaaatggatatcttgttaagatctgttaggaatctaattatgattattgggtgcttaaaagataggaaaattatctcaaataaatcggccaaaatcaacaatttaatcgaatttttcgagtatcctctagagagaatataagagtatagcatttccctagatttaataaaatgctatcatatttagaataccactttctctaattatattacattgataatcctggtgttgtcataatatcaaaaaacatttgctcactactagattgagtgttgagaaaatgcaattatattataactttcagggaataacataaagatttaagtccaattcctgcccaaggcttttgtttagtaactctgtgcgtaataatatcaggagcatcaagatgaatagaatttctaaagcgcgtctttggtgcaagcgaaattgacaggtgtgtattgaaccttatgaaaatgcaggaagttattcaaactggcttttctttttagatcaaaaaagaaaagccttgggcgggaattgaacccgcgacctttgccttaccaaggcaacgctctggccaggctgagctaccaaggcattttattaataaaaaatatgaacataatttaaccatttccattcaacgttattatcgcacatattccaggatcagagtttctaagttgattctataaaatcggccaaatacattcatgaatcatgagtaaataacaagtattttggatttgtataatttttgaataatatagaagtaacaggactggagagaaaatcgcctgcttatattctatcgctaatttaaggcttcaataattgccgtctagagtgcaaacaatcaatataagtgatggaacttgtatgatctgtatgttttaatagatctgtaaaacagtaccagatattgataaatctcaaaatcaaagtagagaaaaattcacaacgttcgcatttaatttgagatatcgttcatttcaaggattttctttaaagatcgatgtctattatagtcatcaagcagtattttagcaagatggtgagcaatatcagtaacacttattattcctattatacggttgtcagcctctaaaacaggtaatcgcttgattttatttgaaagcatgattctcgaagcggtatcaactgaatcataagtcataatcgtaattaatggggaagacatgatctcttcaacgagaactctgtcggcattataactctctaaacatacacgtttgacgagatcactttcagtaataataccaataggcgtattatccttgtcgatcacaattaaggatcctatgcgatttttagttagaatagctgctacatcacgcgcagttttattcgaatatgcagtaattgtccacggttccttaaaagacattatctcacttacgctactcatattaatacaatagcgtgtatcaacttcgtataaaaactatcaacttgtcaagagattgtatttacaggatacagattctccttgaagtctaatattaataacatgctcactcttcaacaagcatagcgtcacaaaaattaataatgtaaatccataatgattttatagtgaattttttagaactagctgaaacctttgcaataatggagaaaactactagtaggttggaacttactgatcatctagtattaatattaaaaaaaacaccgacagacatgctcgataaaatagtttatctaattcagggtaaactaggacctgattatcaatcgagtgaactgggaatcgccgaaaaactaataattaaatccctgtctcttgtaagcggtaattcactgaatgaaatcaaaaaaaaatattctgaaataggagacctgggagaagtggcttataatatcttaacaaacaagatacagactacattgatttctgggttacttactatcgagaaggtatttaatacattactaaagattgcaaaagtatccgggacaggttcgttagacaataaactcaggttcattgtgagtttattgaacaattcttccaatctagaagccaaattcatagtgaaactaattctaggaaatttaaggctgggcatagcggactttactcttcttgacgcaatagcactaacattcacaggagataaaaaaaatagacaaatattagaaagagcttataatgtttctagtgatttaggaaagatagctttaatactatccagaggatcaattgaggatattagatcaatttctatttccttatttatcccgattcgaccaatgctcgctgaaagagtgtcaaatccttcagaggccctggaaaaaatcaatggttatgcgttggcagaattcaagatcgatggcgaaagaattcaaattcataaaaggggaaaaaggacagaattatttaccagaagcctagaaaatgtgacttcaaattttcctgatctcataaaggcgtttgacaatatagagaccaaggatttgatcgtggagggtgaagttgtcgcaattaatcctgagaacaagaaatatcttccatttcaaagtttaatgcgaagaaggagaaaatacaatattgaagagattactgcggcttatcctgtaattttaaacttatttgatttgctttattatgatgggtctgatatgactcatgtacctttactagaacgcagaaagttattagcgaatatttttggtagacagcaaagaagtgataaagttaaactaatcgatcaaatcaaagtttcaagaattgaggaaatggaaaattacacagaaagggcgcttaagaatggttgcgaagggatcatggtaaagaaccctagtagtcaatacagggccggagctagagaatgggcatggatgaaattaaaaaaagagtattctggagaagtcacagattcggttgatttagttgtagtgggggctctacatggcaaaggaaggagagttggaaaatatggggcgttattattagctacatatgatgcagagagggatgtcttctgtactatatgtaaagtaggtactggatttactgacaatgttctcctaatgataacagacaaactcaataaacatatcatcaaacataaacatcctagagtagaatctggaaatgcaaaaatggatacttggttcgagcccaaaatagttctagaaatcatatcccctgaaataaccttgagtcctgtttatactactgcaattaataaaataaagcccgaatatggtctagcgctaagatttccaaaatttaccggaaaaattagagacgataaatctgctgaggacgctacaacagtcaaagaaatctttaaaatatataaagatcaactgaagtagttatgtagtcaagatttagggacggaattgtatctcgagacttgaatggatcatcaacaccaatttaatattttcttgcattagaagtaccttaatatattacttccaactgcgattcctcctgatacagtcttattgttctacacccagggtggaattagtatcactcttatagaacaaaaatctctatgattattaacaaaataataaaagcgccatattatattaaagatgattgattacaattaatcaaatttattgcaaagattgtaatttgtttatggaaaaaattagaatagaaggcagactaaagatcgacataatcatcacctctcccccatacaacattagaaaaaaatatagttcttatcacgacaacaaaaagactgacgattacttaacttggctggggttagtagctcagaggagttatatggtattaaagcctaagggttccttttttcttaatatcggtggaacctccgctgaacctctgattccgtatcttgccctaaacaagtttatctctgcaggttataaattgcaaaataccattcactggattaaagccatttccattgaaaaggaagacattggaaataataatcaaatttgcaaagatggattttccataggtcatttcaaaccaatcagaagtaatagatatttagctaatacacatgaatacatttttcactttactaagactggaaccataaatttagaaaagctagctataggtgttccttatcaagataaatcaaatatcaaaagatggaaatcagtagatcgagataggagagacagagggaacgtatggttcatatcttatccaaccatccaatcaggcagatcacatccagctatttttcccgagaagctagctagtctttgcataaaacttcatggatactccaataaggactttatagtatatgatccttttatgggtattggtagtactgcattggcatgtatcgaacttggtatcaactatcttggtaccgagattgataaaaaatacattgatatagctaacggcatgatctcagagaagaagaaaaatctctcgaaatcaaaatagccatattcctagacatcgaacggataatcataattaggaaaatcatagaagattaggttggtactcagagacaataattcggatgatcgatcttattagaaagtaattagatactgttgcaaattaaagtacactaaaacaaaaagttatttaatgatttggagttttgttttatctatttagataacttatgatttttgaaaagcatacttccaacttcctgagtcatgctttcaaattttcttggatagtacccagatacatattatagaaatattctgtagaagaaatcaaaataatggtattttatgtgttaaggtaaagacataacaaatgtaaaatagaaatatcaatgtgtaatttgtaattcgcagtagtaaacaaccagggttggaaagcagcaaataacttaaaggagttaatagtaataacatacatgaaccggtagtcatgtctaagccgaaagattaatagtacttctaaatagcaaagtctggcagtacctaattattatggaatcaaattttataaatcatttaacttttctcctctattttaagacgagaaaaacaaaagaaagaaatgacagtacgtttctgcttcaattttatttccttcttataacccttagaattcccatgcccataataatataccctattactattattccgatgaattgaggtgccaaaatctgcgcccctcccctatcagacgccgagttcatgttaatggtatcttctggagggataaaaaatgacgatatcaacacggtagtacccatgatagcacctcctatgattaataacaccgttagaagtcttgataccacatttattccgattccaaacgaaattacaaacaacaaaattgatccaccgccaaaaatcatacctctatccttggctgaaagaggcaaaaacccctctgaattacttaacatcgaaacgctgacatctagaatatatattactaatagcgccagcgctattgataccagaacctctgccgctatttttcttttaccttgcatactatttattttcacattggttatttaattattgaaaagcaaatatcaatttcttatggtctttttatcattcgggattggccaaataagggaattggttatcgaagagtcatagtggacaacaaatattttatttctagtcatataggtataaaataatcgccaaagctaatacactaagatggaattataaatttggatctatcaattatggatatgatgaatatttggtgcatcctatcataaatgactaatcagtgaatcggccaactaggtctacccggatatcagaactgattgaattggaaacccttccgtgaactttacattatttttaatttcggattaatgtaaacctctacagagtgaaagtagtgagatatagaataaaattacttaaccaatgtaaaaataaaaaaatttattataaatagaatagaatccaaatagaaaaagagaacattgaaaacaggactgataaagggtccagtactactcaagataaaaggagaatgcaacatattaggtgtcaaattcaggaatgaaagtatcagttgggaaagtagtagaatcatccccattgaaaaaaataacaattctaccttatccataattgatggcaggcgttggaatcatcatagatatgacacaatcagtcatcacaaaagaattggaatctcaatttggaaagaccttgtgagaaacatattaaaaaatgaaaagaagcgaatcatcataatcggacccacaaattcaggtaaatccactctttcactatatctggcaaacgtgtttctcaaccagggattaaagccattgctaatagatgcagacataggtcaaggcgatttggctccaccgacttgtatgggagctgcagtcatgagttcccaggaaatagatctgtggaaagtaaaaacacatcgtaccaattttattgggggcattcaacccgtaggatacgaatccaaagttatttcgactattcgccagcaattaaatctatcagtagagcatgatttgtcgatcataaatactgacggatatataaaagggaacggacggatatacaagatcgatttattgaaaaaaattcaacctgattgcataatatatcttggaggcgaaagtttggaccgaaatgtattggaaatttttagtcatattccgagaagcctgaaaatgaatttcatatatggagagaaacaagcagctgtgcataacagatccatattggaaagatacacaaagagaatgaaaacctttactaaatttttgcccaaagataacgaattaatcgtgaggatagatctttgtagaatcgattttatatactttagaaacaaattttattcagaaataaaatgcttgaaggaatacgtgtcctcaaatgtgttgaatgaaaaaattttatatattcccaataacgaatttctgaaaaaccgctttgtaggatttggaaataaaatcgatagtggtcagataagtggatttgggttaatagctgattttgaggatggagttctcagggttaaggcaaacgttaaagaatttgacacaatcttcttaagtgacaccaaattagatttgatataagtgtcaaaaactcacgtgttattagcaagactataattaactctaatacaacactcattatatcatatagtgaattataccatggtatcacaaagtagaacacctaagacatgtattatttgtaaaaagggtcttacagtgatcaacactaaagtaaacaagaatcaaaaatattctaaatacagagaactggtatgtaatgactgttttaacatatactaccctcaaaagtgatatactcatgcatttgaaagtcttttcttacgcaaacatatttacgatttcccaccaaaagaggatattgattaataacattatttaacgtaattcttccaagaatactttccatactattcactttaccattccatcattacaatttaccctgattaatttttttagaatttgatttaaatcgatattagtaaattaatagaactttacttatgtcaagtcttgctttcgtaaattcaaagggtttaacagatttcattaaaatcttaaatggtgctagcaaattactttgcaaacactggaatagttttttacaatcacctgggagattgagttagaactgaaggatgtgtttgatggctatacttctgctgcaggaacaggcagattgctaaaaaagattgtcacagattattctgatgttttaagtgaccccagcagatttgaaggtttactcaaagatgtatacggctcagaaaacaagaaggaaatatttttgctcacaactgccctcaaggctaaaataactgatattcgaggatccagaatttttggtaatgatgctgatagcaaaatttacaatatgatcacaagattatcatcagattggggactagaagatagatctgctgcttgggtaactattgcatggtctattggattggacctaatgacagaagtagagtatggcaatctagttgatggcactagaaaaggaagtgcttcgctgctcagtaattatttttcaggtatagattcggacattcaacaaggggaaaaatacaagaatagtgagatctcaagcttggtaattgtgaatgcaaccaatcaaaaagaattatacgaaaacggtatactattacataaccagggaaaatttgcagaagcattagaatgttatgacaaagcactggcaatagatccacagaattcaaatatcctatcaaataagggtttgtctctccataaccagggaaaatttgcagaagcattagaatgttatgacaaagcactggctatcaattctcaagatgaattcataatcaaaagaagggataatacaagagaaatattgcttcattgtaaaggcagtatggaaccaagtcaagctatctgtcaagaatcaaatccgaataaaggcggacaaaagtctataaaattatactttctagggatatcaatagctgcagtgtttttgatatcaggtattactgcttatttgattttcggaacagatattggccttgaagtagatcctctaaagaataactctctgttgactaatgaagtttccattaatagtatcagaccaacaaatgaggaagtggtatctcctagaaccatccctaataaggaatcaatttcagaattcacaaatagtatagagagagaattgaatctccagataactaatgaaaaccagtcttttttgcaaaatgttaacgattccgggttgttctcaaatagtgacaatttggagggtaacaacatgaattttgatactatgaatggagtggatcaaaaggtagataattttaaaacagagctcggcaaggccatgaaaagtaattttagttgattaggaaatggtttgttaaagaaacagatctttagtggtttctgaatcccacggtaataggtgggtaatagcctatatgtgatacataaaaccaagtgttatatcatctccactcccttctatcgaggtctgtcttaatatcttgtaaagattctgactcaggtatgaatagccgaattcctccaatatagataggtaatcaagtccaattttgagaaaaccagatatattattaaaggaattgtaatacccatcagtagacaacagtattaatttcggttttagggcgtgaaaggcaaaaagtccagttttgaattctaaccaactatcatccatgcaaagcgattcagtatgaataatagactctatggaaggtttgtcatccaaatcattatttcttgtgggaaacatatttcgtatatttttgtcattgtcgactatcagtatgttaccatcaccaagttgaaaaaatatgaaatagtttttagtaataacggcggttaataatgtggatccataagcgatctttggattattgattattttttccaatatgagtggacctttgtttttcaatataaggtcaatctcattttttgaaaaaggatgattctcaacatgatattggactcgatccatccagttatgaaccaagagacgcggaattgagtatctaataatatcctttacctgagtaacattattaatttcaatgggttgattatgaaagagttcaaacaaagtttctacagcagtcttaactgcaaattgtgccccaactttgctcctaaaatgtatatcactcccatgtccgtcagcgaccgacatgattatagtattagagacgtcagattgtttccattgtatagaatcttgatttgaatatccagttcgtgaatgcaatgcgccttttaagcttttgccattcactaaccacttctttgaatctaatgttttacatttatcaatagatacaggattaacttcagtcataacttcattatgtccttagtagaaaacaatacccttagatttgccaaagtctatttgagtaccagggactaaggagaaactctgatttaaacaaacttcaattacgtcaccattaatcttgctaactttccaaggatatgtagaaagattcttgagtccccaaacccgaggatcagttggatgtctagagacttctgctactgcacttgagaaatcatatttgtgatctggatctatgtgatgtagaaataatttggtatcatgatttaaagcaacaaacaatcgattatctattcgaatgtttagaacgtgagtattcgtagttttgcatttgggattccaacaaacagaatggctttgtacctcttcaacagcgctgttccgacccggaacttcaaaattacaattagagcctccaagttgtactggtatacttaactttttaaaaactgaagaatcagtgacaaaaaaattctcagatccacattgtttgcagtaatatagagagtcccgtaaagagagcaaagcaatttgccattcagtttctctgacccttccatgcataggatccttgataccattggtaaaggctcttacaaaaatccttttaacaaaatcgggataaatattccaaaatattattgcgttcgtatgaaaagctggatcaggataattagaatcatcgcttggatcgaatatgaaaagaggtttaaatccgtatagtttagacatggaaggcaagtcaagacttttgatggaactttcgagtttaccttctagcggatggtttagaaacaaaatataaaacagtattattgctaaagagtataaatcggtttgtgtatttggtaacgcttttccaattattatttctggggccatgaatttaggcgtacctattacgttacccttatcttcaccatttatcactatattatctgtatctcctatgcgtatttcgccattttctggatcgaaataaatattatttaaggataaatcttgatagcaaaggccttttgaatgcaatagatgaaaactttgtaccaattcaaaacaggcggtcagcaacaccttaaatgaaggatcaattttcctcgacagccacaaactaaagcttttaaatctggaatctttcatggacattatatatccgaatccctctttttttggagttttaacaagagccaatggccaaagaaacctattacttggagactctttttgaattagagattcgagtatattatattgctcattagttgccatggaaggaaaataccactttagaacaagggaggaattatctgagctgattaaggaatataccttgccttgagtacctgaacccaattctttttcaacattgcaaacaatatttaagccgtttatatggacggactcaccgacttgaaactcgtatgttgtgctcatttgcttggtctttgaaatcaaaattaattaccacacatcagctgctccagatatcgttgtaggaggtgtaggtatatcgacattcgaaatgaagctgtcatagtatttttgttggcttttaggtctagcagaagctgactgcacaactgttgatacccatcttatatattttgtaagtgattcggggttccgagccaacagcggttgtctttcactatctccgataaatctttgaagaatatccatgtttgcatcctcacctattgcgatagatacacgaattgctttttgaccccatggctctgacattaatttttctaaaccatctctaaaattatcagtgggttgtccatcagagagcaagaccaaaactggtggtaaccctctttcggtcattggaggtatacgcaaaatttcagaaagcaaaaggaatgcttgtcctaaatcagtttcaccttttgcttcaatatcagtccatttaaattcatttacccttgtaggtggaataatccaatgtgcacctgtggaaaattttaatgcacttattagcaaattcgcttgaatattattttcagattctctttgcatatgaggaatcgcctctttgatagcataattcaaggcttggatctttccatcatccctcatagatcctgagctatctacaatccatataaaatgtaattctcttttcgatatttcaccgcctggaagagtcataaaaatcaaaaaaaatagatggataatatttataacaatttcacctaaaagtatcttaggtttcttatgatgaattatttttgaaaattgctgtgtttccaattattaaaaaaattatagatgaatagttcacaacaaacttaagttaatgcaaaaaagacttttggtttgcataaaccgtataaataggtaaatgttgaagtattagcacatattttaattttgaaattatacgagtataattatcagtagattcaaaacgcgcatagaattgacatcaatatttcaagatataaaaaaaaactgatttaacgttatggataaagcaatactcccgaaacaaaactaatccaaatatgacatgatcgcatcttactatcatacttgcaaataatagtttaactaaaatgcattttgaaatatttgagtatatttatttatgattgccattattgttcagacttatctttgtaggcataactcacactatttttaaaattatttatggattcgatgccctcctttcctatcacgatcattttgttaacagtcttactggttaagtttaccattgttggcaattcattcacaacattcttcgccaaatcaatgacttgtttgaatgatgtttgagaatcttttctgttgtcacgagaactcctctcgatggaatcctttatggctcttgtgacgccgctctctgtttcatctaaacttctgctatttgataccgggatatcttttgcatccatagtcttactaatcccatcagtcttattctcatccctattgatgtcggaaatatcttgaaccattatcttaaatatggaataaaatatttaacctgtttcaaacttagctaaataataaagctttataaaaaacattattaaaagtgagtagggtagcccattagtaccaacatgaacaaaaggccccatttcaaatcctcctaaatccaccacgtagacgtaacagcacggctgcgatgccttagggttgctccctcccggacctcacccatttcaacaatccacagtcaattttacaccttcatgtaagttgctgctcatagccatccgatacggcatgatttcatcctagtcgaatgagcgggtatcctcccattcacgaatttacctaacagttactgatcccgacataaagccgattttcggtaaggggcacggctagcaccccgatcctacctaccccgttaactaatacttccaattcaaatataattttattggatgacgaaattctaaattaaaaataatatttttttggataaaatccaagtatgaaaaacagcaaatgtaccttgagaaaaataaggaatgtgtatccttctacatcatgccgtccatgcctggaggcattccacccattccgcctggaggcattcctccacctccaccagccgatttactggatgcaattacatcatctattcttaatagcatggatgctacttcagtagccgatttgataatctgttcttttactgctaacggttcgaatatttcaagtttagccatgtctgcaattcgcgaattacgtgcatcaattccagcccactttgatcccttgttttgtttagatcgcaattcagctaaagtatcaatttggttcatccctgcattttcggcaagggttagggggataatttccaatgcttcagcaaatttttcagctgccaattgttctctaccagtcaatgtattagtccattctcttaatttaccggaaacatatgcttctggtgatcctccgccagctactatcaatggtttttccaaaacatctttagtcaccataagtgcatcatgtacagaacggtctgcctcatccaccactctttgggatccaccgcgtattaagatggttacagccttcggattcttgcatccttctatgaacacccatttgtcagtttcaacttttctttcttctacgaggtcagcagctcctaaatctttactggtcaagtcatctaaattattgataactcttgcaccagtggcccgtgataattttgtcatgtcactttccttcacacgtctaaccgtcagaacattggcttttgcaagataatgttgtgcaatgtcatctaatcctttttgacatattactacgttagcaccagacccagttattttttcaaccatgttcttcaacatggtgttttcctcatcaaggaaccttttcatttgttcgggtgatgtaatatttaattttgcgtcgaattcagtcttttctatttccagggcagaattgattaatgctatcttagctttttctacccttttgggcattcctccatgaactacctccttatccaaaactattccttttattaattttgtatctttaatagaaccaccagatttcttttcaactttgatatcatccaaatcgaccttagtagatccatttcgagattcagatacttgttgagcagctgtcactacaatatttgccaggtcatccgattcctttgaaactaatttagtttgcattgaggtcttggctatttttattaattgctctttctcgttatttgttactttgatagcgatattgtttaaaagttctattgatttgacagcgcattttctatacccatctacaattaccgttggatgaacattttttgttatcaactcctctgctttttcaattaaagaaccggctaaaaccactacggaagtagtgccgtctcccacctcattatccgttgccttgcttatttccaccatcattttggcagcaggatgttgaacatcaatttctttcaaaatagttgcaccatcattagtaatagtgacatcacctaacgaatctacaagcattttatccatgcctctaggacctaaactggttcttactatttctgcgactgtttttgctgcgtttatgttatttttctgagcttctcttccttttgtctcacttgcgccttcttttaatattaaaacgggcattccgcctgctgatcctgtttgaattgacatatttccatcattcaccttaaaattatagtttacactgcagtcgttggtatattttaaacttacttaaacaaaattaatttatttgatcaaaatataaaaaaaagttaggatagcaaagaatcgtatttgccagtcgatatatcttgatatatctcatttgctaccttatcatctactttgatacccaagctcagacaggtgccaatgatttcttttgaagacgattttatagtttgtgcataagaaacatctagtttcatttttgatattttgacaataccttccattgaaatattccctacaaaattggtaccagcagttccagatcctttggtaactccagactccttgaaaataagggcagcagtaggaggtatgccaacctcaactgtgaattgtttggtctcagtgtcgacttccaccttgactggaactttcattcccggaaaatctttggttttttcgtttatagtattaacaacctgtaaaatgttgattccaagtggtccgagagcaggtcccaaaggtggccccgcgctagcttcgcccccgcttactaatgcattaacggtttttttttcactcataagatattacaaccagactaatgtaaaaaccacttataattctataaagacttttttagataattggcgtcaacggttacagggatttgatatggagaatcaagtaaaactactgtggcttcttgcttttcgtaatcaactctcattattttggccttcatggatttgaatggaccagcaataatctccactgtgtcatcaattatcaattcggtaactactggtttcttaatcagataaccctcaagatccttaaaaggaagttcacctcttatttgtccccttatatgtcgtattccatgcaaagcctcgtatgcgatatttgagtctactgcttcaacgattacataacccttaaaattttctaaaaataaaaccgagtagataccctctattttctttgaatgtaatctactctgcagcatagatgctatcatactttcttgaccaccagcaaccctaacaacaaaaaattttgaatcactctcgtcgtcgtttgacaatagtccagaatctccagtttgactgtcaggatcttttgatttcttatcttgggcatttttagattcgttagcacttaggtcattatcttttgccctctttgtattatctttattaactaacctggtgttgcttgattttttttcattcttacccccatcaagatcattgacagggtcaattttttcagattcttcattatcattattatacttattatcattcaagtctatcaaatccaaatcatcatcgtctttgtgaaggttttttggcatacttatagaatcattaaacgtatttgttttggaatttataagtttataacatttgcttccaatatcaattctaatacttatatcatagaaataagaaataaatctaaacaagatctcttgttcttcttgttaaacaagtttacaatcataacatcatctaaagatattgccagtcttacaatgctaaactgtttggaaaatgagatagaattagagttagaggacattgattatctcaatgattattctaaacttgaaactgataaaaatcaagatgttagaagttgtaatcctaaaattaaatttttcaggtccaaaaaatattacgatttgaatttatttgtaacagatgaagaattaattcacttaagaaacattgacaaatttgaattttcaaatagtatactaatcttcttatccaagcatgcatcaaagagtaaaatacctgcattgacatcccactttacaggaaatttttcaatggataattcgctaggtggggcaccatctgagatagggattgcataccctagttttcaaaaagagtacatgaaaaatttatactcgatgaaaaatagcctgcataattatgatctgaccattgaagcctcgcaccacgggccaacatcatctgtaaatccaattttgtttatagaaataggatcttctgaagaagaatggaataacaagaaaacagctaagatggtttgtgagtgtttaatacagacgattgaaaatgttagtaaaaatgcaaatattgaagaatcggaaatctcaatagggctggggggaaatcattatccccaaaaatttaacaaattaatcctaacttcgaacgtcgcattcgcagccattgctagtaagcataatttgagattcattagtaatgaaatgttagaacagatgagaagaaaaagtattgaaaaggtaactagtatttatatcgacaagaaaggaatgagtagtgaaaaggaacgaatattatccctcctaagaacgcaagaattagaaataaagtacatctgatttgatagtattgtattttttgtttttggctcaaagaatagagaaagaatcagttaagtcaaaaataaatcactagatagccaaaaagatgtaactcggaaagagattaaaaaatatggttccaatcacacaaccaatgtcctaaacttgataaacttatacggcaaataataaatcaagaattaaaatgaagagggacgtgagtttcagtggctctagtcataacaacccttcgatggttgcaacgtcggttttaaaaaataacaaggaagttttgattttacgcagaagtatgaaagttagaaccatgcaagaaaagtgggcgggagtgagtggatatcttgaaaaaaatgaagatatactctccagagcattgacagaaatctatgaggaaacacaaataaataaagatgatttaactttaagaaaaatattcaaccaactacatgttcaaattcacgaggagttaatgatagtcatccaaccattctgttttgtttcgaaaacaagaaaagtaatattagattgggaacattcagactattactggatcaattataatgaaatagacaattttgatttcgttcccagatttaaggaaattatcctccgatgtcttcaagatttgtagtaaacaagaattataaaaaagctagtatcacttgtaaaataaaatagtgataatgaaatactatttaatgtgtttttgttatcttgaccagttccctgagatgagacaaggaacgcacctgagcaccatttacttttttatacagcgtccaaaattgttcattagtaatatcctttcgctcttttaatatctttagatgccttctcatcgatcgtaccttgataacataaacttcctttttaccaacgcgagctgtttttttaccttttttggatccaggaccagttccatgttttttcttagtttcgagttttgtccttgttcgacccctagaagtgcctttaacttttgcagtccatatggacccactacttatcaaagatcttatattctcacgagtaatagaatcggctacgtcatctaatttgtcaggttcaaatcttaccctattaactccaactccaagaattcgggatgctagttctctttttttatgtatatttactaccacttatatcactacttttgatctttcttcacggttgaggttttcgatgaatctttcttcacggttgaggttttcgatgaatctttcttcacggttgaggttttcgatgaatctttcttcacggttgaggttttcgatgaatctttcttcacggttgaggttttcgatgaatcggattcagctttttttccgtttaatagtttgacgcccattgactctgcttttgaaataatctctagtcttttcttgtttccaacagtatgtgctatgcgtgctgcatccttagtattatccagcaacatcagatctttaacattatgaaccaaattgtctacataaccagaagggtgtaatccccgcgatattcgaggaccacggtaaccaatctttaccaatgccggcactcctgagacttgctttctcatcttattgtcaacgcccttgggttttctccagttaacagctaatcttttgtatctccagctttcttgtctcttaaatttgggacgatgctctgaaatctttttacgttgttcaaggagatcattattgattaccataatatcgttttattctacttagaataaataaatatgtttccgattgatgctaaataatatcagagagagagatagagattgtattaaatagtcactttaaaccctgttggtcagggttccgcaccaaaacaacggatgaaataaaaggaaaaggataaaaggtttcgtatacacaattgtttaatgaataaatacgaattacctcctcttccatacaactatgatgcattagaaccacatatagacgcaaaaactatggaaatccattatacaaaacatcatcaaacatataccaataatcttaacgcagctcttgagaaatgtcctcaagatgttcagaataaggatataacagaaatactcaatgacatagggaatgtacccaacgatttaagaccagcaataaactttaatggcggtggatttgacaatcatcgaattttttggaccaatttatctccaaacggaggaggggaaccacaaggatccattgctgaggcaataaataattcatttggaagttttgcagcttttaaggaaaagtttactacaagtacggtaggtattcaaggaagtggatggggatggttagtatttgacccaaagaacaacaaagtagattataaatccatgcctaatcaaacgagtcccaggacagagaatctgataccactgctgggatgtgatgtttgggaacatgcttattaccttaaatatcagaataaaagacccgactatgtgaatgcttggtggaatctgataaattgggaagatgttaacaataagtatgccaaatcaaaataacctattttttgttttgaaaaatatttttgtattagctgataacgtcgatttttccaaacccttctctaattgtagtgttaacattcattgtataattatatattatttcggaatatttaactagagtaggcatgatatcttccaaattcctgctcaagtagaagcccggacaatcacctgtaagttgaaatgatgcatgtacagaaactagattcttttcattttgactccacgaaaaaaaaggatataaccaacatacgccgggtttattcggatgtaactgacatcccccgccttcgtttagaaatctgcacttgatgggatgaccattgtcagtttcattttctaattgttttctcttcaaatttaacatggttaaagtagttattaactcagaattggattctgaagttgaatcattttcccatgttgctacataagtttcattacgcaaaaacgatgactgtgtttgataccccatttgttttgaaatcttgaatatgtctttagatgttaatggtaatcttccttgcttatcgcagcagttatgacaatcgggccataaacaatcccacagtaaaaaaagggataattcagataaaaaaggaagatgataagtaacctggtttatcttgattgtgtaatcttggatatctgaacgttttctcagatgtacatctctaacaattgaatctattctccatttttttgagagctcatctaatgcggatgagacatcattaactttttcctcgcccccatgagataacgccatgtatgtagaattataaaaccgggtgtttaaatgtgactatgatatcaaattcaattataaagatcaaaactttgagaaaatgacattagagaattacaaacaaaaggaaagaagaaagggaaaacacgcatcctctactgaaaatcgccggttggtatgggaatacgtcatctggccactggtattggaagtgaacagaaactattttacattacaagaatatcacatcaagagagattgtgtttgtgaaaataaagagattttgccgtccaagattgcaggagggtttgtttcattattggttaaaggtattctagtgcgtgaaaagaatatttattcaattcattataaattgatcccatatatgagaaaaaaagtccatcttgattatggaacggtaattagagagataaatactaaaaaatagacaatatatttttctttagcttacaagtgattcattagataagagataaaataaaataatggaaacagatatcttaaaatgtagctcgtgaagcccggtggaaccatagaaaaaaaatggtgccgaatctagcggtcaaactccaaaaggactaaggatttcaggctctgaatcttatagaaaagaaacctggagacagcagttcgaatctgctccgggctaccttttaaattgaaggtagaaaaatccgttggattaattataaagtaaatgattctagtctaaatgaggaccagccttcataatttcttcagagataggttcaaatttcttgaaattatttataaataatctagccagtcttttagcagaaaaatcatattgattcttgtcatgccaagtatttcgagggtttaatatcgaagtaggaacgtcatggcatgacgtaggataatcgagattaaacgttttatgagtctcatattgaatgtcatccaatattcccttcagtgctgcagaaaccatcttcctggtatatttcaattctattcgtttacctattccataaggaccgccagaccagccagtattgattaaataaacttttgaatcatattttgttatcttctccccaagtaattttgcatatttcgcagcttttaatggcatgaaaggagctccaaaacattgagaaaatgtttcttttggttcagtaatccctcgttcggtccctgccagtttgcttgtatatcctgacatgaaatgatacatggcgccctcttttgataatttagagataggaggcaggaccccaaaggcatctgccgtaagaaaaattatgacggacggatgactgcagatacttggtataactgacccaggaatgaaattcaaaggatataccacacgcgtattttctgtcaaactaccatctgaaaaatcaggttccctagaaaaaggatcaataacaacattctccattacggaaccaaatttgattgcattccatatttgtggttctttatctttgtttagattgatacatttagcgtaacaaccgccttcaaaattaaatataccattatcagaccagccgtgctcatcatctcccactaacagtcggttttcatcggctgaaagagttgttttacctgttccagataaaccaaaaaatagagcggacttattatctttacctacatttgcagaacaatgcataggaaatacaccctttataggcaaaagaaaattcatgactgaaaacatcgatttctttatttcaccagcataagacgttgaccccatcaggatcaaatttcgcttgaaactgatgattatgaaagtttcagactttgtcccttctaactctggaatagatgcaaaatcattaactgacaataaagtaaaatcaggtttaaaatgagacaattcctcttttgatgcatttatgaaaatttgagttgcaaacaaactatgccatgctctgtctgtaatgactcgtatcgacagtctagaagagatatcagctccaacatatccatcgaaggtatagagcttctcgcctaaattattatcatggatatattctgtcatacgaacgagtattttttcaaagttctcctcagaaataggatgattaaccttaccccaatcgaccgagttagcagtgatatcatccttgacaataaatttatcctccggcgaacgaccagtaaattttccggtctttaccgataacgatccggtagatgatagtttaccctcatcatttagaatagctgattcaactaataggggaactgttaagtttcttcgcccctcattaattgtaaagtccatcttataattctgcttcataataccaatagttataatctttggggtaaattgttattaaagatatggacaataaattataaaaaatttttctaacaaaaaattttaataatttattttattacattacagaaaaaaattaaaaaaattaacatcaatcaaatctaactagttttttaaagttcgaatcataaattcactgtattttgataaaaatcagttagatctatattaaaaaaatatttcaatatttctacataactctttactggtgggggaatttcattttcgcatgctattcctaaatctcttgcattaaaccatattattaaactttgtaagatattcaggaaccgatgatggcgtaagtcgactgtttcaaaagatttgatgtacctgtcggccaaattccaagcggctgtaaagtctatacaatctgttttatagattgcttttagttgatctttaatatcaactccaattttgaatggtttttcgcatattaatatggggaaatcaatcttgtctggtaaataaagagctggcggagaccatacagaaataattctagaaccactatctaactcggattcaaattttttggataacgacttgcttattttttcgtctgtaaaccaagaaaaaattacggtcgcttccgatagcgaacaactagtaacgttttcattaatggcatatgcatttttgatgattttggttttcgacttgatttcatcaataattgtagcgttaatatcaattcccacagccttcttaactttgaattcttctagggcaatccgtaaagttgaaggattgttaccaattccaagatgataaaaaatatcgtctttatttagatccgaaaaggagaacatttttctaatgaaatcatcaggaataacaacactgtcgccggttaatattgaattaggcagtgttgaaataaattcattaattttcacaaatatttaccttgttttgtgacgctcatcctagtgctaatattatatttcgacaaatacattatcaccctctattaccacattgtatgactgctggttttttagtttttggggaaaccagataagttctcctgtctgaacattccatttagcaccatgccacggacacacaagttcattaccctctagaaccccctcgtgtaattcagctcctgcgtgggtgcatatattattaattgcatagtattcacctttaacattggctattacgatttctttaccaccggcagtaatattttttaattttccatccggtatatttgcggccttatccaccaaaaactttgtcatataatcatttcaaaatttagaatattttaaagtatttgatatttcattatttatcaaagggtctattctgatcggatgaaccttccaagactttgatcattaatgatttttgtacatgtaatcgattttcggcctcactccaaatggcagaatgagggccatcaattatctgagatgtaacctctttccccctctttgccggcaaacagtgcatgaagatgaaatctttttttgcatatttgatcaagtcatcattaacctgatatttaggaaaaaatatcttttcacggctatcaagttcattttcttttccaattgaaaggtgagtatcagttactattacatccgcatcaataaccgcttcagtaggatccgatgttatcaataaagttgattcattgtctttagaagatgttcttgcaatgtcaatcacccaatccgtcggttcaaatcctataggagttgaaactcgaatattcattcctaatttagagcagcctagtagtaaatcattacaaatattgttgccatctccaataaacgctaaattgactccttttaatttttttttatattcgagaatagtgagtaaatccgccagaatttgacagggatgaaataaatctgacaggccatttataactggaatagtagaatattgtgataatttttcaatatctttatgatcataaactctagccatcatcatatcaacatatagcgaaacggtcctagctgtatcttctagtgattcaccacgagataattgtaaatcattaaaagacaggtttatagcatgcccacctaattgaagcatcgctgtttcaaaacttattctcgttcttgtagagggcttttgaaaaatcatccccaagatttttccatttaagtattttggattagaaccttctattttgagctggtttttcagagttgatgcgtgatccagtagggctaaaatttggtcagaccgcaaatcttgaaggcttaagatatcttctttcaatataagttttgaaaaaaatctttaatttaatgctttcaaatagctatttctttttcttcaaccatccgaatcggctttttttctcaccctgttccttcttttcttctccttgttcttctctagttgttgaaattttttcaatcccccttattggatttttgttagaagatgattcttgttgttcaataagagtattagaagaggaagaagaatctattttcaaatcatcattcatcgattctttatcaaaatctggtaacgcttcaggacgattttgggccaaaagtatttctgaattctgatcaaaaacttggctcttttcgtctataacatcatccgttaatggattaattgtgcctttacctacattagcctcttctatttcagggacaccgtgattctctatgggcaatgatgtttgagcaccccgatgagaatcaagtatggactcattattgaaaatagtttcaacaaatctttctctgttgaacttgatgatatcgtcgtatccttgaccaacaccaagataaataatcggtttagaggtaatataggatattgatattgctgatccgccttttgcatcggcatcggtcttggtcagtattgcaccgtcaaattctgtatatgaaaagaactctctagcttggttaattgtatcattacccgataacgaatcaccaacaaatagtttaacatcaggtttgatcacctttacaatttttccaatttcatccattagattctttgcagtttgcatcctgcctgcagtatcaattaagacaacatcgatgtagtgtttgctagcatactctagtgcatctctggaaacagctgacgggtcggcaccatatctttgagatatcacttttatagatagtttttcagcgtgtaaggaaatttgctctattgctccggccctgtgagtatcagctgcagcaatcactattgaaaatccagactttttcagcaaattagctaccttagctacagtagttgtctttcctgttccatttattcctaaaaatacaatcttaaatggtccacctttgttttgcttctttgcattgatagcagaaatcagatcaactgatcctgccttggctagaatttttgaaaaattatcctttagtgtagatgcgataacttgctcagtagtttcattcttttgtaatttcatacccactaaattatcttttatttgcttggataaatcatctataacttcttgagagacgtcactttccaaaagggcaatatttagatcaaaaagactttcatccaaatctttttcagacagttccctttggctaatgtttttcgcggcattagagaatgctcgctttaatttatcaaacatataggcatcccaattagtaacctaattctttaaaatgatagattttgtctgcctctaatgtgtatgcggatgggaatgcgagtgggttgagtcatcctgcctccgcatctgtccaacataagaatttacagtattctgtatttccatcatgcgatgtgaaatctgttgtttttgagttgacaattgctttgtcgctaattcaaattcctttatgcgttgttctataaaattgacagcatcatccttcttcttttcaactactactccagcgccgatatttactaaaactttttcaattggataaataagactttttacataaacacctattcctagaggaactaatgataatgtttcggattctgaggtcaaagttcttaatgcttcaaaggagttatgagactcttcatataatcgatgtaataccgactcctttgctactatatcattataataggcttcaagtaatttcgattcctgtactagatcatttacagtttgttccatattaacacctcttctatcaccgccatccatggtcataatatgttgtcttgcaactgactttattataactttggctttatttagcgtggatcaagttctagcttttagtcgaagatcatattattttaccaatcaatatccgtataattgattacagttttctaagttgtaataaaatctctctgatattcctgctttgtttttgtttagatcaagtgttatcaaccttctggtttataataggtggctatagtcaacactttgcagagtaggcagcatgcaataagtatgatcgaacgctgttacaatcaaagatcgtaaactttcgaattaaaaaagaataagtataatggattagttatgataatattttgttgaaactaattagcccgctttgaatataagcagattttattaattgtagcaaggtagtttggcaggagatgaaatttaggttaatataacgaccattaaaaatatattaaatattgtgaaagttacaaaccaagagtgtatcaagtttttattaatggttatggcataattggaagccggttggcaaccgccctggcaagggataaatctattaatcttataggcatagcaaaatattctgtcgacgagaaaacacaagaagcaataaacaagggatacaaggtttttgtacctcgcaaattaattaaggaatttagaaacaaaaattacgaaatttcaggaagtatagaggatgcaataacacaatccgatttggttattgatgcttctacagaagggaacggaattaaaaataagagaaaatattatcatcctcttaagaagaaggcgatttttcaaggtggtgaggataggtatggaagaaattccgtcgcagacattatccacaattcaagagttaattatgataagactttagaaaaagattctgtgattcagggtagttgcaatgttactggaatgggcaaaataattcaaccgttgattgagaattacaggcagtcaatcaaaagatttgacgtagttttagtgaggagatgggcggatcttgaagataagaaagaagtgaaggattcaatagaatgggataaaaatccacatcaccaggacgacttgaaagatttcataccttctgccaatttgtatgtcgatgccttaaaggtcccatccagaatgatgcatcttcatcaaatgacaatcaggttcgatggtagaccaccatctaaggatgctatcttagatacattcaaaaatgaatttggagttgctattttgaacaatgcaaagggcaccggagatataagaaagaaggcggtagaacttagatttgatcatggagatacatcgatggttcacattcatagcgaattattaaagattcaggaggatactttgaaaatttcttattcagatgaccaaacgggaatggtaataccggaaaactacatgttgatacaatcgatgttattaaaaagatcccgagcagaagcgttaaaacaagctgataagatatttagtatgaaaaagaaaaagaaatcattggaatcggaatttcagaactaatctataggaacaacctaaattgaatagagaacaatataatttcggaaaaaatctttcttttaataatacaatatagaaaataaagaggatttaatcccgagcttcaggttatttttttgttccaaatattctatcaaaataatccgacgattctactaatgagggagttgatatagtggcttcgccctctggtactttggccaattttcttgccaaattctttttgtattctagctgcatctgtctagcaatttggatacgttgagcctgtggcgaccctgccccatgcatggattcggtcaagtagccaacggcatttctacctaaagtcatattttcaattaaccgaagtatacgaactctatcttctgttgatacaccctttcgtcctttcagatatttatcaagcaatggaccggtaataggccctcgaaagtccttttcagaaggcatcgtgaccataagccctccagcaatgtcctgggctagtcttcctatttcgtatggaaagcgggtaacattgtgcttacacacattcgcgagcatatcatcattgatgaaatttccagattcagttttgtatgcctgatgtgaggatgcaataccagctgcaaaaatcgtctcattcaaatgagtcatctcaattaatttgtctttaatgtgggaggcgtttgaaattccattgtattcagcgatagccgcagatgcaccaatcaatacatctcctaatccggttttgcaaacataacttcgcctatgatagcacgtaaacctttcaactaacattgaagcaaactccacttctccttccataaagatcaattcatttggaataaacacattatcaaatattattaatgcctcttgtccagaaaactgagaattgcctgcatccaattcaccatcttccatgcttctggtatcgcacgattgtctcccgtagatgtatgtaataccttttgcatctacaggtatagcaccaacaattgcataatccttgtcttcaggtctcatacgcatggttggcatcactattaaccaatgtgaattaatgcaccctgtctgatgagctttagctcctttgatgtaaacacctttgtcgtctttcttgataacatgtacaaacatatcggggtcttcttgttgagaaggagataaacttcggtccccttttacatcggtcattgtccctccaatcacatgattttcgtattgaatctttttgataaattcaactaatctcgaatgatatggtgtttgatattttttatcaatttcaaaggttgtagaatacaatgagtttaaggcatccattcccacacagcgttgaaaacaagttccagtttgttgtccaagctttctttgcatacggttttgattcaccaaatcttgggaactttctgcgatatgcaagaatctattaacctttaatcctgtcaatgaagaggttgcagaacctatttcaggatcttctactgcgatatcatatgtagcagccacagcattaattgagggtctaatcataggatgatcaaccggttccttaactagatctccaaaaagataaacctgcaaatttctatttctcaagctttcgatatactcagacccattttgaataggcatatattaaattgaacgagataatatttgaatatttgtatatttgggcatcgtcccttagagatatgaacaacattaatggacgtgggcattaacagaccagacccatttacaaggcaccattaaaggataacttatttttaatatctactaacaacacaattatgaatcttataaaccaaatcaagatcttactaatggaagaacttcaaataaatgatttggagaccgatatttttttagccctgatgaagtcagaaaaaacaacttcttttggattccaagagaacttgaacctcggacctgatcagattatcgaaattgccaagagcttagaaagtaaaggaatggttattgaaattaataaaaacgaatttcgagcattgcatccacggtttgcaatagtaaatagatatagaagaatttgtcaagaaaataacatggtgtttaaaaagaacacaaagatcgataaccttggaataatgctagaaaactatcaaaatcgagtataatagagattgatactgtggaaggcctaaataagggaaaacgattaacttagtaatttagaatgcaatcttcaacttcttcaaacaataaagacaaaattgcctattttggtgtaataaatattaatgaaaatgggagaaatatcggggcagtagatatctggagaagtcttatatcaaagaaatttttttgtgaagaaaaaagattaggaattcttgatatcactgataagataggcatgcccgaaattaaggacgaagaaatttgggccgtggccataaataaatctagaaagggaaaagatcgatggaaattgataagtgttgttaaagatggtaaaacagagtttttggataccgatgatgaaactaaaataattgtagacacatcaaattttaagatcgttgataaagaatggtggagttttttggtttcagaaaatgtaaacaagagtatcgaaatcgctgaagaattgaaataatatgataaatgaatttccagaagaatataacaatctagatatagatgttagcataaagcatgtagtagaaggggctttggctagtaagctatcgggccattttctgatttataataacaagttcagttttaatgcagtagcttttggtcgtattggaggacacaatattagcgtcaaaattagtagaaccactagtgacaaaattagaaaattgaatttggatcctgaaattgtgatattgatagttcagaggaaaattattgaaggagatattaccattcaaacgaaaagactataattttttctcattgttaaaattttataacactgcgtcctttaaagcatttccacatgaacaattgttttgttcctcagggatcataggtattaccgtctctagaatcctcctggtggtttcaacattcttctctaaggtttctatgatttctcgtgatgacacaggctgatcagcccaaacatcataatcggtaattgtagaaacagaaagataacaaatctcacattctctcgccaaaatgcattctggaactagagtcatgccgatgatatcagcctgaaatacatctctgtatatcttcgattctgcccgtgtagaaaaccttggaccctcgatacatacgtatgttcctttagtatgaacatggatacttaactcattaatacaattactaataatattcctcatgtctccacagaaaggatcggctacagaaatatggcacacttttggtccattataaaatgtatattctcttttttttgttaaatcaagaaactgatcaggaagcatgacatctccaggctttattttataatccaaactacctaccgcagaaggtgctataattcttttaacacccaattcttttagtgcccaaatgttggcccgataatttatcatgtgtggaggaatccggtgcccttttccatgcctaggaagaaaagctattcgctgattatcaaattttcctataataatggcatctgaagtggggccatatggagtatgaggattaattgattgctctatcttaaataaattaggattataaattcctgtaccacctattatcgctattcctattggtttatcaatagccaccattagtaaaccaccattgaatgaacacgatatcctctttcttttaatagttttcctccatccaaagccgataattctattacaaacgcaaatcccgctacttggcctcctaggtcctcaactaacgtggctgcggctaaggcagtaccgccagtagcaagtaagtcatcggcgatcaaaatcctgtcacccttcctcaatgaatcggattgcaattccattatggctgtaccgtattcaatcccgtaagcttgttttattgtggttccagggagtttgccagcttttcttatcataattatccctttattaaatttcaaacccaataatgtagataaaataaacccgcgtgcttctatgcccgcaatataatcaacgtcagctttgtcgaagtggttataaaaatgatttccaaggatgtttaaggatttaccatctctaaatacaggattgatatccttgaacaagattccttgcttaggaaagtcaggataattttttattaaattttgaacgtatcgaatatccggatgcataaaatttttttagatttatacctataaaaaacattactagaagtattcaagaaacaaatattataaatgctaaccagcctatatatgagaatgatataattgaaacttgccgatgcaaggagagatccctataggaagcttgcaaaagaaaacagctataggagtcgcgccgtttacaagctttcacaattaaataaatcacatcatcttttaaaacaagggatgaaaatagtggacataggggcagctccaggaggttggttacaatttgcatccaaaatagccggaagtaggggaagggtcattgggatagacgtgaaagaaattgaaccgatttcaaacgttatagtaattaatggaaatgtagaggacgaacaaatggtaacattattatcaaagtatttggagggcaaggccgacatagtcttgtcagatttagcacctaatgtatcaggattgtgggagatggatcacttaaaacagattgacctaacaatgaaggctgtagagattactaagaaaatcctaaaagtaaaggggaacgcattatacaaagtatttcaaggagaagcaacaccggaatttatcgcctatgtaaaaagtatattttccgtagttcatataaccaagcctgacgcaagtaggaaacaaagcagtgaggtatatttattgtgtaagcaatttaatccaccagcagattgaaaacactactgttaatttttacgccggatatttaagattttttgagcttgttccaactttgaaacatctccaccattctttacaatagtttctaatagtttttgtgggcgtcctgcatttagagattctcttgcaatcgatatggcatcgcttaaagattttatgtcccctccaaccattaaggcagcagcactgttaagtaaaacaatattttccttcgatttattggattgtattccatatattatgcgtaaactttcgtttattgattccattctatcccttactgttatttcttcgatcgtggatttaggcaaacccaatgaagctggatctaataattcatttcggacgctatacctgccatcctggaaagtaatatgaattatagtgtttctgttagtggtagatagttcatccatcccatcatgggatcgaacaatcatcgcgtgctgcaaaccaagattaggtattattctaggaataatggttaacaaagagggatcggcaactcctatcacttgaccgtacagatttctgcaggggttacacaaaggtccgactttattaaatattgtacggattcctagctccttcctcacctgagaaacatgccttaatcctggatgaaatttaggagcataaaggaaaccaaagccgtaattttctatcgatttttcgatagaagtgacagtgccgtcatctaatcgataacctacatattcgaacaaatctgcactaccactgagacttgatgacgatttattaccatgttttgctatggctatttttttacaagaactagcaatcacggctgaagtggtgcttatattgaaagtgtttaaaaaatctcctccggttccacaattatctataatcgggagatcagacatggggtttattggaatcgaatatgctctgataatttcaatcacggcctttaattcttctatgtcctctccctttaatgctaatgacattaaaaaagctgaaacaaatacatcagaacaatgaccattcatgatattagtcattactgtcctaatctccttgtaatttaatctctgtccggtcgagagtttcttaagataaatttggttttgagagtatgtatcatctatgttatagttattgtgattacaatcagttttatctatacatgaatctatatttttattttttgaggtcatttctttaccattcggataaaattagagagaatttttttaccttcaacagttaatatcgactcaggatgaaactgtatcccctctatcagaaatttttcgtgacaggcactcattatttctcggtcgtctaatgaaatggaagtaattttcaaacattttgggaaattagctctatctgcaattagtgagtgatagcgtgttgctataaacgggtttttaaccccttcaaatagatcagtattgtcgttgaattggatttcactggtcttgccatgctttatgttatttgctctttttaccgtgccaccaaaggcgttcacaatgccttgatgccccaggcaaatccctagaattggaacagacggtcccaatttagttattacatctgtacaaattccaaaatcctttttgtatttggggtgtcctggacccggcgatataataattgcgtcaggatttattttagatatacccttaatggtaatctgattattccgtttcactataggatcagtacttaataaacccatgatctgaacaatgttataaacaaaagaatcataattatcaatgataaggactttcatttaactagtggtcacaatatattatccaaaagtcaataataatactttctaaaaaggctaaacatgtaatatctttttgtatttgtcatacctttccattatattttgcctcgttaatcgaattaatccatctattccaaactcttcaattgcaaaagtgcccataatacttcccataagaattgattctttgaataatgccaagtcatcaaataaacgatttttagattttgatattaagtatcccatgaatccaccagcaaatgaatctccagctcctgtaggatcggtaacactttctaatgggtatccaggtattggaacaaccgagttatcaataaagagtagcactccatgttcgccctttttaataattgcaaaatttggtccataggataatagctgttttccacatttaataaggttagagttattacaaagcaatcttgcctcttggtcatttattacaactccattagttttctcgatcatagatataacagaattctttttattaagaatccagtattctattgtatcgcaaacaattaattcagggctgtcaaaactgtcaattatttttatattttgttctggatcgttatttgctagataaataaattttgagcttttatattctgttggaacaatcggttcaaaattttcaattacattaagttccgttatattagtcgtcctatgagataggtcaaaatcgaatgtagaatcataaaagaatgtttttttgtcattgaattgtttcaagccctttatatccatcttattgcccaactgagtataatatctatctggaaaatcattaccaattgcacctattaaagagacaggtacgaaaaaggatgcagccatcgatgcataagttgcagctcctcccaatatacgctctttggtctcaaaaggagttcgagtagtgtctaaagcaatcgacccaaaaactgtaagcattaggaagagtactatggtattaaatataaaacattggaaacacaataaataaagaatatgggagaaaatccaaggatagttgtaggcattactggaagttccggtgtaatttacggcattgcacttttgagggcactagagaaatttgagatcgaaacccatttagtattgagcaagtgggcagagaaaaatatagagatcgaaacagaggaaaacattaatgagattaaaaatattgcgaattatgtatacgacgaaaataatatggcggcttctatatcaagtggatcatttagaaccgacgggatgacaattattccttgtagtatgaaaaccctttctagtattgccaacgggtacgacgataacctcatttctcgagcagcgtccgttactattaaggaaaatcgcaggcttgttatagttcccagagaaacccctctttctaaaatccatatatcaaatatgttaaagttagcagaaattggagtggtaatattaccggcaatgccaggattttaccataaaccaaaatcaattgacgatctaatttcacatatcattggaaaaacacttgatcaattcggaataaacaatgatatgtttaccagatgggataaaaattgaaaccggacccctgcatcatttattgcaaaggatacactatgcgaaaaagtatctatagaataggaattagcaaaataagtaattcatggtccgtgtaaaatgacagtgcatacttgagtgtttgtctgatctataggatattcagttaactttttcccataaatccagtttttctaattttttcttcctgttatgttcttcaagcatatgataaactgatttgtgggagctgcccttacatatcattaaaattgcatttaaagccagagacgtttcgtcataagtaccaatgaatcctacaaaatgtccatagatcgatatatcagcaccagagaaatcttctaaattctttctaaatttaccactctgtccaataagtctagatttgatccggtctagagaattcaatgattttccagagtactctcgcagatctataagctgtagcagagaatcatcagataacaacctataggccctctcaggagagaagccttttgagatcgccattactatttcggatgctttgaatattccgctatttgttaatgatgattcgttttttaatcggatcgttacatctccagtttcgccgtctacatctagaataatattacattttgattctatttcagatttgacagaaccctttttcccaactattacccctatacgatctttggatactttgattactttaaaaatattgtcaaaactcactatatcatagtaaacactaaactgtaatatattttaaaaaagttaaagtcatccaccatgtacaactgacagaattgtaacagtatctccggatgaaattcttgctccccttccacccagcacagaggactctacgccattaatggctatcattatttcgctctgttttatcttattttctaaattataatccctctccaacaatgcaaggatttcattaatgctagaatcagtgatattgatatttacagtagaaaatccagctatcttccgtatcccaccgagtagagcaacggttatcaatcttattctgcaatttcttcgcgagattcaggattttcttccgaatatgatatggaagcattctgttgagcgagatttctatttatagtcttagtaatgtagcctgctattttgtttcgtaattcttttgaacgaacaatagcaaaattctttatagtttctttattttcgttataatcactagtaaatttatcaggataacgttccaacaattcgttggccatttttttgactctatccacatgattagaaaaaaaacaagggtattttatcttttatcttaattagattcctcctatgggtgaaaagaggatagatatgctaattcagaaatcgtgtagaattctcataaagtatttgagataaatcatcaaacgatttttttaacaaaatagaagcaaaataagctacgctaatcaccaatgcaggagaagtaaggacaccgtcaaaacaatgcttgtatttgaccggaccatcagtttctaccaaaattaggttaatatcagcctcggttaacaatgcttgcttgtcactggagtacaggagatatggaccgaaagaaacgaaatagcctttatcgtttattctttttagattgcttttgttcccatcataccaatgaaataccgcacccctaattttatatgaaggcagaatctctagaatttcgttgactgatcttctagaatgaagagacaccggcttgttattcttttctgctatatttagcatttcttcgagaacatttttctgtctttcgatagtattgtccggatccaacttggtatatgtaggatcaagcccaatttcacctattccatcaatagaatcaatcttggattggaaaagagcttcaaaggatcgcaggtcaggattaaccgctgcaaactgtgggtgtatacctacaaaaaccctaaaaagttcagaatttttaaaaaacctctctttaaataatattgcctctacagaggaataaaagttttcagacacgcagattgattgaacattagcctcgcggatatagttaaaaatcatattatgataattctgataatgtatatctgacaaatgaatgtgcgagtcaacgtaatgcaaattaagtgatcattgttagattcaactaattaattattagttgtggtatatgatggtactagcaagagattaacctacccaataaattatctggccttcaatagggtcttaagaatcagtcaagatagattaaattctgattctaaaattattctgatcaaaatccataagggtggatttaataagaagaatgaacactttaattgaatcaattttacaaaggcttttaataaataaaacattaaatctaatggaacaaatggcattaaactcagaatcggaaatagctctggcttccattcacagaataataaaaaaatatggggcagaaagggtcagtgacagtgcagctgaagaattaagaaatatacttgaagcgttaggagagaatattgctaaacaagccgtacagttggccaatcatgctcacaggaaaacaataaaatccgaagatataacactcgcatcaaaaaattttatagggtaacaatgtagtatcaagatcataagcaattttgatgttattgaaatattagatatacaagctagcagagatacaaaaaatattaccaaagaaatataagttttcaatcgatgataaaacaaacagttggtggggtggcagagcggtcatgcgttcgcctgcagattctaagatgtagatagcgaatatataagggttcgaatcccttccccacctcttaaacaaaattatttcatatgtattttgatggtaaatacatttttggtgagtattattttgttaatatcctttattaaatatttcatatttatatcataaaaatatcttgaatagtctttgaatttctctaaggagcgattgaggatagagaaaaaaatatcattctcccctttttggaagtgtacatatgctgcatctaccagaattaaaccatttaaaagactttttgtttgtccttttgcatctttccacacgctctcaagtacttcatgagatttccaatatctttccatattaaataaaaatatagaggacatcacggcatcttcattggatagaatatttgattgctcattcaattcttctagacggatcaaagaccctatagtattaatgggcccaaaaaaatcatgatcatctgcgctcagtgagaacatgtgcccggtaataacatccaactcgataaaatagcttgaaatcctgatatccctaacttctgcaagattatagtcttgaagcaatgaacgcagtgagcgtaaaatactattagagcgtgtgggcaaatagttattcctattgtctaggtaaacaagatatctttttttcatgtaaatagtttgtatttagcctattatactaaatgaggcttctcattttagagccaaaagagttaggaatggattttatgatatcaataaaccgattcagacgagggtcttaaacctcttttttttgatatgaaaccacagttaccacatttatacactctttttcttttgtaggtatagataacatctatttcttctatccaatcatgcatagtttttaacatacagtttgtacaaaatcttttttccaagtggatttatcatttatatttgaagttaggcaaataaaaagagatttcaaaatcatacaattaatttcttaattttgatcttaataacaacgggacttctctagggctttttgcaactggaacatccgccttagcatagttatttatttttgaatcggctgatccgtaatttccatagactatagctccagcatgacccattcgtttttctttcggcgcagatcttcccgctatgtaggcgactacgggttttgagaaattagtttttaaaatatagtcagccaattgctcttctgcatcaccacctatttcaccaaccacaaccactgaatcaacatcttccctgttcctaattaactcaaaggagtcgataagattagttccattaattggatcgcccccaattcccagtcccaaacgctgtccaaatccggagttagatagatgaaacgaaacttcatacattaaggtcccacttcttgaaaagacaaccgtattacccttcgtgaaaggttgagcaggcataattccaactttcattatatctgggataatcactccaggagtattcggtccaatcattcttgctccttttttcttggcatattcgtagactttaattgaatctataattggtacatgttcaggtattgctactattagtttaattccactatctagagcttctttggcggcttcatagaagaatggagcaggtacgaatattccagatattactgatcctgattcttgtaccgcctcccccatagtattgaaaacaggaacatcttcgaatttagaacctcctttgccgggtgtaacacctgcagcaatatttgttccgtaggatcgcatcagtcttgtgtgtgttgatccaaagctgcctgtgattccttgaataactactggtttcttttcatagtcatcatcagtttcattccctaatagaattctaaaaatatcaaattgtgtgttcaaattgtcccactcggtttatttgttatttatccttaggactacagcatttattgcttcctctacagtgttaaataggcgtgcattacttcctgtaagcaattcctttgccttttcggattgcgcccctgagattctagcaaatactggcactgtcaatatgttattcttatatgcttccagaattcccattgctacaaggtctgtccgcacaattcctccatataaattcacaaggattgcttttatctttggaatcctacttatgactttaagagcttcgtaaatagtttcacttgtggctcttcctccaaaatcaaggaaagctccggcttcaccattcgcgtcagtgaccatatctaaagttgacattactaaaccagcaccattccctataattgcaatgttaccttccaattcaacaaatgagaatccatttttagaggcctgtttttccaaatcgcttaagtataaatatttttgcaaatcttcatgtctaaagagagcgttatcgtctatgatcactttagcgtctaatgcaagtaaagagtcattagagataatagcaagaggatttatttcggcaagttcagcctccttttctataactactttaaagagattcagcaataaattgacaaaactctctttggatttgtttgggatatttaggttcgatgcgatagtattcgctaactcctcagacatgccgtcaatagaaatatcttggattattttattatcagtttgttcaatgtcgatacctccttccgatgaagcaattatcgagaagcagcgtttgctcctatttaagaagatagacaaatagatttctttaacaatatcaaccattttctctagtaggacacctctcggcaattcgcctttaacttctttcttcaataattcattaaactttgtttccaattcagaaggatctttgcatttttgaattgctcctgctttgcctcgacctccaacggttagttgagatttcaacacaaacggataacctaatttctgagctgcaattctggcatcttccaagttttcagcgagaatagaagagggtatttctatactaaattgattaaatagctcttttccttgatattcaagaagtcgcatctttatgaagtttttaaaatgctctttataaataatcctttttttattttatttaagcaatacctaaatatttcctaaatttttcaaatcctggcttacattaagcgaattgagtgtaatattcttgacgtctaataaatataaggaataggcttttagattactcattagttccacgtaatttggcattaaagattgatttggttgtccgtttagtagggtctgcattaattcattattttgaatgatcgagacatcaatgacatcattaatgtatgtctggttgatatcatttacattagcatcatgtatttgattttggacctcgttttgcaataacaagaattgactattgaccgatgttaaggtatcgtttggatccaaaaatgaaatggtcatgttacttatttccccattttgtagattttcggatggtaggaaccatacaatgaaactagcacctataattcctactactaaaatactggttaagatgattccttttttattaatttttttgatattattaatattatcattttctttcttgtctgcactcaatgaattttttttgacgatactataattattactttatgtttagagaggactagggatagaaatatacttataaatatattatctcaatagaagagaaagattctttatgaatcatgacaataaatacgcactaagaagaataaagtatcaaggaacatatatgattaacatttgtgatcttgatttagcgggtaaagaaattaacaaaggcgattttacgataaatatatcaaaagaatatttccaagatgaagagattaatgaagaagaagctgcaagattactaaaatcctcctcaatgttaaatttagtcgggaaaaatattgttgcccttgccctaggattaaagcttgcaaaaggaaagagcgtaaaggtaatagatgatgttcccttcttgatggtatttagttttttaggaaattattaaattgcaaaaggttgtatattagtgattataaaactcatgatcttttattagatcataaatgttcttaatttcatctaatggtgaatcagaattgattatagctctgcctatgattaaatatgtcgaaccagcttgaagtgctttactaatatctcctccctgggtgataatacctggggagtaaatagggatgctaccattaccttcggatgttaactcttttagtatatctaatctattccctccaaccaccacaccatctacacccacagatttagagttctcgtaaaatatgcgataaacaggctttgaatttttccacttgccacgaccgttctgaatcgacaaggagccgccatagccttcgatggcaccagcatggctcatgtatacaagagaaattaccccaaaattcaatgaatgagcgtaatcaaccgtagattgaagattaatttttccaataaatggatttacaataacagaatcgaatcccaaagaagaaagatatttaatggtgacttgattggtatcaaaaatatcatttagtttaagatcagctatgatttgcagattatagtcatgagcaatttttgtaatttttcttagctcatttttagataatggcagtattacatggaaatttagcttgatagcacaaacatagtcatgtaactggctaataatatgacatacatagtcgagtaagttttctattctgtatgttggatcaaccgccaaaacgatattgctgcctttttcgcttttgattgcactaattctgtctgcgaaggaatcgggagggtccattctaaaatttgactagggggtgaacatcttccaattgtatgatctttagatatataaaaccatgttcatcgatatgattggagaaagaaggagccgttgatttttgcatactaaatttcatgaaacacttttggatttcttgctctaatacgacgtaataaaagtaacttgtatctgatgagtcggtcaagtttaaatgtaatcccaaaacgtatttcatatcgacttcggtatctgggagatccaaatcctttgatcctctttttgggaaaagaaataatggtaatgtagattcctcatagatggtatggtatgcaactaatttagataaactaaaaagatcccgtaaaccaatgccagtgtacttggtcgttgtacttatctttgcgggtttaaggaacgactgaggtggtatagatattttgataataggagagtacaatgcagaagtatccttaatagaattaaccaacacagcttcctcattattgttgttgactttatacgaaagatattgattttcacctgactgtatgttatcaacataatatgtgattgagtgtccatttagagtatctgattgagcagcaaagatatccgtattttgataattatattcataaataggaattggaattctctccaatgagcaaactaatctagcaaaatcattcaatgattttaattttatataaattggcgattttagcaatttgaaacgaacttaagatcaaggtaaaattatccatatataattttaatacaataaagtatattaaactgaaaggcagaaaaatatgactagtattctaaatgtaggcttacacaagatactcgtaatatttggttagcatattcttagacaaattttctatagtcataaatcagattagttctaaaagtagctaaagcaagaaaaattattagttattacaatttgcatttgcttaatacatgagaatgcacaggttatattatagaggaattttcctatctaaacgacaataaataacatttaatatcgaaaaaaatcacatcattttatgctaggttactctgatgacgatatcaaaaatgcagcagagataagagaatggttaactaaacaaattttagaaaaacaggatgaaatagagaaaataaaaataactctctcattaattgattctgttttaaaacaaggaagtttcaaaactgcagccaatcttaatttatcaaaaaatttcttacccaacgagcaaaaaattgaagtgaattcaatgaagaaaaccgctaatcactattataaaagacagagaggggatgaagagcaaagtgaatcaagagagcaagtagtcgaagagacgcgtctaattaaaagattaaaggataatacacccgttgcccgtgttcatgtgacatccgaagaagtgacaattattcccgaggataatattaaaattagcatagaaacaccaccttttaggtccttttttttaaacaggatattacaaggaatgaaaaacaaggacctggataaaaacaaacaagggcaattgtcagaatcggatataatcatttatgatatcactaccgaagatgaaaataaggatatcctcaagaaaataaagatcaagaattatagagataaggaaagaatcaatgaaattttcaatactgctgcttgggtattgacaagaatgttagacaaagtggacaaataatggacaaaatagttgtaatggattttggatcacagtatagtcacttaatctgtaggagaataagagaattaaacgtctactgtgaattagttccttttaatacgccagccaaaaaaatcaaagatctaaagcctaaaggtataatattttcaggtggtcctgctagtgtttacagtaaaaactcacccaagcccgatgatgaaatatttgaactaggtgttcctattttgggtatttgttatggacatcagatcattgttgatcacttcaatggcaaaataaagagagtcccaaacagagaatatgggaatgcattgttgacaataacgaacaaaactaatttattcaaaaatatagattcagatggccttagatgttggatgagtcacagtgatgcagcagaaataatccctaaagggtttgaagtcataggtaaaactaatagttctttttcggcggcaatagggaataatgacaaaaagattttcggattacagtttcatccagaagtagctcatactgagaaggggggtaaagtattattcaattttgccaatgagattagcgaagcaaatcctgaatggagtatgtcgaactttattgaaacaagtattaacgatatacaaatgcatgttaaaaatgaaagagtcctatgcgctgtcagtggaggtattgactctacgacttgtgctatcctcatacacaaggcaatcaaggataatttgacttgcgtttttgtagataacggtttactgagagagaacgaaagagaggttgtagcagatatattcaaaggaaaattaagaatacctcttagaataatagatgctaaagaaagatttttgaaaagtcttgagggattaacagatccggaacaaaaaagaaaaaaggtaggtgaggaatttgcaagagtatttacagaatttgccgaaaaagatggaccatttcagtggttagctcagggaaccttatacccggatgtcatagagagcggagtatccggtggtcccgctacagtaataaaaacacatcataacgtaggtggactcccagagtggctccatttaaagattctagaacctttgagatacttgtataaggacgaagtacgaaatgtggcgaaaataatgggtgtaccgcccgacttgcttaccagacacccgtttccaggaccgggactggccgttagaattgtcggtgaaacaactcgagagaagttaaatgtggtcagaaaagcaagcgagatagtagaagaagtactagttgaagatgatttgtacaataaggtgtggcaagcattcgcgatagtgggagatgataaggcggtcggaattttgggggacgaaaggatttttggtcatattgtttccattagaatcgttgaatctgttgatgcgatgacagctgactgggcaagactaccatattccactctagaaaaaattagttctaagataactaacgaaattgaaaatgtaacgtgggtaacatatgcaatatcaagcaaaccaccttccaccattgaaccgcagtaaccagaaatggtgcgagaaatttgatttaacataagttgcatatttagtatgatactatagttcagtcgtttcctaaagaaatagactgtcttaatttagagagtaaaagaaagatttccattcttatagggattgatgatatcatatatcctcatctttagaattaatcggtttatgcttgttcttaaatttggtcttggtttttaatctatttttgttcatacgattaattcgaaatataatcaaaaaagtcaaaccccaaaggatcaaggcaattgaaatattacctaccatccataaataacctccaagcaatgcaagcccaaaccctgtaaaagtaagaatattcttagtattcatattactttatatttattcaccccataaaaagatgaattgtgattcaaagacgtgatgtgagttactagggcatcagaattttccaatagcatcccaaccaaatattttccaatttgtaatttctgtttcttcaattcaaggtttggaacattcctttttgaaaacaaacctattctagagtcaaaatccatacctacaagtaagatctctcttgctagaaattcaaccgcaagagatacacttctatcgccatccgtaaatcctccaaaattgtagacatttttcagaggaaaattttgagtcgttcctacgctattactaaaatatggaacctgcgagacaatcttatcaaaattatcaccatgagcatgtattaccataattgatccctccaaatgagccctttttaaggattgataatttccatcaagatccgttacaacaaaatctggaataactcctaaatccagacacatttcagcagcaccatcggcggctatcaccaccacgttctctgactcgacattactaaatttgcccttgttgcaattacatatttcaagtatgtaattttgtactgtgctttcttcaatacttggccccgctcctataactaatgttttgctgttatggatctttctgaaccagtttgggccaacgactttatttgaaacgagggtagacaagttcaaggaattgagaaaatccctttgaatttgaatattcaataatctagcaattatgagataataaggataccagttattgaaatgcaatcaattattcaataaccattgtgtagtatatcttgatttcattaaactgaatatagctttaaaaatgtattacaagtttatgcaatatttaaaaaaatttgcccattaactgttaaataataagataaatcagaacatggtatggtcactaacgatatagataaaaattctgacaaggatttaagaaggatatatggttttaaaaatattgctgtagttggaatgtctccaactgaaggaaaaccatctaactatgttccaaaatacctaattgaaaaaggttacaatgtcattcctgttaatcctgtttatgatgagatcttcgggaataagtcatatccaaaggtatcagacatccccaatcaggttgatatagtagacatatttcgaaaatcagaagatgtattaccagtagtgcaagatgtaatactaaagaatggaatcaaagtgatatggatgcaattgggcatttacaataaggaagcaaaagaaattgcagaaaagaaagatattgatgttatttataacagatgtatcctaaaagaacatcaacgattgttttaatcatatacccataatttgaatattaatccattatctctaaattcttgaaaagatcgagtaacttaattaaatagtagatcattttatctattgtattattaatgcctagatggggccaacttgacaataaagtagatttaaaaaaaaatgaacattataataaaataagttctttgcaaaattttacaaaggttatcgtattttgtatcgacagagatgacgatataggtattaaaggaggacttgaaactccgattatcggcaaggaatcatgcattcatgccggaacaaaattagctattgaagatccagaagattcagattgtaatgcaatttttggagcggtaaaatcatatgaagaattcagaatgaagggctatgatgtcgaaattgccttggtcgcaggcaagtataacaggggcattgatggagatttaaagataactcaagagatagacagggttttaagtatatacgaagcagatggggcagtagtaatatcggatggagaagacgatgaaacagcaatacctttaattcaaggtcggattcccattatatctatccaaagaattatagtaagacaaagtagaagtgtagagtattcctatgctattttagctagatatataaaaatattattttacgatccacgttattcgaaatttttcctaggccttccaggcgcacttttagttacaagtggattgtcaataatttttggattttctcgcgaggcatttgcgttaggtattagtatactgggtgctgcttttattcttagggcatttgatatagacaaatcactagctacattgtcaaagccaactccttctggattcatccgtgtattttcctactttgccggcacaatgataattttggcatcgattttaaacggcatttctcacattcctcaggaaacattagattcaaataaaggatttacttcaattataacaaacaaacttgttctaagtaactttgcaacaggaactataacgctactgtggataggaatttcaacgatctttgcaggaatattgttgagtaactggtttaaaggaagtatcaaaataatatatgatattctgcgtttggtagttttgggcctactttacatacccatgttgcaattgacatcactgatttctgaacgtggaaatccattcaatctaatttcttcattgttgatcggtttagcgattaccttgatagcggcaacttttctattccaatactttagaaaccgaaagggcggtgaagctctcaaacatgacgaccagtaagatatattagagcatagataagggtataaaacatctctcctaatgtctatgatagacaagattctaaaattactgtatttaacatctaaacaaaatcttatttataaaatttatgaaaaacacttgacgagtcaaataaatcaatttccttttcctcagcatattggaattattttagatggaaatcggcgatggtcaaaaataatggatatagataaagtgaaagggcatcaaatgggtgcagacattgctgaagatttattaaattggatttacgacctagggataaaaataactacagtctatgtattatcaaatgaaaatctttatagagaaacacaagagcttgaaaatatatactccttgctcgaagataaattgactagtttatatactgatagcagaatacacaataagcaaatacgagtaaaatcaattggagaattcaataaacttccaaagagattgcaagatatcttaagaaaattggaaaagagaacagaaaattatgaaaatatgtatttaaatattgctattgcctatggtggacagaaggagctaatagacgcgattagaaaaatagcgacgtcagtgaaagaaaacaaaattaaaatagacgatatcgatgaaaagatcatcgaggcaaatctatatacggcacatcttccccaggcagagccagatttaattttaagaacatcaggggaaaaacgtttaagtggatttttgctgtggcagagtgcttatagtgaactgatatttgtggatattttttggcccgaatttagaaaaatcgatttgatgcgagcaattcgaacttttcaaaatagagctcgaagatatggtaaataaatctggatttaaattagactgaatctctccacatatatttaatgccacagcatggagaaattgataataaaaaaaacttgatctattgtggatattggatgacgtttgaagattgggaagatattcacaaatatagtccgggtgtagagggttcagaccacgatgtaaaagagacatctgaagatattgtctgaatagtccttttcaattagggtatggtacttgtcataatacaaacacgcttttataattgttaaattcattcaaggcaatgtatgatgaaatctcggccggggctgtattatatttggttgatgaacattccgaaataaagtatttgatcctaaactataattatggacactgggattttcccaaaggtaatatggaaataggggagacagagatagatacagttttcagagaagtgtcagaagagactggaattatagacatccaaataatcaacgggttcagacaacaaatatcatataaatataggaaaaaatcaaaattgataaataaagctgtaatttactacctggctgaaactagatctaagaaagtggttctatcgtttgagcacataaatttcgaatggcaaacttttgagcaggcgttacaaaaactttcatttgaaaacagtaaacgtgtcttacgaatggcaaatgaatttctgctaacaacagaaaacatgaaaaaaagttctcttaaatcctaataaagttttgtttataagtatcaaaatcatttaagaatgagttaaaggagcttattggtactataggcacttgatttacatattgaaattcatttggcaaaaaagtaattattactggataagagtattcaattccaagggattccttctttttcataaagagagtaactcgctctatttgtttatctactgcattcgctattccggagtaggagtttctcttccaatgcttacagtctaaaaccaaggcattttgtcctctcatacctacgacatcaatttgtcgagtaggattcttaatgcgatagtttttgtataccgcataatcatgaaatttcattatctcggaagtaaataattcaaaatctctccagtcaattaacctacatacagtcaaaatatctgcaccacattcaactgcagctaacgcgataatgatcttattataggaagaggcattgatttgcttgtcctttatgactacccctctctctgacaaggaatctaaaaaatctagagttgataagctatttttaattctaattttggttgtgtttgagttaaattcgtttagtatcttaatgagtgaattaggattgattttcaaataagcaggtaaaaaaaagaggtgggaatgttattttactgttactgtaccaaccatcgctggatgtaaggtacaaaaatacggatactcacctgctgtatcaaatttgtgctcaaaggtttttcccttggcagtaagtgctgttggaccagctaagcctgaatcaaatgcctttcctgcgtctggtgcaccgacacttccagatgttacggtatggaatgcggaatcatcgtttgtccagactacagtttgaccaacagtggcttcaataggattcggactgtatgacgtatcagtcaaagttgatgcacccggtacaattgttgcctgtactttatctgattgagcaaaagcactaatgtttgcgcttgctccaatagcgactaagctaaggatcgcaagtaaacttgctgcaaggtaaattggtttatttaccatttttatcaatcttaaatgtaatttacggtaataaatatcctaataaaattccacgtttctaaatgacattgctactacaaggtaaaaaaaatcaattagatttgcattacttttgtatggttaataaagacaattgtttttttgacaattttcatgttaaggaattattcaggtaaactttgctaatggttaaacttgttaaaaattcatcagtattaatagactttcaagaatctagagttaaaaaaagagatgtgattgtacgtacttacgttacgattacttgacctgtcattgcaggatgcaaggtacagtggtaatcaaattcgcctacagtgtcgaaggtatgctcaaaggtttttcccttggcagtaagtgctgttggaccagctaagcctgaatcaaacatttttccagcatctgctgcaccaattagtccagatgttacggtatggaatgcggaatcatcgtttgtccagactacagtttgacctactttcgcttgaataggattcggactcacagccgtatcggttaaggtagttgctccagggactatagatgcctgtactttatctgattgagcaaaagcactaatgtttgcgcttgctccaatagcgactaagctaaggatcgcaagtaaacttgctgcaaggtaaattggtttatttaccatttttatcaatcttaaatgtaatttacggtaataaatatcctaagattatagtggtataacataaggtgtcatcatttacttagtaaatatttttaaccggttgaccagcaaacataattacccgatacaaagtgaatgagtttatcatcctgttacaaggagtcaagcattttccaatttcggattccgaaaagcggacattgtacaatataattaataatagacaaagagattcctatgacaaaattaagaaattaaaggatttcttgggttttggaaggaataagaaggttgagaacctttccacagcaacgattgaaacaaacagtctgcttgagaaaggcatcatacaactagacatcgctccacttggttcgaacccaagggctatctcgaaccaacaggtgcctgatgataaattcaaattaactagcgtaggtctcattcatatctttagcaataagtacacatattcgcccgattttctgatcagatataatgacgacatagtcttgcaagaattattgttcaagcacttccagtccaacacaataaaaatggcaacagcaaagttttttaatatcattacagattatttgaaaacctcatcagattatatttttagtttatcatttgagcatgacaaatcattgtttgcagatatgaaagaagaaattgactacaaaataaagatttttgcattgattttaggatttaagatagccattctattcaatgaaaataatatcatatcttcaagtatcggtgcaaataatgacaatgttatttttgctattcacgagatggaatctcttatgaaaaagaatttagctaaagacccaaaatttttaaatttattatctactgtatctagtgaatttaattctggttatgatgactttgtcactttaaggagtttagataataaacccaagtaaaatagatttttaataattctatatacgtttcctattggcataaatttaaagatataaaaaagtctatccaccggaaagaataaaatataataagtatcttatgcgtcaatttactaacgtaatgtcaaaaacatgtctaaaatgtaataaatcatttaatgaaagtgatgttgaagatgaaacatcactaaaatatccatcttgtcctgattgttggaaggaatggacaacctatgcagtcatggttatgaatgagatgagactagatatgtccctccccgaacatagaaaagctttaagaaaatacgagaaaggattttttgataatacaataggagaaatagaaaaaaaaccagaaaataaatgactatattaaagtcgaattattcatcaaacacttctatcaaattatgaggaagaactctcaggattaaatttgggttcggggtatttaggactgattcaaaaaagcagtcaagtagttttatttttttgtggatgggtaacctatccagtacactagtcagtgatgccacaagatcctgcttcaacgaatcgatcaaagatggattcaaagatatttcaattatatacgaatagaatatagtactaatttcactacttttcatgtcggccaatgaattcaaccaagaatcgaatatattcagcaaagcctgatttccaatttttccgtaattaacaaaaatattttgaataatttcccttttttctgcagtatcaaaggttaagaattcgttcaatcgacttttaatgatgggtgatcgaagaccagatggcaaattcgacaaaataatcaaaatgttttctacaaatgatgatgcaggattatccgtatccacaagagtctgaaaaaattaacaatatttttttctttccaattcccaaaacatttattcttcaagactgaaatatcacaccaactatggtaatcatgcataaattttcgctccaacccctgaaagatccttgacttcaatctcttgcagagagagaacataaaaactactaagattaaataatctatgttttttaataatataccgtatgccttgtatagttactgttggtggattttatggagatgaaggaaagggaaagatagttgcttatctttctataaaagataattatgatatagcagccagagggggtgcgggccctaatgcgggtcatacttttgttcaaaacaataaagagtttaaagttagaatgttacctagtgcagtattaaacaaagatacgagacttttaattggtgcaggtgtcctcatagaaccaaatatattattgaaagagatagaaacattcgatactaccgataggacctttgtagattttcaatgtggcattatagaaaagatacaccaggaaaaggataaaaataatgatcatcttaaaagattgattggtactactggaacagggactggccctgcaaatgcagaccgagcgttgagaactctaaaacttgcaaaggatattccagaaattgctttgtttttagaagatgttagtaattccattaaccattcgatagataacaaagaaaaggtactaattgaagggacgcagggtacatttttgtcactctttcacggtacgtacccttttgtaacttcaaaagatgtatcagcttcagccatttgttctgatgttggagttggtccaaaaaaggtagacgaagttttgattgtttttaaatcatatgttactagagtaggtgagggaccattaaattctgaaataaatgctgaacaggcaaaagagagaaattggttagaatatggaagcgtaactgggagacaaagaagatctgccccatttgattttgacttggcaaaaaaagctattcaaattaatggcgcaacacaagtggcgctaacaaaactagacatcgttttccccgaatccaaaggcattacagatttttctaagttatctgcagaagctaaagaatttgttggtaatattgaatcagagacaggattgccagtgactatcattggaacgggtgcagagataatggacacaatagatagaagaaacaacaaataatcctcaagcatcgaaagtaaatttttttaaagtacaagtcatcttgaatattaaatgcaagagtagcccattattgatttgatagagtgatggaatttgtcaatctccgttgaattgtcgttccttatttttgtaaatgtacaaaaagattcctctattttataatatctacggatagtagcactctaacatagccattaaaaaatagattttaaattacatccacatcatgcggatggctctctttgtaaccggcgagagtaattttaataaattctgcattttcctgcatttcgccgattgtattggcaccacaataacttagtcccgatctaactcctccaacaagtggtctgataacatcaatcacactgcctttataaggtaccatagcttcaacaccttctggaacatagtcatctaaatcctcattatcggaactggagtcagggttttctctgtatcttcgacctaaagcagcataaaaagatgccatgcctctatacattttatattttttaccattttttactagcgttttaccagggctttcatcagttcctccaaacatgcttcctatcatgaccgatgacgagccagcagctaaagctttagtcatatcaccagaagttctagttccaccatcggaaataattgggacatcatatttctttcccatttttacgctgtcaataattgcagttaactgaggaacaccagaacctgtgacaattctagtgatgcaaatcgaaccagacccaacccctaccttaactgcatcgacacctgcttttatcaaatcttcagtaccccttcctgttgcaatatttccagctataagttcacaagaaggaaatgcttttttgatcaattttacagtgtttatcgcgttgtcactatgtccgtgtgcgatatccacaactataacgtctgctccattgtttagcaatgattcagttctttcaagataatcgccctttactcctaccgcggccccaacaagcaatcttcctttcttatcttttgaagcattgggatattcctccatttttaagatatctttaccagtaataagtccgttaatctcgccgttttcatttataactggtaatttctcaatcttattcctatgaagaatttctttggcttgttctatagtggtaccaactttggcggaaacaacatctctagtcatcaaatcagacacaagcacatttaggtttctttcaaaaacagtatctctgcgtgtcaatattccacagagtttattattggaatcctttactaacaatccagatattccattctcggacatcattgagttagcgtcctttatagttttattaagatcaatggtatagggttgttcaataattacagattcactacgtttaacctttaaaacttgttctacttgatcttgaatagtcatgaatctatgtattattccgattcccccttctcttgcaagtgctatagccattcgagactcggtgatcgaatccatgttggcacttataatcgggatattaagactaacatttgatgaaagtcttgtttttagactggtttgtgatcgagatacgataggtgatttcttaggcaccaatagaacgtcatcaaaggtgaggccttctttgaagtacaatattaccttaatccatatcatgtcgtaggattataagcgttttcattctgaatgtatttgactaatctattttagttaaatataaatctggcatataaaaaaatttttttatttcatgataaatgaaaaattggtagtaggtaagagtatacctagctaataacactacccagtggcattgaactgtgtttgaaatggtggtattgatgaggatgtattagagcctgacgaggatgatgcggacgccccagtgggaatatttatgaatggaatagcgcctaaagtattaccaccacctgatgctgcaccaccacctcctccgatgcttcctgttactaacggaagcttaccatcccatttttgagcttgtagccaattaagataggttgtactattattaagttgagtttcaatagtttgtattgctgcagactctccttgagctctcaatatgttagcttgacgttgaccttcagcagaggcgatatttgctttttgttcacccaatgcacgtgcttcagtttgttgagcttctatttgaattcttcgtaattcattttgagcctgaagtgcacgctgttcggcttggactttagcttctactgcttgaacgaattgatctgaaaactggaagtcagtgatagatatcgtgtccataacaatattgtaaggagtcaatctagcctctatttgttcctctatttcagattttacctgatctcttttagtgatcaattcttctgcattatatctagcagttacttgctttacggattcctgaattgttggcactattaccctgttagaataatcaaggcctatctccttgtacaaaattggaacggtatccggattaattcgataattcaacgcgacttcggtcgccacattttgaagatcctttgaagctgaagtggtactttcaacaatcttttgagttctgacttccataggtactattgaatccctaaacggtaatacaaaatgcaagccttcacttagggagatagaggtatcaactgcaccgaattttagtaatacaccgcgattaccagcctcaactatctttaaactagaggtcagtatcacaaaaataataataacagcaattattgcaggaatagctatttttaatggactagaaaaaccaaatccacccccaccgcctacatcttccagtggttcaccatctggagtaattcgcctatttcgttttgatttaaaaaaatctaccatgtttatattaacttacaaatatacgtgatttaaatatttataaattcaaattctctgaactaaaatttaccaaaatgctctaggaattctttggaaaaattagcagtttctgacagatttgaagcctctttcatattactgttttttatccatacgatgtttccatccaaatccactaatatctgtttagatcgttcaagatattttaaaatcgcattaatcttgtccaaagatagagttgcggtcagcagcttcctcagatctcttaactttggaaatggctttacatcctttattgtatcaataaaataatcaacttcctcttcagtatatacattaagtgcatccaacctcctcttcttaggaatttttttctttttaatatgtgaattttagatccctagtttataaaagtttcttactgatactagaactttcatgtgtgagtataatatatggcagcacgtcatagtatacgagctatcttaacttatagacgggacaagttgaattaacaaattaaagaaagaaatattttaaacacacatcatttcaagcaattcgtttgtctgttagcgattacagttccaaaaaaataactataatagaaatattagactccaacttattcaaaatgcccataatgaaaaaaaggggatgaaattgcccatttagatgttgaaggaagagagtataatttgggtccaaaagaataataagactagacaaactaattcccatccttaaaaaaatcaaactgaactttgttaatgaactatagtaatttccgtatacagagatgctactacctcaaatcgctatggaaatggaagaactatatcaatttttaaatacgaaatatctacaatccccttattaacaggggatgaaattccactcaatttgtttgcaccatctccactgcacaaatttaagaaatcacatttattatcaaaagtttggttgctgtctaactttttagtataataatccgatactataggagattcagaatatgtagagttagagaaagacccatttagaattaaaactaaaaataaggatgatgtaaatattaccaataatgtaactttcttagataggatcatcttaacttgtaatttatttcaatgtaaattataattgcattccttcatatagtgcagttattttgattctaatggatatactagaaaaaatgatataaaaaatgacaaagtaatatgaataagactattgtcataatatatctatctaaaaaacttgatttcatatgcttgagcgtgataagagtaggcatggttagaaaaataggcgataaagtaattctaattgatcaaaaataccttaatcaaaaccaagaccatttctatcaatcgcttattgataggtcaaaaattttgagattcaccactaataataaccaaattctcataatattggatcataaaactcattagaaggaatttttagattaacgatataataaataacttttatctaatgattgatttttaatgaatgttttttaagaagtgctcttttgttagtacgcacacatgcacaaaacctcatattcaacaaagataatgaacttaaaagagtttaagaatcgtcaacaagtaaaattgaattggtataatgacatcggttaatttgtacacttaagtatcaaaccaatatttatcagctaaaaaagtgacaaacaaatctcagtattactataattaggaaagattaaatgtttgtaatgaaatactaatatggacaaggacaagagtagaaagtggtcgctatctcagattggaagaggtggataatatacaatctaataggtgatggagtacataacgttctctttgaagatcagatcagaaaactttctggtcgacattttgaggaaaatttgattattgcactaaataatcttgtggatagtggcttgctgctaaagttggaaacaaataaaaagagaaaatttattgttaactatgagaaactgattgatgcacaaaagattttaaacgataataggaattggaaattaagtaaaatttcgagaattgaagacgaaaaaggaccatataactcaaataatataaatcaattttatgccgagccagaagggtatagtttctggtttaatttagaagatagtcctcgaaaaagaagaagtgtgtataatatttatcatcgaaaaacagatgatctggaattcgcggctcaaattttaactcaaaaatactctaaagtattatatttgggatcacttcgacaaaatcgatcaattatatcacggctgtggagggcttgtctaaatctgtcaaatgagaaggtaagaggcaatggagagtttattttacaggacttgcaagataaggagagaaaggcttgtggcaataatagacagcgtggaaaaatagccttagttatattcaaaaaattggaatatcttgaagagcatggaaaaaaaggtaattctacaatatttagaattacgggaagacacccacctttttccactttagacgatctaataacaaattgatactcaataatgtataacgcatcagtagattgtgaatagaagcgcaagcctattattaaatatcaaactaattttaactatggaaattctggatgaaaagatgctggcaaaacagatattcaaaaaatattcagtaaatcctagaaattggaatttcgtcatatctacgaattcgatccacgacggattttttgacgcaacagtgacaaactctgatgaatcttggcaaataaaaattgattctatctataaaccatccccaatcataacggggacaaaattagatattgatcctattaggataaagaaaaccttcgatgaagacgctatcccatttggatataggaagatagatccccctgtgtttatgaatatgtttagaaaaatttctgaagaacatgaagtattgtccaagaaaaatacggactacataaacagggaattgaatttgatgttgaattccgtggaaccaactgtgccaaaaaaaggtacagaatatctttatggacctttcctatacactagtaaaaacattattggaaagagcgcatatcacgacacagtatcagaaaaattgtcatccaatataaaaaagaagataaaagaaagatatccaggatatggataaagaaaattgaacgggaagatagatatcttaaaatttgaaagcaaaatattacaaaataatcctttagaggatccttataaaagggacataataatctacaccccccctaattactcgacgggtctatcatctggatatccagccatttttttgttaccctcttttggcaatgacaattattcgtctattacttgcaatcctttttccccacccatccatatgaggttggaaaaattaatcgcagatcacaaatgtggtgaaatgatcatagtaatgataaattgctttaacaggttgggagggagccaatacatcaattccgtggcagtgggcaggtatcaagattatatcatagatgaaattattcctttcatagatttaaattataatatttcaaaaagagctattttggggaaatcttcgggcggctttggagctctttctttaggtatgcgaaatccaggaatttttaacgccgtagctgcacattcatttgattcggcttttgaatattgttatcttccagattttccgatcgcaattgatgttttaagaaagtataaaggtgctaaaagatggctcattgatttttggaataagacaagcaatcacgataaaaaggactttacaacgttaagtattatatcaatggctgcacattattctccaaacctgaataatccagacttatacttagatttaccatttgatatagagtcaggagaattcaaagagaatatatggaaattatggagagaatttgaccccatcaataaagtaaatgatttttcagacaatctgaaaaatatgaaactcctgtatttcgattgtggaattaacgatgaatttaatttgatcataggatcaagaatatttagtaaaagatgtaaagatctgggtataagacacgaatatatggagtttgaaggtggacattttaacacaggttataggtatgatacatctttacaacaaatatggaatgctattggctaaataatgattcaacatgattagaaggtcagaacctttaaagggctaaatctgtttcaactcaagagttatagaggtctagacgaaaattgggaaacggtgtactgtccactcaaaggatgaaaacttacaagtcttgaaataaaatagctcacctctatggtaccatagtcttaaacgttttcaaatgataatatatgaatcattttttttataaggtcatattagctgtcggcttattagacattattgtttatagtgtaaaaagcaagatttcgagaagcatggtcagaattattatataatggtgagccaatcacgtttattctgattattacctctaactatattttcaaaatgctgctggattttttttgtaactggtccaatacccccattacctattactctgtgatcaacgaatcctaccggaacaatttcggatgctgttccggtcaaaaatatttcatcgaagtaatagagttcatctctagaaacgttttcacagcaaaggtcaataccgttctgccttgcgatttcaataacagtatctcgggttatcccttcgagagcccctgtggaaattggaggagtgtacaatacttcatcctttacaaagaaaacattttccgcacttgcctctacaacaaacccgttagaatttaacattatcgcttcatcgaaaccggatttcaaggcttccattcttgctaatgcagaattggcataatttgccactccttttgcatgagtaggcatcgactttattcctaccttttcccaagaagataccataatatgaatcccctgcttcatatcttcttttctgatatgttcagtccatttccatgcagatattgctatagataccttattaggcaaagggttaactcccaacttaccataaccgtaaaatgcgatgatcctgacataacattcgtccaatccatttgccttaactacttttactgtagcccttttgagttcatcaaaagaatattcgaacttcataaagtaagcttttccgctattaaacaatcgttttatgtgatcgtctaatcggaatattgcaataccttctacagtggcataagagcgaattccctcaaatatcccggtcccatagtgtaatccatgagttaatacatgcacctttgcttcattataatcaactaaatcaccatcaatccaaattttatcactttctatcaaaacagcacaccagaatagtgtaactaatttataatcgagccttttgagtgtattgatctaatgacttcttcaacattttgatcttttaccagaatgagaattcttgaagtctcttcttgtgcatcaatgttcaatatattaatgtcttgctgactgacaatactactagtgttagaaactattttaggaattttccacatggaatcaccaataagagtaaccactcctcttccatacaccatttcaactttagaataaaatgagcggaataccttttcgtgtctttttacatagtcgccatccaaaaataggaatcttgttatttccaaattatcttttttataaggagataatttaataaaatcatgatattgtctttgcttctcaaataaagcggcaatatgagatgcagctatggattccattctgacgatagcacagttttttttaccagtaacaatctttattttaggttccgcttcgtctttctcatctgataaatgtttaagtattcgtgtacaattagaagggtttgaaatattagtaactaatatgattaaatttaagtcatgatcatctatatctttaattgcaattggatccaaaattttcataccaaacatgcctgcaagttttgcttcgttgtaagacagcgttttcacgttgtgaagatttttggaaactattttagggtctgcacttaacacggaattgtccttttcaaagtcaagaataacattaaactgtgatgacaataatatccccaaatccgctgctgatctgtcagatcctcctctttcataagtggtctctaggccatctactgtttttccaataaaacccccgatgcatacaacatcattctctttaactaacttgattagtgaattcatctgatttttagattcatctagtaagaaactagctgcttcaaaattgtcatctgtaactattggccattcatttacgttcacacttgatgatttaatgccgttacttcgcaggatataacccatcagagatgaaatcaccatttctccgctataagcaagaattcttgaacgacttacatcaacgaaccggcgattttcggcaacttgcttgagagatattaaaacaattttgttaaatctctctagctcagattcaaaatcgactctagcagcttttgatagatatctatttgaaatttccaaatatacagtttttagtatatcgatatctaccggattagatgaagcataattttttgaaatccggatagcaacatcggtcatagacatattttttccttcataatttgtaagaggagcagaaaacacgcaaataaccttagatttctttcttagttctcttatcctatcaattatgatagggatcttagcaccatttatccctaaagcagatccgccgaattttgcaattactaatggctccaataccaaaaataatacaatgtcttgttattatttattcagatacccgttaatcagggtcgcagcaagggcaactccgtttgaggccctcctttctttttttagacggctgcctgaaagattttcttctataattgtatctagtttcttgatatcctcataggaaaatcccatttctctggccctatcctcttgttcaaaatgattcttaatgggaataaaaataccaggagtaccgtagaccaagctttcatcgatagtagattttcctgctaacgatataaccaggtcggcggcgcacacatattcatgaatattgtttacaaaaccaatactcctatagaatttatcgcctccattattagctgaattactagatgaaaaagatactaccaaatcgcaatcaaaccgtttgcgtagtctaataaaagattcgacagtcctttttattaaatagaatccggctgatgtgcctccaatagtaaccaaaattgttttcttattaaaagataatcttttccgcaactcatctctagttgtttttatctctctaactattggacccacataaaataaattgtctcgattatctccagattcaggaatgataacacaatcgctggaccttatcaacttgcacatcgaattatttagaaaattttcaatattagacagtaccccttttcttatgaaatgagttctaagtatatcggtgataaggattctagggatattcagatcctttccaacagataaagatgcaaaatcttcgtcagttataattagagaggtttcccaatttttgttttcggtagataacaatttctttatttttatttttgatttttgaaagtaggacacatattttagtaaccaaataaaactgttatttagtttcccgtcttctattgaaaattctggaggataatacagattataggcgttgaaattggatacttccgaggaatcattctcattacaaacaaaatcaaaagcttttgaacctgtaatgaaatcgaaatcataataattaaatgactgggccatttcctttgcgattgcaatatcccttgttatatgtccaagtccaattgggcttgaaaagaataaggtcatgtagatcgatccatagttataagataggaataataaaaccaatggggacagaatcaacacataactattttacaattgtcttatgaaatgtttctttccagcgttactaaagcaatatatatttagtcaaaggagtttctaatggtttttccttttaaacaattgatgattttcacaaaaatttatcatttaacatggatttcctaattgactcgtttgaggagccttcaaatactagaacttgtggttctaaggacaaccttccattttttgaatgtagtaacccgattctttgatatcttttgctactaccggtggagcctcttgaatatgacaaaattgacattcctcttgggtcattttctgccctccttgatccacactgtcaagatactcctttccgaattcgattgctttctcgtgaggagtacttgcttctacaattacatcaaaatgcattattcttccatctttttttgtaacatatgtatcatatactgcacattccataccttattttaggacagacattatatttattttattacattgttatctgatatgaaatttagattttacttcttgattagttaaaattcaatccgatataagggaataagaataagtggctttattcactaacaatataaccctatccaaagatgagaaaaactgaaaagggaactaaaccatattattcttgttgagtgtgagtggggataacacctacttcgggaatactcaacctatagatcagtggttctttgtgatagttttcatcatcttggaaatgaccatgattaagtcctgcacatggagttgtatatgggatactcgaattaagcaaagcagaaattacttcctcagaagtagcatttggtttaaaacttttgtacaacgcggcttgtcctgcaacgacaggagccgccatactagtaccgctatcaaatgcatatccatcacctctatatgtagaaaatacgtttacacctggagctgcgaaatcaatactatttccataattactgaaggtagcagcatagtcatcaggacctccgatagtaccattgcccttacctccacattccccatcactatcagatattgcagaaactgcaattactccaggaattcttgctggagaagttagtgaggtgttaatattactgtttcctgcggcgaccacatatatcaggccctttgagagggattcagttatagtcttatccaatttgtctgagggcggattctcaatacttaaattaactatgtctatctcgtcagcatgttcgttaacgtattgtagaccttttatttgagaagatagaggacagttaccgttaacatcgcacaccttgatggcccaaagtttagccccaggtgcaacgccaagtatacccattgaattgtccttcgcagcggctattccggcaatatgtgatccatggcccagatcatcatcaccggttaagacgccatctataaaagaaacattattgtagacattcagatcgggatggtcaagacttactccagtatctaaaattgcaatatctacgtttgaaaaatctagctcgcgggattgactggaagaggtaacttgtaaattttcacttgtcatatttagcacatttgcattaattctttcaagactatcagggacggtttgattattgtatatagcagaggcaatcctcccgtttaagtcttgattgattgcaaaaatcctcggatctttactgagtttgctcagtaaatccctctcactaagttgtccgctattattcgtattgattacaaaaccaggtgggttttcaaatacaaattttatttcaccatttaggacataatcttgtgatactagctctgaattcgtagtaacgctttcatttaaccatataataaattgtgaacgtataggttcgtataccagattaggaacaaaggccctgtcaaacacgtagatagtgggaaatgaaaagttctcatttatggagatatcaaatttcttgtaattatcagcattctcttgatcaaggatttctacggtataccaagaataatctagtccagctagtgataccactgaattattagaatcacaatcgaaaaaatcattatttacaaaatataacgaatcttcatgagtgtatggatttggagttattttatatacttgagaaaaatcttgatccgtaataattgttaatgaacctcctgtaaaagtgctcgcgggatcagtatcacaattcttcacaatggtttgaaactcctgtggattaggagtttcaggttcaggtggggtattaggagtttcaggttcaggtggggtattaggagtttcaggttcaggtggggtattaggagtttcaggttcaggtggggtactaggagtttcaggttcaggtggggtattaggagtttcaggttcaggtggggtattaggagtttcaggttcaggtggggtactaggagtttcaggttcaggtggggtactaggagtttcaggttcaggtggggtactaggagtaacagacacagttacagaatcaggatcgctggttgtggtgtcactacttactactaattggaaggtaagtcttgtctcttcttctacttgaggagatgttaatgttggatttgcagatgtcggattattgaggatcacagctggaccaccagtctgtgtccaatcgaagtttagagatggactaacatcatcaccataattattaggattatagctattgctaccatccaattgagtcagcacattgctttgtacagctatatctgtcccagcatctgcaataggttttagaatggtagtagatggagtaacagacacagttacagaatcaggatcgctggttgtggtgtcactacttactactaattggaaggtaagtcttgtctcttcttctacttgaggagatgttaatgttggatttgcagatgtcggattattgaggatcacagctggaccaccagtctgtgtccaatcgaagtttagagatggactaacatcatcaccataattattaggattatagctattgctaccatccaattgagtcagcacattgctttgtacagctatatctgtcccagcatctgcaataggagaattaatttctgcatcggagcccgtggatgaattagagttggagttgtcgccttcgtcaccatctgtttcacgtataatatctgcatcggaggccgtggatgaattagagttggagttgtcgccttcgtcaccatctgtttcggaaattctcgttgtaccaaatgccagtgaaacttcgagacccccagttggtttgaatggaatgtgaagataaaaataaaatgcattgcttacagaaaaggtaaggataaaaaatacagcaataatgaattttctatcgagcatgtatgttttcaccactgtacaaattctgcatctgaaaaactactctttcactatctaatcacaagagaggcatatgacgtctatcgctatcaatcgaccctggaaaagaagtaatagtgccattttggttgttatgagtggagttagaatttgtcagagtggagttagaatttgtcagagtggagttagaatttgtcagagtggagttagaatttgtcagagtggagttagaatttgtcagagtggagttagaatttgtcagagtggagttagaatttgtcagagtggagttagaatttgtcagagtggagttagaatccaaactagcataagtatttgataaggttaacggaaatagagataggattaagattatgctgatcgaaaacaggataaagatagtagatctatttgattttatgtagttttttattgtcatattaactcttcatattataaatagataaattttatcttgcccgtattatattcttagggtctaaaattctaaaagtataagaataatagaaattatttaaaagattatgaaaaattattttgaaggatattattgcagagatgaccttcatttacaagtaattaataaggatagtaatcggaaaattctaaatgctctaagggaagcataccccataggtctatcggtagaggaattaagcggagttactaaattgcctataaagactgtgtatgctcaaaaggccgaactttatagagaatattatataaatcacgttgaggaagaaaagaaaaatcaaagaggcagaccatcgaaaagacaagatccattcatttttcgaaaaagggcaagactagtaattgaagagctatttggggttcacgatatctatgagggtaataaaccagttccactgcctcccggacacacaatatattctgagggatttgcagaaactctaagtaagctaactttgaaagaggagaagaatgaattatttattactctattagattatgcaagaaaagtactatctagagcatataataacgaggagattaaagagaaatgggcgcccagcaatgagggaaattattgctgtacccaatgcggattgaaccacgaagcgcgggatttttttagagcaatatttttgaacttgatcgatgaatttgaacagagtaagcatttcatggattttctcaagagtcaaaacatggttacccagaattcctatgagaaaatagagtcgatgataaaataaactacgtaaactttacctcaaatgaatagtaagatgatcaacatcttttactaatttagtgacatttagaattaagaagcaagatccctgtaaatactattcttatttagatttatgaatattttgatctaacagggtacaaatggacgcattcctaacactcattgctaaaaaaaatatctttataacattctaaaaaatgaatttatcagtattttaagaacacacctatatttaaccgtctgtacaccttctttatttgtgctaaaacggcagaaaagaacaaggatctatcacattggatcatagagaaaattactcatgttgctctttgagaattccaaagtgtatgaataaagattatctactaaaagttttacatgttagtaatatttgacgaaaacaaatagaggatagtatcttaaatgagaatacatttaatttaagctattgatttcgagaagagtcaacgtggatttaatatcatcaagtcgtcttataagaaggacttttctttgtaaatcctccttgtcattggcgttaaccttaactataatgtcgtaaaccccataaacgcgatatgccttatccacatattcaagatctttaatttgttccattacctttgtctcacttccaagagtacaattgatcagaacaaaggcattatgcttcatagagtatccaccttagatattaaataaaactgttgtccttttgacaaaataatttattttctccgtgcagttattgtatgcgtgtgatctacataccatctaatactatccttaaaactagaccaccaatccataaaaccatcgctgctttctgattcgaagagcaaaaatccattatattcagtaccccatgcgtggctgtattcacccatcaattcaattccttgtggcaaactctttttcatttctctccattgttcgttagcttttttagcttcttctggagtcatagttttaaatctatagaaaactagaaaggtagcactcataattttatttataaggattacattttaagttttactaatttgaatttattttatcattgaaatttcagagattaattgctaaatcctccatttcatcgattggagtcaaggcgaatcatattgaaaccaaagttagatttatcagggcttatttactcgaagatcaaaaaataatatcgacccctaaatgaacccagtcatcaaaccatcaagatattcgtaaaatcgcaattaatcttagaatagatgtttctttagaatgagtcattatttaattgaaattacgataagaagatattagatgaaagaagtagttacaaatcattaattccaaatttgaagtaacacgaattgcatttgaatttttcttttccaggactgctcgatatcacatctaattgaccttttgttctacagtttgggcatttcccataaatggtttttttcgtaatttaaagaattataaaatccaatattaagtttttttaattctctaaacgtataggagagtcactgtttatattgaagtatcaattaatctttgatattaatttgaattcaaatacaaaaagaccaattggcgttacaatcatagccatactaaccatcataggcggtattgcacttttaattggtggattaggttttatagcttttggaggcttattgtctacagtatcatccgaaggaggttcgaccgaagcagcagatattgctgctctgggcatggtaccaatgatattaggaataggtatggtcataatcggaattatatatctgatagtttcatatggattgctgaaaggcaaaggatgggcctggacaattacaattatagtcatgattatcggcatagtgattcagattatatctgcaatcagtacaggattacttacatcatcacttgcttccgcgcttgcaactcatataataggaattatcatcagtggaataattatattctatctatataggccacatgtgagagcttattttaagggataattttttttcaactcggtccctgaataactcaattggcatccatgtgatgttcaattgagaaaccgacttatgttatttccaaaaaaagtaattatccgaactttcataattacgaaaagacatttcttatgcctaaaaggaaatccaaagtacatgttattatgcgttaaacaaggatagttaagttttaaaaattcagaatgagatatttaatttacagtataaactcaataatattctgagatggttcgagatcctcacttggtcttctggttggtaacaaagcataatcagcatttatcatcattttcaagacctcaaatgcttccatatgcgttaaattcggatcaagtctggtttgaaatgcccgatactcggccaaaccccgcaccgaattagaactgagaaacaattttgatttttgagaaccatacagctcaattaatctaattttttctaaaataacatcagagatgtcactgaacaaaacaggtaaaaaattttttgtagatggattttcatatccgagtatatttggagtaaatcttgccgcctcaattgttgcctctgatactgcccgatgatcatgatgattatcctttagtgggtgtgtatatacaacatcggcctgtgtctttctgataaaaaattcaattgaattaattaactctttggtcaaatagacggcagtatcctcatagttatctatccataatgctttagcgcccatatatttggcagaatttatgatttcgttcgagcgtttaactaccgagccagcactcgacccccgggttactatatacatgaaaacgttcacgccatttctggcagcctttagtagcgatccgccgcatccaagttcaatgtcatcaggatgtgcaccaatagccaaaatattcattcttttattattcaatactttaactctgggttgtatcaaatatcttgctaataaatattaccagacaagttgtacatattgaattgaaaagattcatcaagatgtagtgaaagtaaaccacgaatttgacaaattagactttacaggtcgggtaaaatatttatttttaggatgagtttaacacgagatttgactaactatcactaaaatttctgtatactggtttctgagaatgccaagatgatagttaaattagagaacaatttctatgttctatggataaaaggcaattaacggatattgtatttgaatcaaacgattcgaaaggttcatcccaaaattggtagcttaggattaagatttaattttgctgacatattaggaaaaacgtattatttagttaacaaaaattgattagcggttacttccaaattattttataatgtatgatgtttttcgttatgtatgcctttaatggagaagatttcttacagaaaaaatcagtcaggtattcattaaaaggtcaaaaaataatgatccgactttttgttattatcctgacgacattgcaatagaatattttgaaatcaggcgcaagagtcacattatgtaacaactctatccgatactcagttgatccaaagcatggtaagcagctactaattgtttccaatccaagattagaatttgtccaaatactaagtgaaatgataaaagataagggggatgacatcagcatttgcccgctcgcgtttattcactcttctgcatcgataggacatgattgtgctataggagaatattcaattattgggaaaaaaattgagtctagagcactgcagtataggtgataattgtattattcaatgaagttccacagcaggtgaggatggatttgtatattagagagctaactcggaaattagttcattttcctcatttaggaaaagtcatgattggaaatgatgtagacataggagcatattgttccattgcaagaggttctatgtcaaatacaattattgaaagggatcaaaattagatgcattagttcaaattgcacacgatgtctcgattggaagcaattgtgaacttatggcaggaacaatcagagttagttatttcgttggcaactattcatggctaggattgaactccatattaaaaggcaataacacaattggagatcatgtaattgtcgatgtaggggcaatactcatttcaaatgttcctgatgatgatatagtaacacgcgtcccagcaaaatcaattaaacatgaggtaaaggcaaatgtgaaattcttaatggcaggcagagaaatgaggaatctaataattcgaagttggaataacacaaaacagtctagtcgtattcgataccaataactcctttaatgagtatcaatcttgtatatcaataatattaatttcatgaataagctgactagctataaaaactaaatcgattaagaacctcacatgaatagtaaagtatatcaaataccgcatacattctataattcgtcactttttatcgtaaataattaaccaacaccctattctataaatttgataaaaataacacatgagtatcaacttctttattccgacttcaagatctggttaatccagaattaatttttgatctttaaattctgcttcagatgagcggttcgtaaaatttttgtttatattagatgagatagtaaaacaaatatcaaatactcaaataattacatttaaccgacgattattgtaatttcaataacaacatcgtgtgttcatattctggtttatccgagccatcattcatgtcacatgtaaaacttgttcagtcataggattttaaagggtttatgcagcctatccattcatgctacattctttattagttttcaacttgcaattcctatcatgtctccagcttccattataaaaaacttgcaaatgcaaagaactatccgtacttttttgaatgcgagtggttccgttttcagggttgccttctgcatttctattgttgataggctctaaaaattttctcatagcatctttgcaattttgtccaataaatattatttgataaaagattaggtagttcgtcatttgagattttgaaaacgtttcaactcttaaactttaagtctcttaaattcattacacctctttacaggtcaataattacttcgtagacatctagtctattgatattggtcatggagcctgtgaaaaaaaattaaatctttaaatctatttaattgattattgtctatttttaaactaaaattttgatcgttgattcaaaatacactagcaagtttcaatttttttattaaatgtagtttgaataaataaatcaaaatactttttaactatttatgagaataatatacttgccctatcatcatatagcaatgcaaatgcctacctagattataagatgaaggcatatatgtagacaaagaattaccggaatatactacttttaaagatctcaccgaggtcattaattgcacgctttgtaattctctcagcaatgtatttgattttataagcgatcacttatttgaaattctattgtgtagtatgatcgcaccaccaaagctattgaaggaatttttttcttagattttccgaagtactttacatgattgcaatttcaccttctgacgatcccaagttggcttatactgcagcaaaccttcatgtaagggactttatctcgacgaagaatccaaattatgaataccaattggcattatgatattatattcagtcacagtttggtacaaaagaagttaggaacaatttagaagatctacgatatggctatgggataaatggcacaattataaaaacagttaagtcatatagaaaataaaacaaattatacactccgtttaaatcaaatgataaaagctctaacgggtataaccaaaaggtgataaaaataatagctagagaaagttaaaggacagttttaatcatgtattgcctatcttctgattataattcatttttcataatctctaggattttttcggcaacattttcaccataaggattcttgaatacttttgccccaatcatcatattgattacctcatgtaagctatcttccctatctggtggaaataagatatttgactttagtaaaatagtttcccatcttgcagatgtatgccttagggtaatgcagggcttttttattgtaattgcttcttcttgaattcctcctgaatctgtcaatattaattttgattttaacattaaagaaaggaaattcatatatcctagtggatctatcagtgttacgtttgatggaacagcgatattgaagttttgtaaatttttctttgttctaggatgaacagggaatatgacaggatgattagtagaggcaatatggttcatcagtaatctaagattttgaggattatctacattttctggtctatgtaatgtcaataaaagaaattctttcggaatagattcaggaagttctctcgatatcgcaatttttgacaaatctttgcatacatctactatcaaatttccggtagtgaatatcttaccgcttatattttcatatgataaaacagtggtacaaaagctagaaggagaaaaaagatatctggacatttcatctatttggatcctgagtggttcctccggaacatgcatgtcaaaatctctaactccagcttcgacatgtattatcttactattaatctcattagctgctaatgcagcggccatactagagttagtatccccgtatataactacataatctggcctaatactttttaatacgggtaacattttcatttttatagtggtgatgtcagacgaatttgattgaagatcgtagtccggtttgacttttaattcatcaatgaaaatgtcactcatattgggtgaaaaatgttgcccagtgtaaataaatttgtgatcaaagttattatttaatagggggattaaatatgctagtttgattatttcaggtctagtccctgcaacagtaactaatttcactttaatgataggtaaaaagatgcataaaaatttatctttattagaattttagggtatatgcccttgacagttctgttgatgaaaatattttttatcgagtatttttgaatatttgatgtctttggtccgttctgtattatatccacaagtgattttcaattaaatggaggattctcaagtaatagagcgaacttctgaatcataatgatctatctttgaataaatgtattaattatcttatcgtcgggataataatcggatttatctgattgttcaaataaaatttaaatattagaactacgttattatatctaatcatatttgaagatattcaaatatgattagtaggtatttcacccccatcgagaagttattcgaatttaacttctcttgggtacgatatacaaattttgtaaatgctaagagaaatttaatgcccattatgataagaatattgacgatttcatttacactatgagacagataaaaccacgaccaatgatacgatacaaaagttgaagttaattggacaacatattactttataggttaatctacagaatgtccgacaacagagttatctttcatatctatacagcaagggcatttttgtttaacacagagatttgtaacttcatgtttgcagataggacacaagcatttttgaactttgatttcgcccaatttttttttcctgtctgtttttaaaattaagtatatccaaattatgaagagaaatagtgcgacagcaaagaaaacaaatgaaactctcacatttgctctcagtgccactagcaggatcccaaacagcacaaatcctattccactccaaaaaggccaaatcggataatttttgttcagattgtaatatttgaaatctcagtcttttatttattcccttttagctaaaacattcaggaaggtagaatattcatgacgttattcactaatcactctttaattcaccaaaacatttagtagtttaaatattagaagatcaattttatgtcattgaataagatcgacggaaggataattcccttaaacttgctcttctttttggtaatattaatgagtacgaatcagaatagcgcagtttttggtcaagatgaccagtcaaacattaacaataatattttcgcaactgttcctaacaatatttctggaattacttgtgacaaggttgaacatctagtttatcataatcatacgaaattgatcataaacattcaaaatgaaagtcataatattcctgctggagtaggcatcatcccaaataattgtatattctggttgcatactcatgatgattcaggcataattcatattgaatcaccaatcgaaactgcattctcacttgatcagttcttgaaagtatgggataactttgataattcatctttcattgaaaatatttcaaaaaatcatctcatagcaaatgtttcgatgatttcagaaaacgggtcccaaagcaagtccaataattacaaaaatataattttggaaaataatgccatcattaccatagactttgctaataaatcaaaagattgattctaataataggaattggtcacctcatttttttagttataaatataagttcttcaataatctttgatatattttatgctatcattctcgtcgtcttctgttttttttaacttgatcacaatagttccacttactttattgaaaattctctgtcttcttttacttgagaaaataagtcctaatataatatcaataggcaataagaaagactttccaaaggcctctattgcagtgtttataatgtttggtttttctccaaacaaatttgtagtcttgatatgaacaaccctttttccaatagtttgtccagttaaaaattctaagactatccaataaataaaaaatatggagctggcaacaatatactcatgtggctgcttgatacctatggcgttttccccatcaatgtaaagtccccagaatggaaaagagtagtgagctaaaaagatgaaaaacaggatgtttattattattgatactataacaaagtcaatgagccaagctacgaatcgatcttcccattttgctaatacgatttccctcgaatatttcttttcagatttgtttgaggagatagaatctccgttcttgttatcactcatatatataaagcactattggtaaattataaaaagttatagatgtaaaatgagctcatgtgcattccaaacttatcgacaccattagcagtgaattaaatgagatttaccatcccttgcattcaaatgatgaaataatagtaacagtattacattaaggattcaaaaaatatcaactcgtaggttaatgtaacctaatccatattgaaaacagataagtaagagcaggcaaagatttaattagtcgacatctatatacttacaaattttaaatacaatataaccttacttgatgctaaaaaaataaattaaaaataagtatatctagttcaggattccagacctcaaatcgttcgattcagatatatcaaaataaagattttatcgcgtatatttgcgtcatcctctaatacttcgataactttgttacctttagatttcacagattagttgatgtaaataaaagaaagcagagagtccaattagactacctggaaaagaaactagagaactcattaatcaaattctcaacatctgcttctagttgattcagtagcttacttgaattagtatcgttcttaataagattcgtggcttggtctacaagtcctatggaagtatttttagcttgattaaaagcaccttttaatgcatcaggggcttggtctacaagtcctatggaagtatttttagcttgattaaaagcaccttttaatgcatcaggggcttggtctacaagtcctatggaagtatttttagcttgattaaaagcaccttttaatgcatcaggggcttggtctacatgtcctatggaagtatttttagcttgattaaaagtctcattacttatgaaattagtttcattattctgggcgtatgcaacgggggccagggtcaataaagggattaaaattaccgccaagaataaattattcattgatattttgaaaaaattcctctcattcaaatgtaattaattataaacatacaaatcattaaagttattgatagaaattaggagctacaaaggattctaatttgaaattaacccaggaaaattaaatgttgatatattaagaccgagtatataagtatgtggaactagggaataacaatgttattattgattccgaagaagaattctttagaaagtcctatgctttggagcttaaaaagaaaaaacagcaaataaatgatttccaaagaggatttaatcaattagaagaagaaaggcgacaagtgaaccaacaagcaattagaaccccaggtagacgaggggaagtaattaaaaaagaagaaattgaaaaagagttcacgagaagatataaagaacaaaataataattgaataaatcatcatttctttattttatttagtagatatgtaaaaagcgaatgctccattaacaacattaagtatagaaatagcaattttatcaaaattagatttgaatgttcattacataatagtgaaactaactaatttctaaggcaaattccttcaatgtaattacacagctctgtagagcagatgtacaaacaataaaattaaatctacaaattatctttcccagtccttttaattgcgcaagtataaaataatataggatatatataaaaacatgatttcacaagaggttagtagacaattacataatcatctaaaggatattcgaaataaggaattaagagatctaattgagaagccagtgttagttaaggaggacgtccctatatctaaaatcattggaataatgactaaagaaaaatcccatgaggtattcgttgaattatcagataaatcactattttgcctaaatactagagacattttggtggctagagatattaatacaatgaaatcttccacattaggaaagagaattccaagtcttacacagactgactctgttgggaacgctgctaggataatgagtcttcacagattacgagcgttacccattgttaatgaaaacagtcgtgaaattatagggcaggtatcgtcaaaaaaaatattacaatatattctcgaaacttttaataagaagaaaataaactttgacaaaagaattatcgcttctgacttgatgactcccgagcttatcacaattgaaccaagggataaagtggcgaccgccaggaacataatgataaaagacatgatagatcatctgccaatcgtcgaacagatgcaggaggaaaaaaatttggttagggggatagttacctcaaatgatataatgcatacattgattccatcagagagaattgctagagatgctattgtatcagaacatgataaacacagacttgaactcgaagtaattggtattgcagacagaaatgtaataacgattagtccaaatgaagcgatcaattcagtaattaatttgttgcttgattccaattcatcttacactttggtaaaatcactcgataccgtgctaggcataattacttttagagatattatttcactattaggagaacaagttgaaagcgaaattcctgcctatataataggcttacccgaagatccatttgaatctgagttggtaaaatcaaaatttactagtattgtaaaattaatgcataaaatatctccggagattatagaagcaagatgtaagatcaaaattaaagatgtcacaggggaacgcaaaagatacgaaatatccgcaaacattatctcaccttatagaagatatacatatacgtctaccaacgaatatgacattgcaagaatttttgatgaaatgagcgacagctttaagaaccagatttcccgcaaaaaatatggagaaaagcacaaagaatcagtaagatactcgccaaaggaataaggacctacattattatcataggagaaatcactcctatgagaacacctacagaggttagaatcattgtatctatatataatagaattcttgcataattagagcaccagactctagcctaattaagttattattactttattactcacggtttcgcacactattgactaatatgcaagaggactacaggtttgccagttgtatggtatttctgataatttatagatagtttgattgataatatatagtatttaattaaaacctgcattaagatacttatggagtagtttacatatactataactcttttaaaggctattactgatatcatgaatagattaatgaaagataaaatgactcgcggacgctagttttgaaactgactgatatctttcttatattcatccacacctctgcactgcggaagtagagcatagtcatacagtatggttagaagtagtagatttgtgtaattaaccaaaacagctttatttttgtatattatatgaaaatatgtcctttcctcttgttatcctactccaaattatccagaaaaccattgctgttcaaatcctttaccggtatttcggtaaaacagtttaatgccattttaaaataatagaatcaaaatatctaaaacatgaagtaaaacgcttgtcttccccaaaagacaacgtgatataggtgctgataggtagacgtttcaagattgtagtgaagaatagagctatcagggttttggtgctacaggctctacataacctataccctgatggggtacctctttggtttggatcagagtaacgtatgtagagacatagacaagattgaaagatagataagattttgtttgccaattccacagaaattacaccatgtaaccaaaaggctggagaccaccgaagaggtagaagagtatttccctggctttctggcttttatggattgtacagaacgacccataccaagacccaagaacaggttaagatgaaggttatactactctggctgtaagagaaagaaacacacggtaaagatctgtacactgcaaatcagaaggcgatgataatctacaaatccaaacacagacagataggtaggaatgcagtatgattacaagatctacaaagataattaccctgaattaccagagaatatagaaaggacgtatgatctgggattcttaggagtagaaaaagactatccggaacaaaatcatccttaccttttaaaaaggaaaaggactgcgaacttactgtacagcaaaaagagtacaacaaagaacattccaagagaaggatagcgatagaacatgtcatctgcaggataaaaagtatgaataatgaatgatatcttagaaacaagctcgaaagtacgatagaatatcagatatagtatcaggacgggtaaactatagaataatgaatcctgtttagaaccgtataatataagctagtggacagtattaattcattctaattacgcaagagtactgatatttaaaaaaccctcatcatgaatttagcaaacctaaatatttttaatgatagaaaataaaaattgctgaccctattcaaataggaaattaattgtatttgctcaaccaaccttaatggaagatgataccaggaaaatctttggcaggaaaatctttgggcctttaggtaatacgaatcattatggacgagaaattaaaaagagtcgcagatcgatgcaaataaccaaacgtaatagtcgtaaatcaacaaagcatgtagagaacgatcacaaaagagtaactactccccagattgcatctaaaaataccgagatattgtagacaccagttgctgtttcggcacggcgcccataaggccatctattgcttctccattcttaaatatgatcaaagtgggaatactttgaatcccgaaaatgtttgcgacagtaggattctcatcaacatttagtttgccaaataccgcttttcctcttaattcgatagccaattggtcaattataggcgataccaatttacaaggaccacaccaaggagcccagaaatccactactaaaagtgaatattttctagcagtttcgtcaaaattataatcagttaatgtaattgcaccactgacattcttatcgtgattattgcttgttggaagattattgtcaatttgttccttgtactttttcatctttttctccattatcttcgcaagatcctcgtcccaatttttcataatttagtttattttgggagaatcataataataaaggttcatcaattacttgattttctttttgtttcgtttagatatatagttattttcactccagattttatctttttgaatcaatcaattacagttaaaagaaacacaacagataatacatttttacatcagcttaatcctcaaagatttagtttaatatctttacctctgaaaattgacaactgcaccttatgctatattgtactaaaggaggttgattgtcgattctattggaaagtgatcgctatagccagtgagaatcgttcttcccggagacaactcttcaagatctccgtttggcttaattcgctgatattcaaatctcattggactctggccatatgaaggatgaattttgtttctgtctcggatatcgaaaaattcgtaagaaagattgcggtctaattgaatttttttgtttatacgaattttatttagatctattttcatatcttgttcgccattcagcaatccacgagagacgataaattgatcaaataaatcgtaccccccgtcatagaaaatagttccatctggtatgagtgaccacatgcaattaaaaagatatccctggtaaaatagataattgtgtttatcggtctgtttattagagggccatcttttttgaatcggatgctcgaatatttcatcccaattcattagctttcgcctatcgggcgtagcatgtaaatagctcaaaatacttcgattgtacggattgtcattaaaatcgcccataagtaaaatattcttattccatctttcatttaacagtgagagcgatttttcatcatacctcaaatcccaaggaagattctgcaattcactctggtttattttcagaatgtcttcaactgcacgtgcacaattttcagccacagcaattctaagaggttcagtttcgaatcgccccccagcacgtgaaggccaatgattaacaattatattgaaatctgcattatttgataaaacagtcaaatttactaccaaaatatctctcgttggatatcttagttgtgtgctataacccttaacggtattaagtctaaatagcttttttgagtatactaagcaggtgtcaattccacgaatgtcagggctattcagatactgtgcaattgaatagtctttttccgctcggagtttatcaatcaaattaagagctaatttttcactctcaatttcacacagaccgattatgtctggtccctggttatcatgtagagaatttattacatgagccagattttcaatttttttgttctttactacattattccatccccgatcgggagtaaactcaacagtagatcctattgatgtgggaagagtatcaaataagttgttaacattccaaaaactcacgtaaaattcattcatattagcctgatcaaattataggagttaatagttttttcatttttatgaattgatcaaccaaccttatttatagtaaccacttttttagaaaagacaaaataaatacagtgattcctggaaaggcagtcggaggtaaacacagttcatttttcaaatcaacagaattctaattaccatattaatcaacatacatcaagatgatagtaaaaaaggacgattagctttgtatgaagataaacacagtaatcgctatttgaatgacatttcagaatatattaaaacactaatacctttcgacctgtctttccaatttgaaaagtttctaaactacttaaaaaataaaaagctacatcgcaagatagaggatcgctacctcgtagattttcaaatatgtcggataagatttttatttctatacaggctctgcatggacaattactcgggcagcattggtattttccaaaagtagattttgaacctgagttgaaatatcatgggctttttccacagaaagactatcatcgtggtcaggtgagggagagggagagggagagggagaggagggtatcgaatcagaagatctattatcaggtttgattgataaaggatttatcttaatggtcaaagtaatgtgaagttcattttttacataaacaagcgaaatgtcatcacaatcagaaactccctctatggagagggccattttctttattcgttccaagaaagtttgatcagcaaattcctcacgtcccaccgatgactctatatccaaatctgtttcgatatgagttgtaatccgttttaaatttggaacttcttcctttattttcttttcaaaatcatctacaactccatgagcaattttgaaacttaacttatcatccatctgaacatccaggtatagatgcaaaagctgtaaagaatccatgttaatttcatcattcattgatctttcttttccttcattaacgacaatatttgaaagataaattgaatgaacattttttattgaaggaaaatcttcggaaataagtcttattttgtctttgatcgtttctgttagataatcttctaccgcatctacatgaacaacaacatcagaatttggtaggatttcattctttattttattctctacgttagtagctattcgatgtgctttatcgtgtgtgaatattcttggaacttcgatgtgtaaatctacaaaagtatcttttcccactttccttaccctgatggtatgagccttttttatcccttcaaaacccgttatcgattcatatatttgtccttgaatgccttttggtgccttatccaacaatacatctagcgttcgtctgccaagtcctaatgaagtatacacaataagaccggcaacagtgattgcagaatatgcatcagcatttggaatcccaagaaaatatacaattgctagaccgacaagtacaacagaagaagtaagcatatcaactctgaagtgtaacgcatctgcctctatggcttgactaccatatttgtcagcaaccttgtaaagtgctctagatcggccataatcaactattatcgatgctatcaagacgccaaatgaaaaaattgtaacttcaggtactacatgtttgaagaatatccgttccaagccttcgtaaaaaatccagcctgcaacgatgaatagaagcaaaacagcccctaaactcgtcaggctttcaaattttgcatatccgtaattatgttcaggatcaggtggcttccttgatattctaattgcgtataatgtcatcagagcggcaagaacatctaaacctgaatgcattccttcagagagcagtccaagactattagtaaaaattgcaattatgaatttggaaatggtaagtgaggacgaagcaataatggatgttatagcgactcgaattttttctttatatgctaattgattcagtaacgcttgatcgatggttttggatgattttttttcaggggcattatttattctaatccttttgaattttttatgaaatgaatccttactatcttcttccttgctatctaccacaaatacaaatgaataaaatattggggtatataatggatctgaataatattagataattataaattttaaatataattttttatgagatttaagcctaaagaaaaagggacacaggatgaccgttaacaatatgatagtagaaaagtatactcgaattgtggttcgacttctcaaaatatcctcaaaatagttagttatttcatcaagaatcgttgctatggaaaggatattaaattacaaatagaataataattaattcaataatttgtcgattctataagatctctattttatttggattattaataactcacgctgcaggattggattaacatatagatttgttctaccatctgaaggcaatattacaatcttgttatttgaaaaggaatatggcccattggaagtcttcaagcatatcgttaactagaggttttcattcactttgttgactaatgtcaggggaatttgtccccgcattattctttcaatgttaatgaatatgatatccgatatggaatcaattgcctcatgggtccatccagcaatatgtggcgttaagagaaaattgtcaagaagcagtaattcatcctctgggtctactggttctttccaaaatacatcgaatgcagctcctgcaatttttgcctccttcaaagattttatcaatgcatccttgtttaccagctgagctcgggccacgttaatcagataagccgatcgtttcatcaaatttaactcgttacttcctatcatattttcagtttctttatttaatggagtatgaattgatagtatgtctgcacgtggaatgacttcagatagtttatctacaccatacaaattatctacaaaatatttcttatctcccccttcagtttttgtgaaaggatgttttgttacagctataactttcatgccaaatgctttcgctcgtttagctacttctattcctgtaactcccaatccaactatcaatagtgtctttcctagtaactctgatcccattctatctggttgtcttctgataaaggaaccggtatttgacggagagttaaatatgctgattttaatattcttaaccaaataaagcatcagtaagaacgtgtgttctgcaacagaaattgcattagccatgggaacatttgcaacgtaaatgcccttcttagtgcaatagtctatatcaatgccgtcaactcctataccagattgttgtactagtttgagatttggacatgaatcaataacggatttgtctattttatcaaaactgttaatcagtatatcggtatcttgaatttgcgctataatgggtatattataatctacaaattctatgctaatggcagacctgtcggcctttcttgctaattgttgtttaaactccaagctctggatcattgctttaattttcaaggtacatcatcatctattttccatgtttttatttatctttaatattttttgggatagatgcaaaccaagttagaaattcctgaaaaggaatagaaaagatggtgagatggtgagaatcatctgcaggttattagaaccttaaagtgattagtattgccagtagataattcggtatatttcactgtcttaagtgtaccacaggttagggaacctaaatcaaatgaggtaccacttaattgtaaacctggaaaatgacataaggtattcttagtatctaaatttcccttaaatgtatacgagataccatttgctttcccgcttacaatatgaccacttttttctccggtggaccctttaatagaaatagttccatgccatttaccatttttcttgtcggtattaactttgaagttacctggggcaattataactcccttttgccccgttgcacaattataaatggattgttgggtattttttgcttgtacgtgagtaattgatcctttgttactagatgaggacttcattacagcagacgaactatcggtcccgtcagacatcgcatcagtatcatcagcatcatcattaaaatcagctatcgtttcagttgcttgtaccgatccataaaacatcaagctcggtgctataaatactcccacaacaagagttaaaagtataaacaaacctgttgaaattggttttgacatccatagtaatcaatttattgttatacttaagggatgtgctgattctcccccaaaatgtcaaagtaattatcatacagaatagaaattttgaaactttatcgagctgcaaatatcaaattttttgatttaaattctgcctatataatagatgctaactagtatgctttattactcggggttttgtataattgcctatatcgtaacccagttctctaaaatattttaggattaatttataaactatttcgtcatgattggcaatttctaggatatatttccacgaaatctcttcattatcatgagtttcgcctgacagtcttgtaacaagatctcgtgcctccaccttacattcctcaaacgtctttccattcttataagctccatttcttggatcacaactcccatgattattcaaataatacttttaataaatttgcgaatatataacattatttcgatctagagtgatgccaagttttctttgaataatcataaaaactaagagatgaattaataaagaattcaacttgattataattcaatacaatatacttttagaaataacacatctctaaagtggaatttaccaaaattccaggaaaatttagcgaaattttgtcagtattgatagtcttaattacgttgcctgattaactattttttataattgtataccaatgttgaagggattaacgttaaatatgacgaatttggaaaagacaatgaggaagttgttctatttttacatggattaggatcttcttctatagtatggcgggatattcccgaagctttatcaaaatattttcataccattgctttggatctagttggatttggaggaactgacaaaccccacgaaaattatactatgagttatttctgtgaattcctagataaattcttaagcaaaacaatgaaaaacagcattaagaagataaatcttatagcacactcattgggtggatacatagcattagaatatgcaatcaaagacaaaagtagaatcaaaaaattggcattatttagtccctctggccttttagacaaacccacgccattactcaatgactacttggaagctgtattgactagtgatcctattttaagatacaacaaactaaaatctgtgtttgaaaacctgctagcagatagaatcagacttcttccgatcattgtagacatctttatttctacaatcaatatgcctggtgcaaaacacgcctttatctccgcatttgataatagtacatcaacaaccttgaacctgagcatgattgaagagattaaagagattccttgtctgattgtttggggagaaaaagacaaactcattccagtaacatttgcagaaaaattcaagaaaatattagacaacgctaacatattaataataagggacgctggacattcaccctttatagaaaagccagcaattgcatatcaagtaatattggattttcttgctacagaacaatagtattagatatcacaaatttagaatataataaaatgggtaaagctgaataattgaaaataaatattctataactctcttatgtttaaatgtaatataagataaaacagtaagtagaatttaactaaaacatatgttaaataccacaattacaaagttatagataatatgcataattcaatcaagttattgctattatcttttatgactatggttttgtttactacaattagtattgctaatccttcatttgctagggatcacgatgatgacgatgatgacgatgatgacgataacaatttctctgataaagacgtagttcaaatatgttgtgcatggggctatgaactggcagatggtctcttaacttattcaatagatactgacgatgatgatgatgatcttaaggatgcagtaagcaatgccatggactcttggaacgaaggtttgacaggaattacattggttgaaacagatgataatgaggatattaaaatctcctttaaaaatgacggagaaagaatagcggggaaaactgttaactatcttgatcagtttggattcatcagacaatctcacataacagtatcagaagaatcgtacgatcgtgattttagttcctcacaaatcgagcaaatcacactgcatgagcttggtcacgtacttggactagatcacgccaactttagaggaaatctaatggcagaaagggtcgatattggaagtactacaatatcatcttgtgaaatagaaggagtacatatagccaatgcatggaaggtaaataacggagacacgatgtacttaccaaaacaaaactacatagaatgttagaagaattctagtcagttttatactatcatcataatttattggttaggattaatgattgattatataatacagttgaaaattgcaggacgcgagtagctttatttcgcgttatctagaatagatttagatggcaagtacagatattataattttcagtcagatattctaaaaaaaatttaggcaagtttgcaaatttatcaaaaagaaacaacaaaaatctctagaatcaatgtatttaataactccacagatacaaggtatttgtgaatattcttcaaaaaaaatacaagtgtgaaaaggatggagaaaaatttgatacctatgagaaattcattgaccacagtagaaaagtacatcataaagtagttttgaaatgtaacaaatgtggtaaacagtttattagtgaaaaagaaaggctacatcatgtcagagaaccttgtaagaacaagtaattatgaacaattattaagataaacccccttttgggtaaatcctataatacttgcaattttattgaaattattttggcattcgtctagatttgccttatcgtaaatcctttagataatttttctcgtagatctaaatatagatagaaatttaacgctgattttagtagttgaataaaagataattataaaataaaacttaagatttctcgtttaatcttgtctaaaaattagaagagaatttgttgattactcttcgctaccttctccgccgctttcatctccgccgctttcatctccgccgctttcatctccgccgctttcatctccgccgctttcatctccgccgctttcatctccgccgctttcatctccgccgctttcatctccagattcttcagttgtagctgattgtgtttcgctgccgtcattactgttatcgccgctgtcatcgttttcttcgtcattgcctgattcttgagtttgtgctattccttgttctgcagagttgccgctaccgccgctttgagctgctgtattgctacccttgttttcttggttttggacgttaatgttgttaccagataagatactatcctcaccagatactactaggctgttttgttcactggattgtgattgacctattccttgttctgcagaattgccgctacctttaccgttgccgccgctttgagctgctgtattgctacccttgttttcttggttttggacgttaatgttgttaccagataagatactatcctcaccagatactactaggctgttttgttcactggattgtgattgacctattccttgttctgcagaattgccgctacctttaccgttgccgccgctttgagctgctgtattgctacccttgttttcttggttttgtacattgacgttattacatgaaacagtagcatcctcgcctgaaacacataatgcattttggttagaggattgtgattgacctattccttgttctgcagaattgccgctacctttaccgttgccgccgctttgagctgctgtattgctacccttgttttcttggttttggacgctcacgttattacatgatgcagttaaactaccaccagcaacacataatgcattttggttagaggattgtgattgacctattccttgttctgcagaattgccgctacctttaccgttgccgccgctttgagctgctgtattgctacccttgttttcttggttttggacgctcacgttattacatgatgcagttaaactaccaccagcaacacataatgcattttggttagaggattgtgattgacctattccttgttctgcagaattgccgctacctttaccgttgccgccgctttgagctgctgtattgctacccttgttttcttggttttgtacattgacgttattacatgaaacagtagcatcctcgcctgaaacacataatgcattttggttagaggattgtgattgacctattccttgttctgcagaattgccgctacctttaccgttgccgcctatctgacctgctgcgttatttcctttgttttcttggttttggacgttaatgttgttaccagataagatactatcctcaccagatactactaggcttctttggttagaggattgtgattgtccaattgcttgttcgatagagttgccgctgtatttgccgttgccgcctatctgacctgctgcgttatttcctttgttttcttggttttggacgttcaaattgttacatgatataaaagtgtcatcaccgcttacacacactgcaacttgagctgaggattgtgattgtccaattgcttgttcgatagagttgccgctgtatttgccgttgccgcctatctgacctgctgcgttatttcctttgttttcttggttttggacgttcaaattgttacatgatataaaagtgtcagctcctgacaaacaaattccaagcatggttgctccctgaatttgttctatggattgtgatgcttcatttgttgcatatacgttacttggagcagccattaaagccggagccaaagttaacataataaatattggtaatattgctaataggtatttcattatagtaattttctataataattttcaatatttaaactttattgaaataaactacaataatgttcaataacaattatagataaaaattttctaattttatgttagataacatatgaactaattatagatagtatttcgctggtttagtaattgttattgttatctaagagagccatttcaagaaatatgacagaggtagaaatgaattaatgaattaatcgcccacttgtctccaattatttgagctcatttgaagcttgctgaaaccaatatttttagtggtaaagttatatacaaataataagtgaatagtatcgcattgagaaataattgttgcttagaaataatccaagttcattttaaggccacatatatcattgagtcatccactggaaattctagaaatatgcaaaattatttaagaactacaaaattttgaaatacggaaaaccaatagaattcttaattctacagcagactctaatgaacttaatattaataattaggtattacggatcgcgaaatgagaaaattatgagaaaatttaaaagatcttttaacatagatattcaaaatcaaatgaagcacatcataaaatcaaaattgcactttgtattcttaatcgtggcagtaattggagcaactttttttctcagtattagtcataacggcgtgatcgctcaaccaattgcagaaacagacattggaagtaatacaggtgaggcaagtgatacttttttccagttagaggattcgatagaaactatcaaattgttggtcaatcaaacccaattagctattagcaataacaatagtacaggtgcagataatttactcaaccaaatatacaatgaattgatacaaatatcaaataattctaataatttaatatgggacttatcaaatgaaggtaactagaactatctacgaatatgaacaatcttttttggtataattaatactagattttattacaagtagtttacactcatataccttgaatttttttatctaaagtttccatggtctttttagttgaatacccgagtaaaaagattaaactcctaaacatttaagacaatacctattctcagaaataggtcttgtatagccgccaacaatttagaaaacgaataataccgatatttgatcagattttctcaggaattcttcaccctatttgtatagcatattctaagttgttaatactcttaatgagaattccaaatttgaattgaaatctcatcctttattttagaacaattaaatgctatacaatctttgatatttaaaaatcgggacttcgatccaataccaaggttttcaggaattaatccagggtaaaaacatccagtgtcgttaatcaagctatagtaataaattcaatggaataacatcctgacttaacgtttacatatgattagatgataatcaataccatggcagtgtttgcgtgtccaaaatgtggagaatcatacaatgctacaccccccgactcggatcacaagaaatcaacaaaatatcctgacagagagacaattccgacgactattaaatgcaaaatgtgcgggaatttaaatacgatatactggaaaacagttcaataattttcatttattcataggttactgattgttaatgcagataacgcttttaatacattaggattacttgcacatgaaattattctcatgtttatccatctgaaataccaattgaacttaagttattcgaaattagatattcagtcgttttacattttcactaatttttgtgtgtcaattagtaaagcaaaagtgaatgttgctcccttgttctgatcattttatttggctcatatatttccaccacgcgtttcaattatgtttttacaaatataaagtccaagtccagtccctgatggaggaccttttatgaatttatcaaataatctagatagtatgtccttatagatacctggaccagagtcactaattttattgaacactttattgtaagtccttttaacaacaacaataatacttccttttttagtaaactttatggaattgatcaagatatttgataatacttaaataattcgatcattatcgacatagataaatagctctgaaattccttgtttctcaaattggacattcaaaccgatatctttaccatcattgaggaatattatattgattgcatttttttatcttcttgattagaataatcacttatcataccggtcatcaaacttaccaaattaaatctgtccatattcaaatctaaagaactactttcaattcttgcggcatcccgaattaccccagaaagtttctaaagtctttttgaattctttatatttattttgatatggtcgctgtattcttcttttcccctattttgttaattaagaagatcgaaataacaagtaccgttggattagtgttcttaattaaaacaccaataatataatttacgataattaattcttcgcaacagatactaattgaaggagcatatcaatttggttgatggtgatgaggccacattcactcattttagaagttataatacttttatagttttattttgttgttatagtttaatcagaaaacattttttttaccattttgaaagggtaattgtgataatatgtcattacaagagcataaaatattttacaccaatgacggcttagtaaaaattgaatatatataaaatacaaactaatttagtaaagtttacttcatagttcggagaaaatccctggacggatacaaaaagtatctatatatggaataaaaaaatgcggaattctgttcgaccaaatagtatgactctcaatcaacttgctctatgatatactaaaagtataaataaatccttattgggttgacatgttatttaaatgaacttctgttatattcatcagtgcttcttcgacgtcatcatcaaccgaaaaccccatttcatcttctaggctacctatagccctatcccaattttctccgccattttgatcaccatcttctttgtcttcttgtaatgctttagacagatttgctagtgcagaatcattaatactgtcagatatttcggttgaatcttgtggcggtaatggcgatgatgatggtgacgaggttgcagttacaattgatataattggagattcaatcaataatcctaaaatcccaagagcacaaaatataataatagagaattttaatatttgcattttgaatcagcttgctgtatagatatttaaatatatatagtcacaaaattattacagttggtaaaacaatttacatattcaacccacattaaaataagaatgaaataattagttgaaaaaatatctgtaatagtattgtatcagttaatgtttttgctgcttatcagtttatggtactatcaggttatcatttagaagtaggtttcagttctggtattttgttgcagtttaccgtcgaagtgtaactttggatactaattggagggtaggttataatttataccggcgggacagatttatttatgtcttctgtaaattcttatcaatttgataatgcagcatggtaaataaagtgagcaaccgactgtattttttaaatattaattaatcccctccatgcatactaaataattgattaaattattaggtatatcagctgcaatcattttcattttgaatgcggtttcaataggaggttattctcaagttagttgggatgtatatggtcaaaacaactcgacggctgagactaagaagcaacttgtagtagcgaacgcgactcaagggcaacaggccagtattacagtaactaaaattgttcgttgtgattcctctttaggtattccgagtgatgattctgtttgtcaatttgtgctgcaaaatattgatgcaaatcagtttaatttagtagtaacaggaaataatccaaacacaactagttttcaaggatcggataatggaacaaatatttctgtaggccctggaaattataccgtttcagaaagcccctttgataccatggatattgaaaatcaacttggagaaacagcaattgtaactgttttgacagattctaatggtgattgcacatctcaatttagccaagtagacacgtttcaagaagcaaaaggaatgatatctaacaatgaattacaaagctgtgaaattatcaatacaattaacgtagatcaaggagcctcgccagaagaaccataggttaaaaattaagagttacatccaatacttagttaataatatctaatacaagatatcaaaaataaattcaaaaccttacatttttgatttcttaattagcaagaagttgcaaaagctaaatatatcatattattttcatttggtaaaaattagaaacgactgtgaaaattttttatataaattcattacgaatttaaatgcctggaccatattttttatcataggcgaatcaactcaaataaatataagcatgaatatatattaaaaacatactagaaatttgagagtaacaatatttatgcaaatcttgtacctttgattttgatagagaaaaattcaatagtcattattaatcatattcagtattttttcatatataccattacaagcgtcattcccatttgattatagtcatttttacctttacactattctccatgttaaatatcatacctacttcggattcaacaattgccccagttcatcccttgtcttattatgatacccattgcttaagggatgattcaattgggttattagatctatatatgcatcacctagtaagagaattagcagattatacaacggagtcctccactaaaaatttagctgatgatgaaggttgttcaaaccagataataaacacgcatagtaatttagacgtgtctgctaatgctttttctggtaatgttgaatggagaaattctattctaccatttttttcagagattttttacttgctagtccagccttcgtcaattgcattattattttcaattgtagtcaccggaatagttttgaattctcttaaaaaaataaagaaacgtacaaacccgtctagaaaggggttttcccaggtgacaagagaaagaattctaagaaagcagaactgtagatgcatatactgtaaaaagatcttgacggtcatagattatcaccacaagaatggcgatagatcgaataataaggaaaataactgtcaagccctttgcccaaattgtcacgccataaaaactagaaataaactgatcaacaattaaacttgtctgattattcaaacaatattacatttaataccgagtttaaagctcggttgtagcagtaaaatttttgtaagcataataacatgaagaaaaagtccaagatttaagtctggcctaagtagtgtgaaatagtatattgatacgaaattccttcgtgtgacactattcataatagcggcgaatttatgttaatgtcaaaatcactatggaaaaattaattcacttcagacgattcaggttttagaacaattttttctaatatttcttttactaaggttgatttctcttttatagagccttccccaacaggatataaattgtactgctggtttagtaaatcattgcagcggtcaagatccttgctatacacaaatagcacacttctaaggatacctatatttggatgtttattaggattctccgaagccccaataaggttaccaatactttctaaataatagtctttagtcttatttaatgtcttttcaagtcgttcaaagaaatcaatgagtgcgaaattatcgtagttttcgtgctcatttttaatttctcgctttattcttcctctatagtattcaaacgcgcaatgaattacatcggtataacgcaaataattattcttgggactatcaaaaaccacagttcttccttgagtaaataaatcatataatgcttttcttgacttgagatattaataaacaccaaaaattttgatatacggttttatgtcatatgtggaagatctacaagattgttctttatatacctctcaaacgaaaaataaacgcatttatgaaatattatgagaatcagattagataccactacgatatggcctaagaatcagatctcaacttaattctctccgtggacacaaatcgagcaagttatactaaaagtgagatagatatcaagtctgattattaatttttgacataacctaattgaatatgctagatatagatgattgtgtttattcattggattatgaaatatttataggtcaatcaaacaatcagcgtattagcagtatattacttgtagacagtacgtttgtaattatgccagaatgtatatgccgtatcagttcgaagattcaattgtgaatttatcagctcaaaccaaatctaaatgaaatcgcgtattatgataatggaaaaatgaaggtaatagaatgttgaattatgttaacaggttcaatagttcctggattattagtataaacgaacttgattttgaattgaacataggattgtcactattggcggggttttctgattggggcagagagagaatcaaaagctaaagcggcaggaattggaacccattgttttgtgattggagtttcaaggatttttatatgtatttctgcactagtagaccccaattcgacgtcgaggatcgctgcgcagatcatgactagaaaagatttttagggatggaattatactaaaaggcgaattattcgataataaagattcagataatcccttaaatagaaaagtactcaatttgaccgcagcagcaagtatatggttttccggtgcaatcggaatggcaataggatttaactttcactttattgccataatttcaatagtatttgtagttatagtaactcgaatttcacaagtacgaaaaagacgtgagaaagccgttgaataaattggacatggatgttatttgagtgaatacaaaattcgatagaaattatatatctttttgacgcatccagtcagatcttgattgtccagccatcaaaaagagtttctctttattagcagttaccttcttttttatagattttgcaggtacgcctgcaacaatgtcttcatctgctatattatagataacagaactacccgaacccacaattactttatcacctatttttatcttgttttttatatactgtttagccctaaccaacaattattacctatagatgtactgccacctattattgttccagctgttagttcagtattttttccaatttcaacattatgggctatatgacataaagcatcaatttttgttcccggtcctataatcgtgtcacagagtgatccccgtgcgatagagcaatttgcaaatatttctacgtcgtttcctatcactaccttgccataatgaggaaatttttctagatctagagttttatctgctctttcaaatgcaaaaccatcagaacctattgtggtgtttggttgaatgaaacaattatcccctaccttacaattttgcagatttgcttttgattctattatggtattattgccaatggtacaattatcacctatcactacataatcgccaatataacaatctcttcctattttagccgaatcggctataacagaacttttggatataccaactttaggtggattaggtgtaatccgtttggcaagtcgagtaaactcaagtctaggattatctacaaatatcaatagttgtccatccttatgatttggatatacatgtccctccatgctttttttacaaagtattacaccagcatttgactgtgaaatagacagtatgcctttgtattcctcggatgaacaaaatgaaatgtcatctcgtgttcctgtatgtaaagatgacacatttcttattgattttgacttggggtatcctttaatagtataatttgaatcagtcatgtgcttcaatagtgattcaacggtccattgaaccatatcgaatctattttcttttttaatataattgttttctaaactattaaaatagataaatgattacgtataatcggatataataatttgacgattctatttagattgttcaaatctactatgatgtttgtaattcttccagttacccgttaaataagacgaaagaacaatcgatttaatcgtgcattgccggatatatttattaataaatttcagaaatttgtattatatccaagttatttctatacagatccttaacaatttcaatatcaagttgtaaggataccatattttaacatgatggcttaataataatattcaaatttattgaatctagtctaacaatttaatcgtaactggtcctccgctgagagatttttgttccaaacggataattgatcgttttccacgatacataacataagtttcaaactccttttcgccatattcaaatttgacctttttgttcaaccactctttaggtaccacggcagtgagtcccaaccccggtacttgcctaaaatgggtcttgcaggtcatactatcttgaaacacgatctataatacagtcaaaagataaaaaacttattcgacgaatgttactatattatatgttttaaattttgtgtgtaaaataccaaaataaactttgattggaaatatcttccattttcctgcaaataaaagaaaatcatcgataggccggcatatttatcatattaatctttaaagataaataataattatgggttatagatgtctgcccaaccgactgcaagtatacttctaggagacagtgtttaatatagtacccagcatggattcagtgccataatacttacaagtctgtaattaaccaggagtccagatagacttaaattgtaatttagtccaaataatggttattaaccttttgaatatgaattcaatggtaataataaccatttgataccaatatttatataagacgttggataattatgggtaatgtctaaacaagataaaaaagaaacaaccacatctacatccggttcaactacaaaagataatttagatcaagcagttcaaaacaataaccaaatcttcaatagagttgttgaagagaccacacaatctctgaatcaggtattcgaggaatccaaaaaaagcattgaaagaaacattaacgaagcaaagaatcagatcccggtatacacaaagacaataaatgaagttcaagaacaagcagttcaagctacaagagatatcgcagaaaactaccttgactatcaaaaacaagcaattgattcttttcaatctatagtcacaccatatattgaaaatgtaaataaccagttatggaacaaccaagatatatttagaagaattccagaaatatattcaaaaatggccaacaactatgcagaaaattcagtagctttaagtcgactcattaacaatatcgcattttcaaatgttgatatagtaaaaagcgtaatcaacaacacaaaggaacaatcaaagcaatttgcagaaataggaaagagaaacgctagagtttacgaatcggttgaaagagaaaacagaaatagctactaaataaaattcaactattgaccacaagttgagtcaatagtttttcattttgtttgtttttttttaattaattatagtatatagtataaatatacatttcaaaaaagcctagccaaaaaataatttaattatctgatttccagtaattctttgaaacggtcttattaaaggtcttgttgatgaaggcataaagcattaatcaattctcaacctatctctcttgtattgattattttataaaataaagttgtttgatatcaaaacaactagccactaagataagattaactattattcaatcctataattgatatcattgtttggtgtagtttggtttgaggtattccaataatagaaataattttagataaaaaataatatcacttgcaaacaaaatgagattggaaatatatcaaaggagaaaagacaccgatgttgataaattcatttgcaagaagacaataataattaatacagtttgatgctatcaaactgtattgcaaagtcagaaagagagtttctgaaatttcaattaaagatacaaatgtattctccactacttaacatggtcagatggagcatgttattgcatatagtcggtgcacttaaagcatagagaggaatgcttaatggtcaatctagtcatacgttagaatatgccaaagctccaccggctaagttggtcataaataaacattctataaaattattctaaatttatcggatagaactaacattgctaaagatcttaaaaaattattatatgatatactttagtattaaagattaatactaaaatgtttaggtcaaataatacaaaaactactacagtattaattgtagtagcattagcaacagtaatgataatgggtcctcaaataacgagcataggtgatgtcctagcaaaacaaaaatacaatgattgggaagattgtagagacgatcacagtaagaactggtgtaagcaatatttcaagaaccatgatgatgataatgatgataatgatgatggaaatagagcatcacaaggcattagtcaaagccaatcctcaaatcaaaacagccaagtagtttcgggtggagattcaataggttcaggaaacaactttaacttccagaatcaagaaaataaaggaaacaatgcattagcacaaaattcagacgatgatgatgatggaaatagagcatcacaaggcattagtcaaagccaatcctcaaatcaaaacagccaagtagtttcgggtggagattcaataggttcaggaaacaactttaacttccagaatcaagaaaataaaggaaacaatgcattagcacaacaataaatcctattttttctttgtctagacttgaccacatatgaggcaggctagacacctcaatcaaaataacatcagaactttttactatcaaacatattaaaatatagtaataattattagaaaataatagttgaagttatcagaattatgtgaaatgattcaagaatcgttccgttcaggaaaatatcctttagcacaagaagctgaaaaacaaaggtcaaaacttgttaaagtgataaatagatcatcttcagatgacatgaaaggcgataatataatcatagaaactaggatcaatgatttttttgttatcaacaattatgtgtcacagatcacacatttgccagggatgatagaaatggatacgctagattcttttaaaatgcttagtagacgtattgatagatttaacgatcatataagtaacatcaccataaaaaaataaatgagaatgttattaacaaccagaaaaaattctttccttatctaagactgaacctttaaccagaccaaatttatttgactaattataaacgggaaatccgtcaactagatttaatgcagtctaaaactattttcagatatgggttacttcaaaaatatattctcaagtacaataaaaccataaaaatcaacaaatctggccataattgttaagcaagcttaactttaagaaaaaagttgataaaaattttttttctaattgattatagttttataatttctggtcggtgttgcaagtaattcttcgatttcactattcatctttaagaagattaatcctttttgtgtggttttgtatatagatccttctatatattcgattaaatcattctctataagaacagagagatattctttaagctgtgcatagctcaaaaaagctttgtacataatcttagttttagtagcgccaccattggctgcttcaagaatcattgctacaatttcggtgcggcttctgtatttcataatattatatataacatcactagtatataaccgtcaacaaactagagcctttatcgatcaccaatataataagcttttttattatcagtcaaaaataggttcagtatagtatacttgcagtgggaggaaaacccaatcaattctcctaatttttagatgctattgaaatttgcaagaaaggtagagatttttggacatacaatcatataataaaaaatcaaggacaaacttcttttaatatcttggtgcttattttatgataattacatataagggcattttccacagttcaatacgtcaaacttcaatcatttgcagcggttaactattcaaatactttaagatatacaaaatttagtataagatctaatattggagtgaaatcataggtgggttatccaaacgagtacgaaaaagaaggacatgaaagagaggattgcataatcagacctcaagtcaaaatagtcaactgtccaatcaaaactagcttaggggttttaggcaagaagtggactatgctaattataagagacattggatttctaaaaataaagagatttaatagaattttagaatcaatcccagggcttacaccaagagtattatccatgcgcttaaaagagttagaaaaggaggggatcataaaatgtaaagaaataagaaaagatcaactgatgattttatggagtttgaccgaaaagggggaagatattttacccattttacttatgctaactgcctttgggtcaaaatggtattctgaaatggtttttgaggataaaaagccaagaaggttggacgaagtcttttctcagccagaaacaagacaattgattttagaatataacaaaaggttcagatttaagtactagtgacagaaactaaaagaaaatatagaaataatgcaatccagctaaaaaagacggataaaactaatatagtaacataataccaccatgaagttctaataaaaaaaaccagtaacatgtatccaaactatgatataattaatttcagttataaattataattataatgagtaacataacaaaaaactataaggtaggaatatttgcaatgtttattgcagcagctctcgttggttcagtagtagcctttggcgataactatgcatatgcaggcggaaagaagaaatctaatgatgcagagcaagaaatcgagcaagaacaatcaaatgaacaaaatgcacaatgtgtatctggagacttttcattattatgtggaaataacgtaaacttgcaattacaagcccaattaggcaatttggcattaggccaacaataacctctttttttaatattttcgcttttttttgttataacctaatcaactattgattttcgtgatatcttttcctttgatagtattattattcccttacttattcaaataagaaaattaattaggctcaaattacgtgaactcgaatatttttcatatatagataatattacccagaaaatggctaaatctaaatcccaacttttttttagctttctacaaatatttttatgaataattaaacgcaatctcaattttggatcttagcattgagatagtattcaaataatatcccaatgaagaacacagagatataattacaaagaagtaaatcacaaacatatattaaaacggattagatttcttagaaagaaattcacttaaacagaaatcatcgattatatcaaatggtcataagaatatatctatctatacatcgataatatagattagaataaaaaaatagaggaaaattattgttggcctaatgccaaattgcctatattgtcattgaagaataatcctacattattccccgatgcaatagaatctccaccagatacaacctgactattttgtactgatgattgttcttgtgatatttcttgctctgcatcattggaattattgcttctatcgttatcgccattactatcatcatcatcgtgattatgctctccatcgtgacaggaatgagcgaatgccagattaatatcagaagtgacgacagttggaataaccgctaggatcaaagacaccactgcaattgttaccattattgacatatttcttttctcagataacatttaattcaatattagatgaggaaataaattatattagaatttgttaagttacgaatagaatatttttctgcattataatacaaatgacaggattgagagtaaagtaattcggaatatagaaacagaatttttcatgatatatggtctttacaacaaatattatttataaaatttattgtactattaacagtatcattattagttcttttatattccctttagagaatatacagagaggaaatcggacaagatttccatattcaaataagagatgcacttattcttgatactataagcaaatgattaattaaaatcatcctaccaaaatattaggtcacttcaaactccatgctttggcccaagagttttccggaataagcaaaatcgtttttcatgatcgaatcaacatatttggaaaatacggaaccatcgatacatgatccatgcatggggtaaatcatttttggttgcaatttctcaagtcttttgctagttattcttacgggtttttcgctagcaaagattccgactgcctgatatagggcgatcatagaatcagatagatcttctgaaacaacaggtttgttgaatccaggttgaataaacagatcggaagtaaaaagtgacttggaattctcttcaaatatcatcatactatcccaatgatgtacatgaggagtcataataaatttcagcgttgattttccgatatttaatatttcattatcccagaatgaaatgtgatctacaggaacgttatgccagccagtcaggtttaatttagaactgaggtcactacaaaccaatcttgcttttggactctttagaaactccataccaccccattcatcgctctcaaagtgcaggaaagctacataggctaatttttccaatcccatcacttccttaacctttgcttcaatcttctcatacatacctaccggacctgtatgaattaaaataggtttttcatcatcgattaaaagctgattatacgtaattccatagctatcgtcaaatccactgatacgatatattccatcacttatctccgagattgagacatcaattttacttggattaatatgcttgcttatttcaggcatatttactaatatcaaatcaaagaattaaggattgtcaaatttttatcttgtcaaagagtagttactgctaacgtgctaaatggagacatgttatcatgaaaggtaaagaattaatatattagtcgaagaaattagagaacttgatttaaacagattaatattagttttctcacacattatgaaatatcagattgggatcatgttgtagatatcatttcaaagtctgcaacaccatctccttttcattgagaacaagttcaggctttataatattccatccaatagaaaatctaccaggttctgtcaatagcaaagcaatagaaatagccataaacagtatctttagataacaacccccattcatagccttttggaagaataatcatatttgaggtattaacaactataaaggcagaaattatttctaccgcaaataaaagtgaaatgatcctattcaatagtccaaatgattgaatatttttgtaaattaccacaacaaggggtgatcaatactttagttaacagtggctttcgcggtgactaaaggttaatcaagccacgatctgtagttgtacttttaaggctcattacctgagagaagcaccgtccaaaaacgttctagtattatcaaccaaaacatgttttctatccggacaagaattttcaggttaaccggtattaaaaaaatccaatgatcttaacccgttatctaaattaattttgtccaataattacattttcttgaggtactattatagtctgagtctgattaactaacgtcggtttgttgctgtccaaaccctctagaatgtctgttttaagagctattgtagcattagtgacgctgtatgtgggattacttaataagggattcaatactgtagatgtatttgatatagagtaatctttagatgtggtttcattttctatgatttgattccccattagagaagaattagcagtatatgtggattgattcacctcaaaagttgtggtcaaagacgtggtttgagagaaagcaatatcgatattagattttacaaatatcaacgaaaataagataataatagatactagaaatattaatcccgtagaatctattttgtttccagaatttgccatgtcggtttaatccattctgacgattttagaaccagtctcatcaatgtagtgtacgcttccagcagagtcaatctcaatagtcgatggtttttcctgcaatttccattcagtaaattcactggaaacaggtgtaagccttccaatagtgtttgcattgctttctataaagtatacattacccgtggtactatcaaatttaattgaagtgggaaggctattagcagtaggtatgttccattttgtaatagtattagtattcacatcaagacttccaatagtgtttgagctactgtctgcaaaataaatatcattactgccagtaaagcccaaagcaatcgaatttatgctagtcgagtttgattgtatagcccattctgtaatagtattagtttgcggagcaagcattccaatagtgtttgcattgctttctataaagtatacattaccatttgaaggatctacatccaatgagttaaattgtctgatgttatcatttgctgcagagttattgcctgcagatgaagcagaagagtttgattgtatagcccattctgtaatagtattagtttgcggagcaagcattccaatagtgtttgcattgctttctataaagtatacattaccatttgaaggatctacatccaatgagttaaattgtctgatgttatcatttgctgcagagttattgcctgcagatgaagcagaagagtttgattgtatagcccattctgtaatagtattagtttgcggagcaagcattccaatagtgtttgcattgctttctataaagtatacattacccgaagagtgatatttaattgaagtgggaaggctattagcagtaggtatattccattttgtaatagtattagtattcacatcaagacttccaatagtgtttgagctactgtctgcaaaataaatgtcattaccactaaatgaactagtgataggaaaactgctatttcgatcaccaggcagcggaagagcccaactcttagtcatcgcgatattttggtcggaaggaattgctaatacttcaataggcttaatataaaatataagagcaaaaactaagagactacatataatgaatgctttcaatttatagatactattcaattattttattatataaagtattcagaaaaccattcttatatccataagaagtccaaaagatgtttgaccttggcttcttttggagtacaagaatgctatagagaacaaaaatcatcattacctatcaaaaaggtaaaaggctttgagtcaacaccggaacagaaatagtacaacaaataccatctgcaaaaaggatagtaatagagaatatagcatttgtaagccaaaaaagtacagaatactgagctgtttttagaaaaaggttcacaagacgtaataagatatcgacaatagcataaggactggtaaactataactgaataatgaatacctgtggaggacaacaataatggagggttaataatgtgattaaacactgctaattacgcaagagatctaggataaagataacatgatcaaactttctactacttgctttaatcttaggttggagtcataagagccgtcttaccaaaaataggttacctaaaaaaagttgttactttggggaaacgtccatgttgttgtataatacataggcatcttccgaatacattgctacggaaccagacgccatctcaggagacatctccgtatcgatatagtcaatctccaaatttccattgataaataccttgatgtgattgtcaaccatatcgacctttatattattccaagtacctagacccatttttggagtggactttgtttctaggaatttttgaccatctactggatctgtgcagctgtcacaatctttctttccaagctcaattccgtttggtttaaacaatagggaataatggtgaaatctgtccacatacctaaagtctatccagcctacttcccatacattgggttgagagttttgtcgcaattgttttacagtatttatatcaaactccatttcaaaatcacaaaatttgtctgtagattttactaatgcagcatgagtgtgcgtatcatatggtgttgatgatgcattaggtttaagataaaaaacggatttcccatctactacttcaacccctgttgatccatagccggaataaacattcttccactctccgtttggtgacgtctggccttcatgcaaaaagtatggagtatcaaaattatcatacagatgcacattacaagattcctcagtagtagattcaatattataatttaaaaccggtataacaaataaaatcaacattaaacaagaaatgacaaaaaatatagtaacgaatgataatcttatgttcatttcctttcttaaactaagattgaattatacataatattaaagtataataattcaagtttcgttttgatattctaatattattttataatcaaaaactatttttaaatgtttcatatatatttataactaataggatataatcttataattagaatgaatgaaaagtctgatccgtccttaaattcaaaaatgcgaaaatcagtctatgtatttgtagccttttttattatttcaactatcttatttaacaatggtaatatggcctattctataaatcagggaattatttctgggactgggtatggaaacaatggagaacgttttggttcttttgtagcctgttcggagtctgatgcagcccattattttaaaggttcgactatttattttaaaacaactttaactgacaattctgcggtaaataagaattccggtacctccttagggtcatgggttatcgagtttatagcagataattcgcaaagtccagtaaggataggtggacaaataattgaatcgaatctggaccataacacgtatacgcttttaggggaaaaaacttttgacgatgtatgcagtaatattgggaatactattactttgacaggcggatgcggagaaaatacaagaatatggtattcagattcaaacaatgaaaaagtcggatcaattacaccaccagatggtgacaaagcattttacttatttgggtctgaagttgattgtgtttgatagtcaattccaaaattatcattctttagatgaacgcacaacaggagaacttctggagtatttccatccaaactgggcatcttgtcaagggatagtctactgctccattaatttattaccttcagttattatagtataaaacttctttagtatcatatactttaatggatgaatgtgacacatgtcaattataatcgtacaaggacttgtggattacagatctggtttcttggaatgtataaaagtcatgctgccaaatgcagtctcctttcttaattgattcaagaaatattactagctttgggcattattcttcttcactatcgcttgatggttcttcttcactatcgcttgatggttcttcttcactatcgcttgatggttcttcttcactatcgcttgatggttcttcttcactatcgcttgatggttcttcttcactatcgcttgatggttcttcttcactatcgcttgatggttcttcttcactatcgcttgatggttcttcttcaccaaatatgctcaaagtagtggttgtactgtcgtttggtataggaatagataattcgttatatttaggtgaagtgtcatttaacaagtaatctgtaatgtcgtatgtgttttctccattaataggcgatactgccgtagcgtttatgtttacaatgtcactaaggagggattttggaatttttaagttgataagcgaatagggattacttaaattattacgagaattatctagttttttaatgtcattgttttgtatatctacaactatatacttctgatagcctgcaaatacgttgtctatagtaatattatcaggataatccaattgtagcgaaaatagtaactgttcaggatcatctgtaatgattgaatctatcttgtaaatatgataaccgccaaagtaaatatctccacccggagtttgagttaatccgatgaccgattcaaaggggtaaagatttatttgaatatgcttttcagaatctatagtctcggggtcattatggggagttacttcagaacttatttttttagttttgttgctaatttcgatactatatatatctcctgtataggtaccaacaagaaaagtgtcttttagatagggaaaatgatcacttgtataataaattgtttgtgtaggagcaattgaataataaaaggaccgtagaggttttatgtcgattgtactatttgatgccttccaatgaacattttcaggttgcaaatttggaaatccgtagttgcctcctttctttatgacattgatttcatcaaacagtttatcattattttctgtaaatatcccaataccatccttctcgttaaatgcaatgccaaatatgtttcgatgtcccattgtatacacgggagaatttggaaacggattatctgatggaatggttccatctttattaattctaagtatttttcctaccaatatatccttggattgagaatataaagacgctctagcgtctccaattgaaatatataatttatcatctggacctattgcgagcgagcctccagcatgaaatgcggcagaagaaggaatattatcaaaaataacagtcttgttaaaacctaaattgtctttttcagtgaatcttacaactacgttaattggtttaccattaacgtcataagtggaatagtacacatatacaaaatggttattctcaaattcggggtctattgctaagcccaacaatccagtttcccaattaacttctaagttgtcaatcgtagcaaatggtctatctaataaaatatcgttctgcaggattcttatctttccagtatttttttcggctatgaatattcttccatctggagaagttaccatgctagaaatcatcgttaacatccgtccattgtttttatagattgatgaatcattcaatgtattatcgaattcccagtgtccgactagcccatcaaaatcggacatcgatccattatcgttataaatctgactaatttccataggggttagtattctatcgtaaaaacgaacatcatcaaccatacccggaaatttagtgcattctgaacaatatgatgcgacaccaatatgaattggcagattttgagcggggatatatgttccattatattcaatgctatcatatagacttccattaccatagactctaatttctgaaccatcaaaagtggccactatgttggtaaatgacgaattggagattggaagaggtttggacattaaaggcccattacctgacttagttgtcaaaccaaaaacaatgtcttgatcttgtgcattatttgtgctaaaaaaccaaccctcatccttattaacagtagtatgagaaatgacatgggcatctggtgttgattgaatcggtgtgctaattttttctacccaaaaagagatagaaaacacttcggagttataagcagtaatgttagatatttctataaaatccctaaacttctcttgaaatattactgcgttaccactttttccttccacataaggagcctctcgtgttattggagtaatctcattgcttgtagaatctacagaaaatccctcgaattcgcttttggataaagcacattgtaaagattcgccataatcctgacagctataaaaactactcttgttaaagatatgttgttgacctatatcgttactactaccataaacgatcaaaggtgaggagactataaaaggaataaatataataaccaaaataaaaaaatagagcatgcttcgctctgcacgtatgaaattgataaagctatttatattgagaaatttcaaatttgactaatataagtttttatattagtcataagtcgttgttaactaaagtattgatcaccccttgttgtggtaatttacaaaaatattcaatcatctgcctacatgtttttgtttacaattctttaacttacatggaaaagcagacatccaaatattctgtccttctttatgtattgcatagttctctctatcagacatttcttttttttgcaaaggaaggaattgatatggtgatagagttttagaaatcgacaagcctgtggatatcatggtccacaataactgggtactacatgaattctgtaaattggacaatactgacaaataacgctcggaaataagcatgtttctctttgaggatatatttttaggacgaaattcctaaatcttcttcaaaattgcgatacggcttcttataacctcgagcagataaaatattgctttggaaacacatctatgataatccaagcaatcgatgaaggtattctgtttatgttgatagccataaaagtgatgacatcttttgacagcgccttatttatcatcttattgtttttatagattaatagataaatcactatctatgtctattgacatagaacaagaattaaatcaattaggatattcatttgaatctgaaggtagcagaaaagtacaacttacaaaattttcttcaattaccgatgcaggatcaacagatattagtttttgttatcatgagggagataaagcgataaattatatatccaaatcaaatgcaggaattattttatgcaaagaatcaatgatcggtaaagttaatcccaagaatggacaacaactatattttttaaataatcctcgccttgcatttgttcaattatttcataaatacagtcaaactgctgaaacaaaagggatatctcaacatacaataatgcacgactcggctaaggttggaggaggctgttctattggaccttactctgtaatagacaaagattgcgtcattggggataattgtattattggtagtcgagtcagtttaaagaactgtatcattggggataattgtattatacaaacaggaacggttataggcgaagatgggtttgcttatgaaagatatgatactaatgaactattacgctttcctcatatcggaaaagttatactatccgataatgtggaaatttgtgctaactgttccattgcaagaggttctttatcaaatacaataataggaaaaggaacaaaattagatgctttggtacacttagctcacaatgtaaaaataggaaaaaattgtgaacttacggcaggtacaattgttggaggtagtacaactgtaggagattcaacatggactgggctaaattccactcttaaagacaatattagagtaggcgataatgtaatagtaggagcggctgccatggtgattagggacgttgagaacaaagatatcgtagctggggtacctgcaaagtctataaagaataaaataaataccaatctaacttttctgatggcgggtcaaaaagactaatttctgttaactgctaggtatatctttaataatttttactgtaaaaattcttcatctggattctcaaaattataataatttgttacacatccatccatttggcgaatcactttattaaattgaattcactatcacaagcaaaacttttcatgtattagttatcctaatgcaggactaaaattgactcaatgaattctatatcaacacctgtcgaatttacctagatacttatagggctaggcataaaggcagaaataaggaaatggaagtaattaagactgggtcataattgctaacaaataaagctagtctccagtctatcattttcgattgaaacaagagatactaactaaaagactaaccagttatagttcgtcatccactctaagcagcattttgtatcttgttggattgattgattgaaagctgtcatgtaatgctaaatccggtctcaaaggtagaccttatgtatattcgcataccaacatttcatggtgttttatagtccgcctatggttcagacttgattcaaacaaatcattacattacttttaatggtcggaatttaccatatcatagagcaataatgaaagtctgtggtttatcagatgtgttcttacaagacagacgtatttttgatagaagtttgaagaccttttctatcgataggaagaaaaggatagtatcgataggaaactggtttatatcagaagacttgatcaatccatatatccttgttgtagatagtagtctcatcaaatcatacaaaggtaaagtttgacacaagtcatcgattaggaagggaatagttccatgttttggtattgatgcagatgctagatgtggatatagtcgtacccgagtcaggatatttggctataaactacatatcgtgtctagtactgattctagggtagtactcctttttgcagatattacaacagcaaatgtgtcggataattatgttatccagatctgataccgagtttatattcagaaacaataaagaaaattcggttcatggtagcagatccaggctacgatgttagggaaatgtatgatttaaccacaaaaagagagtttcatcttgtatatcctgtcaaaaggtatagaagtacacagaagaaaaggctcaatctggctgatttttacgagtcatcgctaggacagattgtgtaccaagaaagggttatctcggtagaacctctgatagagcatattaaatctgtatttagaatagattcggcacttgtaagaggatatgagaaggtaagtggaataatactactgtcagtattgctgtatcagatacttgtttattacaactgcaagatacaaaaggacaatcctgtaagagcaatcaactatttgataggctgttaatctattcggtttgtgctcctaataagataaattatcaagatgaattatgtctcaatctcaaatatctagtatcatattattttacgcaccgtgctctctacacatcgaataaggtaaaattgagtggaataacatcactaatcaacatcatatatgtccagaacaaatgcttagtaggaggaacataatcattcacggttttatcatttgatccctgataatgacatcaaaagtcgatactaagcatatttggaaattgtacttcgactgccataatgacctgtgctacttgcctcttttaaatgctgttttattttttggtaaacccatgagttgttttcgtcgcaccccatgatttgatggtccatgccctaacaaaaaccacaaaaacgtacaatacaaatgaattgtaaattggtataaatattgcatatttgagcccaccccgcccatattcttttgctaatacaattatttgaactatccaaataaaggcggtaagcaaaagccattggttaattgttattgtagcatagttaaaagggaagtatccaaataccaaattaaagatcattccaaatccaatggtcaaaaacaaacctagagcagtgaatataactatagggctcgcccaaaaaatgatacccagtatatcagtaggttcgcaaactcgatttttcaaaagatcaatgaatcctttggcccatctggctctttgttttaacagaatttctatggtgggaggtttttcatcataattaatacattgaggtgcaaaaacgattctatagccttttctcaacaatctagaagtaagttcataatcatctaccaaatggtttgtaaatcccccaacttcctgaaggatttcttttcttaaaatgtaacctgttccaccaagacctcccctttggtccaatgcagtcctagctgtcatgtaaggtgttgaccatagatcaccttctattgacaacaatctagtaacgaaactgtaatttctattacttggcacatatctcccttgtactgcagcatatttttctaataatggaagtcccttctctacaaagtcaggacttagaattccatctgcatccagaactaaaatgtattctccctgagattttgaaactccaaaattaagtgctattccttttccagaagcttttgttttatagtcaagtggctttactcgcggatctttgacagatgcttcagcaaaagtattgtcactgcagttgtgacatacgataataatttccatattgtgatatgtttgttttagtaattctgttactgttttttttattaccgtgtcttcattgtgtgctgctattattatggagcacaacaagttctttttgataattgcttcattaaagttttcataagctttttcttgaagagactttacctttttatccattgcgagataggtaatgagaatgaaacatgttactgccgtataaataataataataattaatggcggcaaagtcacataatagagatttacatcagtatcaatcagaatttcgtttcccgtataccaataataaatggtatttaaaattactgtaatccatattaccattaatacagaatacataaatttccatcttttgtctttcaacgattttccccgaaaagactttgagtatttttccaaattggattgtttgtaatagaggatatgatcatgttaaaccaactttccacctttatctgctgaaccagtctggcagcattatcgtttacgtctactgcccgtacttgtatttctgtaaatggtggaacaaccttaacaagtgcaatgtattcttgattttgctcttttgccaaataagtttcaatattcttgttaccttgggtgaaatttattcctctaagcttcaacggagattcatcctctatctttaacttcaatacgttattaccctcatgtagtatatttgttattataattattttaggaggggtagtatcatttcttaagttactattactactacagcaatcttggtccggatggccaggaagaggtaagggctgcataacccattgggcatatgataaatgatcatcataaaatataagcaaaaggataaaaatgaaaaaagatgtaaacataaatggaatgtacatactttgattcattttagtatggaaaagggaatgtccatatatttagataccttatttgaatataggtctgtaacctttctatccctatctgaattttgattcttgtataatctttttctgctttaaagagtagtatatgcagaaatttaatgaacaaagtccgtagatacattttccacacaatcaacaggcactgtatagcatttactgaggttgaacctattgttctgaaagtagaatgaatgatgaatgttcaaattcacgacttgttatagctatggctagatgaattcagaggtcactcacgattatgtgaaagaataactataaatgtataaaaatgaagaaggaataaaagtatagcaagttatttttttagggcttcatataatccaaacatgttattctctgtgtctagaaatactaaaatgaaccccatctccggaatttctgtttttggcattattaccttaccccctgctttctcaattttcgatgcatagtcatcaacagagggtacagttatgtaatttgtgacagaatgttctggagcttgacgtttcattagtccgcctccaatacctttattcccattttcatctttggtgtcaaaaaaccaataatcttttgaagggtcttcaggattagccaatttctgcatattccattcaaataccactgtgtagaattttgatgccctttcaacatcatcggcagggatttcgaaatgctgcaccgtaggcatttcaggctactccatatatcgaaataattgttttacgcattatcattattactttacgctctttaaaaagaaaatggtcataaaaaaactaaaagccaagtgtaaacttttgagcaagaaaattaacatccagtatctcattaatgaaaaattgtttgcctttcacaattgaaagaaactcattgacatgaactctaatgaatcgtaatatttttgttattggagtttgtaacaaatcatagagaaatattatttccgaatattggattttaaattatagtagcaacgggcatctaaacagtattatttcaagatcaaatttgattaacaatcagttttggaagtgttagaatatcaatatcaacaaaaaataaaaattaagagttatttattgtccataaaagttatggccaagattttcgctatccgatccatctccagagttacaagaatcaacaatactagcatttggtgaatagcactgggcaccttgtatagacttttgtgaatttcctaaggattgatcagtaccgctacctccaatgctaccacctagatcaaaacccaaaaatgcatatgatatagaattgggtgaagctgaaagtgaaagtgaaaccactaacaagagagtgatggaagctaagactaatgtattcttaaatggctttttgtgcattaatgttataataacgctatgctatatcgagattattttacttgaaactgaatttatattactattatattctattgaaatttgtaagagatttttggtaggtaagaaacttcatgtaattagatttatacaaattaaatgaagggattatgtggaacctataatgctatcagcgggaattcatattttgtttagaaagttctgaaccacgaaaatattcttggacaataaaacttactcaaaagagccgacttgaattttagaatggtcaaactcaatggatgaagtaatataaccacctagaaattatatcatggctgcaagctcttcaagccgttaaataaaaccatcgtcccactacctcataatagattcgggtgaaattccttgattaatcttctgttcgtacgacggcaatgatagcgtggactaaaatcttttcggtttgttcagtttaagcaatttggtcacgatcctgacaggatcatattatattattcctattacttattgctttgaatattaaattttaatttctaatacaatcgtagatggtttccgcatctttatgaaacttggctttttcctgatgttgaatgagaccaaccgttaatcttcctgtatacaacactcaagatcgtcagctgaaattatatttctctttaggacaaagtctgatgcttcattaaaccgctcagtataaccacgtttgttggagtaagataagattctatttagctattagtctttaatactttgtttaatcatatataccaactatctggcgggtcaggagtatataaagtggtaacctttatgaaggaacgttagcgtgttataaaaagagtgctagtggaggctatggagaaaaattgtttcgatatttggatatctatttagacagttttcttaaatgacaataatattcagatgctcatgccaggtcttttaatagacgaatgaattagaatcccagttggtatgtttcttaatagttctccaccttcataagagattatgagtgacatgtcttactcatttgtctgcagagatgggagattttagagaagattgatggccgtcggcggttagaccacggcggcggcggttagaccacggcggcggcggttagaccacggcggcggcggttagaccacggcggcggcggttagaccacggcacacaaaaaactatatcagtattggaaaatctatcaacaaccaaattagtagaaatcatcaggatcactcgagaaatgaacctcatatctcattttagcctattaatcttctggatcgctatgcattgactaaatagtaaagttaagaatttaagtgtagtaaacacttatgatcatggataaaatatcgaattctgaacacgaaacaagagctcttcataatgttgaaagttttgttttggatagattattgaccgaacatatatcaaaaggcgatccttcaattaacattggagaattgatgaattcaatagataatacaatgtcccctttatttgatcaagctgttgaggatttgattgctcaaagcctgatacattcttcagatggtgaaaattatcatattactcgagatgggattaatgaactagacaatagaaagagagaagcaataccactataaactaaataaagatatttattattatcaggttaattgattacccttaagtatattcagggtcttgcataaacagcgtggaactaggatgcaagacccttatggaattactttgagaggtgattatcactatcttgacaggtttaaaaacaccatgtatcgatgatcatgtttcgctatagttactgtttacttttgaacatcactgtaaagtcaaaaaatgaagcaagacaataataaatatgtaaaaaaagtgttaagaaaaactacccctgagtaacggtaaatacaattttgaagtaaagtccttacctcatatctttgtctgatccattcaaatatgttcaattgtactgtaggtttcagggtatcgatacatcaagccgtgttctgcatttctaatctgcacaagccaggctcctggaattttttctacaatcgttaccgaattttctgctggagtaaagaaattgtcagttcctacgattgctagagtaggagacgttatatttccaagtatttgacaattaccactccagttttctaatgcttcagtttgcattcccattacttcaggagatacagactacaactctaacctatgaaaagaattaagggtttattttctaaacctaaaattagcaaaagagaatgtgcctctatctactggtaactaaatgtctctacttttttattctatgttcattaaaaggatatggttaatccatgactgagaacaacgtgcattttattctatatcatttcagtgaccaagaattcttatatccacgttctatcatgactgcaagaaccaatggtcaagtttacgttgattctgaggaggaaatgatgaagtattatgaagaagctaattttgttgactgtagaattaatggttatcctgctcataccaagtctgaaaggaaccatctatatccaagctttatttttatagatttagatttatctttatgttctacttgtaagtatccaattagaaagcttgactacattctaaagcaaacattacacaagataagagaagtgattaatggtcaaccgacggttctatggactggaggtggctatcatatttatcagccaatcaaaatagttaccaaagatcaaaaaaaacaacctctagagacagttaaggaacttgaagaattcatcccatttgtaagaaatgatttgactactgagtttatacgttttgctgaaaaactgtttactaatgagaaaggagacccaaaacacaatccttccattaactcatgcctgattagaatcccagaaaccataaattcaaggtataacgagaaggtcaaaataatccaaaaatgggatggtattgaagcaatagcgaatcctttagttttaccattcatggattaccttatacaattaaaaattgaaaatgaagagttacgaaagagaaaacagaattctgattctataagaaatagcaataaaatagcctggatagacaaattacttgcaactccaattcctgatcacagatatttttgtttatggcacatattgataccctatcttgtaaatatcaaagggttatcagaaaatgaagtgatttctatactaacagaatggttagataagtgtgacaaggtaaatagagtcagatggaaatatccacaaagaattaaagaacaactaagatatgataaaggctatccgcctatcagtctagaaaatttagaaaaggagaactttgaactctataaattattacaagattaatttaccattgctaataaagccttcacatcctccactgctttcactgttttcaccatttatgattactattcttcctctgaatttgttaataatggtgttaaaactaaatctacgaataggttaacattactaataatacgtaaatatttatataatatcgaacctacagccatgatatgtttaatagtaacagtcgttacaaacaaatactaatcgactcagataattacaattagctcaagaagatgggacaaactggtgattcattcaattctgtaattagtaaattaatcaagaatcttaaaggtgaggtgacaaactagatgtctgaattacaagacgtaattataagagattctgataaacgatttagacacgaatcaatggtttccttagaagtataggtgtttcccaaatcataggcaccgaaggatatttagaaattgaatttattggaggagaatgtggtgttagagtcgtatatcccagaaacttggaagatttacacgaatacattaaaaaagaattaatagatgagactcaactatcgcttattgaaattgacatcattagattttacatcaaagattacattgaagaaattgaaaacacattaaaggaactctaatctgtttcgaaaaaaaagaatagtataagtctagctatgcacaaaggagtaatattttattgagtaacataaatacgatcgtttctgtagtcatcgacaatactgactattatcgtgacttagacaaacaactgtagtaaagcagttgaaaaaggagttatggattgtcgaagcagacaactgttccaatgaaagcgagtaacggagagcatctattaaagacctcatattcccacacctgtggagttctgagcgaaatacgaaataatatcggttcgtttatcagattctagacaacttctaagaatgagcgctaaattaggctaggttaataaatcatattatccatggatatcaggagattttgtttggaggaagatatgggagcagatgctccctccatcaatgattcgattcaaagcctcaaagtagaagatatggtaaaccatctatcagatttacctcatggtctgcattgtttaataatatatcctgacttaatgaccctaagagaattttatacctgttatatagggaaacaaatagaagagaaaaaaaggtggttctttttaatcctttttatgaaacagattcttcagttaggcgagccttttctgattctcacaaggcaatagatgttaataaatatgaaaaaacagaatcgctcataataaatgattcattaaaagaatactttgggcaaagtaatccaatggattctaaacagaagttaattgagcttgcgaatcgaaaaggtaaagatggcctttcggtaatagctgacatgggtccatatttttttaaaatggagtatgatgaactattagaatacgagctatctttaccaacaagttttggtaagtcgatgtctggtctttgcatttatcatcataatgattttaacagactttcagaagaacagagacaacatttagtagagtatcattctatagcactaaaactagaaagtcattaactacatatttacaaggttaatgaaagccgctttatcgatctaattccaggtctaagtatcaacaaggttctgattgactagttagctattttcagctttgtgaattatgtcctgctcaataatttttttcaacatagggagttttaaaggtttttgaattagcctatcaaataccgctgttccaacagcccattgactttgtatatctgcaacatcaaaagctgttatcaaaaatatttttacggcagagttaagttctcttatcttatttgcaagctctatcccgcccatgccgggcattctcaaatccgttatgattagaaaatatttatcaaggcattgtttataatgctcaaaagccaataatggattagtaaaagatacagcgtcataacccattcttataataaattccttgtaaagagtagccagctcttcttcgtcatctactataagaatagataaaggcttttgcaccaaactttattttaattccaaaatatttaactatttgtgatgaacttcataaatggcatattgtacccctaagacatgaaagaatttgatcatttctgttcaagaaaaccgcaatggtgtgtaaaaaaaaacaggtacaacttttttaatagctcagattggaatatttatcatatgtcgcttctttctaagggcgaattacaatttttgcaatgtcaaaaacaagtatccaaatcatataaatataaactcaagtcaatattgaggaagaaaatttctaattttttggataaagatttgccgcttctctcacctttgtttccaaatctagatcttaccagattcagtaaggtccggaacatcaagaacaacccattagatcttactaaaaacaaaaaatttctagtcccaccttatctctttaccaagattgcaataaagaactagattctataacctcaaacaccacagaaaaccataaaatccgttcacattccaattctagagagaagaatgaacaattatatataaagagcaaaaagaaaatcaataattataatacgagggccggtggtctagcctggttaagataccgccttgacatggcgggggtcgttggttcgaatccgacccggcccatataaaatttgcatgtttttatttggcaggttgaaattatttgaatactctttcctaaaaatcatattattttcaattgtacaagttctgggagcctgtactaaactagtatactgttttgacaaatcaggcgaatagtaaatatcacatgtgacacaataaagacccaccttcttgaaagattcttttgcacctaatctgatataattagaattaagacctttatgacaatattagcatttggtcaataatttattattgagataccgatatttgatctttgggtagtaccataacctttgcaggataattagaggacacgttgttcaaaagaagtgcgggatttgaaccctcgatccctagcaatagtaatctagcaaatcccgaactactttacgaatgaacaatagtatacgagtgcccaagcaagaatgaattgataaattatagacataaaactgggagataaatccctcttgtcattgtatactctctatttagatgaaagtggggatgagggaaagtacaatattaatcaggatatgacaaaagatggaagttcgagattcttcaccataggaggcataattgtggaagataagaatatccctttattcagaaagcgaatggatgaattgttagaaaaatactttcataatatagatcatttcaataaatttaagttacactataatgatttccttcaaagtaaatatccatttgacaagatgacaggtcttgaaaagaaagtagttgctgatgatatatttaatattgtaaaggaaattaattgttatttactttccgtaacaattgatctgtataaacactagtacaaatacaaagatcgatatgcgataagaccaagagcctattccataatcctcataaaagaaagtatggtcgtcgatggatatctgaaactgttttttaaacaattaggaaaatattttaagagtatgcgtcagctaccaaatttcaaaacgcagtagaggagatgatgataaaagtatttgtttagaggaacatagaaaacagcaagaagagagatggttaatgagtaggagagatttatggaacaaagcataaaattagaaaaatttggatcagcaaaccttgaattggggtttacagaggttctccattgttactttgctgatttatcattctcccataaaccaaatgtgttattttctgtgtcagagcatatagccatataacccatttttggaatagccattttcgggactttaactgttcctcctagttgtttcaccttgtcagagtattcatctactgatttgacatcgatataattcaatattccttgttgttctggagcatgccttttcatcagacctcccataacagcattatttccttcatgatcttttgttgtgattccccaatattcgacaccttcaggtaacatatcagatggaaccttttcaatggtccatccaaacaaatcaccatagaacttctttgatttttcaacattgtctgaaggaatctcaaaatgtactattgttgtcataggacataattaaaatgcgtacttaataaattagtaagagatcaattgtatagttgacaacacctgtcatcatagatcaaaatcctatcttgtagaatctggggacatatgtattccctatagcacatgatcctaatagtatatcttctatacgatttagagtctatcccctaattatctttttgtagaaaacaaaatgaacaggcttcaaaataacatgtcgatattgttgattttgggtcgtttgaccaagacgttttaaatatagcaattacatatattagaaatagttgcaagatgcgatatacaaacaattgattgagtcaggtcaatcttttcctgagataaccgatgtaatttatgacgctaatcaaatggagaaattaatcctaaattcggttgacgtagtaactatcggatttgatgcaatttgggataaaaagatattcaattttcattataaatttctgagagaaggatttgatgtattggaaaagttaattgaagaaagatgtctaaggatacggctcatagttgagaccgcaccggaaaatatagaattcataaacagtattaaatactatgaaataaggcatcttgacaatataagaactaattttggtataatggatcagagagcttatatgttatgggtatttcatgaagatgaccaaagacccgaacaggctttcttcagtaattcactatccttagttaagaaacagcaaatgttattcgacaagatttggaaactaggaataccgctgaaggaaaaaaacaaacaattagaaaataaacaaacgtcggaatttcataaaacgttagctaactttgtcgatgctcgaaccgaaattatgacttttcttgatcatagtaaaaaggaactgctaatcctttcatctattaaaatgctagactattttgcagatgatgaccttttttggctaaaactctcagtgttatatagaaaaggagtattaatcaaattattaacagatggatacaatagatcactaatttaccagcttaacaaaattacaaaagaagcatctagaaaaacacatgatcattttcagatgggatactctaccaaacttggaagtatcgatgagtttgttttgattaccgataataaagaggctcttgagttgacctacgcagatctaaatcaatatagaatatcgtttttgaatgataaaaatcatgttttggttcaagaaattctttttgaaaagtattggaatgaagttcaaagtttgtcaggcatatctactccctaactcatgaattgttctctattccaagttttctccaaggtaaacaatcaaagcctgggtcaccttagatttttccaactttaacaaaaagtgataatttgtttctctttactctttgtgtggcccaaaggcttgcatccccttatttgattataaccaatcttcgcaatttgtttactgtttctctaaatcccatgtagagtaatattttggaaagagttccaaaacaaccgattgtccactcttctgcatattcaatagagtctgtgctattggatgttccgtatttcccaagtactttatcattatcttttccgctataggaatattgaagttaatatcttcatgaatcttaacatcaccttctccgcgtactcctctgggtacatttggatcatcaatacaaaaataaacaatcgtattgtttctgaggttatttgttttcttggactgttttgatgtttctatataaattctgtaatttccagtatcgtagtagtaccatacaggatgtacgtttggatggcctttctcatctatagttcccagatgtagatttaatttgccagttgtaaggaattttactgtttcttcttcattaaaaggtacgccaaatcctggattcccattaaggatttttaacatgtaaaacacggtgtactaatctatttaaattgtatcaggagataaacggctctgttgagcgtaaatccacttaattcaattaaggtatcattaaatcatatttcaatcattagttaatacctctttattgtttcttccctgtactttttcctcatctcccaacctcgaaaagattctagttcttaatttgtagttacaacaaggacagtatacattttcattccagtgtatgaatatctcacaaatgctacatcttttctgtccatctttatatctggatgggatatcatgatttcttttcgctttgaactttacacatattccattacaactcataccgattagaacatgaaaaataattttacaatggctataaatacgtacttaattttgcatttccttagtcaattcgtccaacacaggccttatcttctttgttattatctcgtttatgtcaggacgataatagtgatggttgacaaacacagaactactaatcctaccttatagtaaatctttaaccctagatcattcgtgtaaggtcttataggagagcaaaacttccgcgggtagaagcattggttaatagggttaggattcattcatcattttatttagtttacacatcttattccttatttcatcgaatttactcattgctggtcgataatagtgtcttacaaatacagaatcaggaattcttccttgtaataaatctataatttccgcctctataccctcatttcttaggaaagtagcaaatatctttctacaataggacatcttaaacccagtttgctccttcctagtaattgcaattttaatcgtatcataagttaagggtttttggccctcaactaatgaaatcaattccttattagtaatagatatgaatgcttttttcgttcttcttaagaatatttcagggaatttaaaatgctctaatagtttttcatctctagacaaatagtcttgtcttttatcagaaagcaacaggttaaaagaatcaattgcttcttgaggtcgcaaaccagtaaggacattgaatatcaaaatattagcaaatcgcggatacgattttattgttgttgttatccattctaacatttttgtaaagtcgccatcgggctttaaaatattataaaatccagccagtgaatctgtagcagaccacttaaattggtactttttcttataatctgccatttatcatattttcctgtgaattttgaatatgcatctaacgccctcataatatgtctgcgtttactattaggatatgtagataattccgaaggattttcattcaatatgtgtttgtactgaattgcatatctataaagatcatttatcgtcttatgtttcaagttttgagatttcaagtactctttgaatttaacattattatcccaccgttaacggacgaattgatcttaatactttaaaccacttttgtgatcgcataggtaaattatccctactgtgtattataacaaattttatgataaaatctaataataatgtgactttaattagaaacactaaccttggttttgtaatagacgattgtttcagaatccggcgcgaaggatattgtcaggtttgctggcagtccttctgacaaagttttgttaatgaaagaaagcgacctgttttcataatataaatcaggtgaccttgtatcgatcggattatcagaataggctagatacggtagaaagtaaaacgtctttaaaccgggtgttgaatttcgaaaatcattgtaacttaattgttttaggtcaaaaattgggacttctctcatatttccaatatcgtctttgacttctatttttgatctcgctccttcgatatgactatagtttataccaaaggaaataacatttcctaatccaatatctaaaacaggttcttttgacaaaacaaagttaggattcaatacaatatcagaatctccagatttaatttcatatatgctttcaaggtttaccgaatgagtaaaattactaattgatattgaatcaggatagtcattatcaaacgtattccaagattctatatccgttttcttttcaatgacaataggatgatagaaaataactgatacaagttgcaaattatcaaatgacatatttcttggttcattaatcgtgatctctacatatcgtcctatactatttccagttccaattgaaggtaatatattacctaatgtatcgttagtagtggaactgattatttttgtagttatattatttgaagttgctatttttattgtatagttatattgtattgtgtctgcaagattccagtataattcaatactccaaatagtattatcgcatcctaaatccaaaataactgatttttcattaaacaataattctacttgtgtcatattcttcacaggttggtcgttatcaacttcatcaaaagtatcgtttaactttactgttaaacgtgggtatacagaatcagcattagaattattgtaattgcaaacactaccgttgatggagttagtttcattgacgaggtcatgaatataagaagtcaaaagtaaagcaataatacctattatgacagaaataagattattgcttaacaaattctactctatagtctattgtaaacaatgaaaaaggattaaagtcttatgttggcaagaaaaaccttgccaacaacacagaaatagttaattgatatgaatgtattaaaataatcctcaaacaaaactgcagcacctagttagtaggagtatcatcaacaaccataatgacagacacccgttccataacaatgagacctgatatgaagtactgtttctactcttgtctatatctactttaatattatttctcattgttattcttacataataaatctattcctagatgatcatacaaaatggcggttttctaacaacgtgttaaataaaaacttccttgagtaactgataaaatccagatgtattaacctattagactggaatacattaaattgtcactattaatatttggataaaacaataaccataaaccaaaggcaaaaaattccactatagaaaataatttatcttaattacacgtatatacatactccttctgcaaaaggatgtaggctttgacgaaagccaataaaggtcttgagatgcgcaaacagatctcaataccaagatccaatgcctgcatatgctaattgtgttctcattctattcctttaatttcaattctcagagagaattaacttgagactttttagatcattatttctgttaattcgattatactgcatattataaaattacagtagaaccctacttccaccggaaacttaatcctcacgagcccagacttggcatgaatgaagtgtctagatgattatgagagagtgatagattcgagtcaaatttgtttcacatgccaccgaacccgcataatataccgaacttaatccctccaccgaatccgatactcattaatagtatcgatataatatttatacttgtcttttcttaaaattgactactttattctggcattagattaataaaaagatggaatgttatatcgccttggctacttttgagggttaatttcaatttgatattacattaatgaggattgtgaataaatatatggttatctagttctgctaatattgatattattatgtttgtagcgattttagaagtaatgggtccttcccaaaattctggttctataatattaatatttataacattcaccacgcctataaaaatcataaaacagatgacaaagccaaaaccgatctgaatatattttttggcttttttgtattgcctgacaatacatgcaaggatgatattgaaaaaatatgacactcagaactgcaagagttacaaaaatagagcgatttggaaattcacccggggaaaatgacgagatggtcagcagaataagtattccactaattatcgtagaattaattattataaggtctcggttccatttgcatatcgatttcagatctttaataaatatactaacatcaaattactttatcatttaaaggtttgtaaggcttttaaaaaaaggagaacgttacttaaagaaatccacattatctttggcaaattcatcaaaagttttcgcactctttccagttatgtcttcaacaacagacgtaacttgtgaagcatgtccttctcgaaaatatttgttaagctctaatattgcatttataagccaatcattcatgccagcttctttcattccggacctagcatctccttcagatatgttgacatattcgatctttttattagtagcgtcagacagtatctcggcaattttattatatgataaagcttttggtccggttattgtaaatgccttattaccgactctctccaaatcatcttcagttagtactttcactgcaacagctgcaatatcacgaacatcaacaatactcacttctgcgttttccatcggtaagtagaatgcattagtgttcttaattacaggaccgtgaaaagttattaaattctgcataaattcatttggtcgaagaaaggtatactcaatccctgattcttctataagtttttctacttctctgtggtggcgcatcaattccacttttggattgtcatcgtctgcacccattactgattgtttcactatatgtttgactcctactttctttgcttcattgatcatattggactcttgtttaacagtattaggagaagggtgtgtcagaagaaaaagtctatcgatattactaaaagcgttagtcaaactatcaggttcattatagtctatttgaataaattctacacctggaaaatttatcttttttgcattttcaattgaatgaactgctgctctaattaaatggttagttgaatcattagatagctgttttataacttcactccctaatgtccctgtagcaccggttacgagaattgtttcagtcattctaaaataactagaataaattatttataggttgacttgattttgcccctatctcttattcttcaaaaacgttgtagtcttctatgagtaaaagggtattttgtagcatcttttgggtcaatcgatcaaaggtagaagagaaatagtaatttgaaaaccttgagtgaataacctctagaaattccaaaaccatgtataatttgtatatgcttttgattccgtctatacttatgaagtctcttattgtcctattcttaatgactaattctgattttcaagaatgtgtttttgaatgaattgagtaaatcagagggagaaagcaggatccgtaaatgaattgagggaggtagggagagaacatagttgaatgacaacaaacaagcaatggggagaaaattaaaactacgaacacaaatgtccatagatggttatatagcaggaccaaataatgaaatggattgaatggtctgggattgggacgaagaacttacagcatgagtaacccggttacatctgccagttgatactatccttctgggaagaaaaatgactaatgagtttatttcctattggtctgatgtgaaatctccaaacacaattgatccaggtgtaatgagtttcatagattcttcatacacttctttagcctttttatcgccttccatagccttcataacttcctctacatgcttggcatctctgtaagacagtatttctaaatttacatcttcatcgtcattagcagaaatgatttttgacagatttacaaaatccgtcatattttctcttgtattcaatctatacaagaattttgtcacgccatgttttctgaaaaaatcatcagtttcctcgccaatctttgctaaagcgccccggttcttctttggggcacgaataaaatagatttggattataccgctgagatctctctttgcaaatttgtctgaagtgctcatgcaattcaatttaattagatcttatataaatgccaaagggatcaagagtatactaccattatattgtcatcatgatgagttggtctcatcaatgtttatcggtttaatctgatgctatttttattaaagtctcatacaaatgagggataggtttaatatttaatcatgaatacctccgtaaatgatgaatgatcgggtaacttttgaatgacaatgaaagtttgtcatttccttttgatttcgcaaagtagttcataaattcaattcaatatagaaccgaatcccaacagaatcaaacaagacataaaaatttggtaattggatttaatgccagtatccggactagttaatctttgaaatgcgggttacgggcaaatatgccctgcatccgacccggcccatatttttaacagatcttaaatttggcccaagcatttcgtaaattttgtctttgatttaccctgcatcgtggagattgcgaccttaactatattaagagactataaaaaattaggggttatcaaagcaatatgcaatagacatgacgtcgtgagcagcagttgctgttaattgtgctgtccaagaattattcacaagatcaccttcactgctgaaaaatctaatagatcctccccccagattatagatgtgacctccagaaataatcgagtctcccggattgcaaaaagcttgagatagcgctggaacatttaacgccgcagcaacgatgggtccatttaccctatatatttttccgaatactgattgaggtccaggctcaccttgtggtccaggcggtcctgctggtcctgtctctccttgaggtcccataggtcctgtggctccagttgcacctgtttctccctgaggtccttgtggtcctatgggtcctacggcaccttgtggtccctgtggtccctcaggtcccataggccctgtggctccagtgtctcctttctctccttgaggtcctgcgggtcctgtctcacctgcgggtccttgttctcctggtgctcctggtggtcctgtctcacctgctggtcctgcgggtcctgctggtcctgtctcacctgcgggtcctgtctcacctgcgggtccggtctcacccgcagtaccacgttcaccctgtggtccaggtagactctcggtaccattcacgttgctttcattttgacaattttgatatgggaagcaatatctcagattaggtagactctcggtaccattcacgttgctttcattttgacaattttgatatgggaagcaatatctcagattaggtagactctcggtaccattcacgttgctttcattttgacctaaatttccacccatacttttagatgaaagattgctgcaactgttcgattgagcatatactgaatcaaatggtgctaaattcaaaggacctaaggtaataatgataccaatagtaagcataactttagaatcgaatttcataaaaccaaaagtgttaatttaattttataggtatcagagaattcattatatcacttttttatgctaattgtattataaaatcattaaataacaaattaatagcaaaaaaaaaatcattactatacttatctttatctgatttacctttaattaatattaatgtttttcttgtttaaagcaggtcctgttcagttagcggttcgtaattctctgttgtgatagtcgacaaatagattcaaccaattttttgtatgttttatcttgcaattctttaacctgtagggaaagtaatcatcaaaactttcagttctgtctttaatgtattgcattgttctctcaataatgtttttttcgtaggaggaacgaatatgatgttttagtttcaagaatcgacaggcttgtagataccaggtacctccatctgtagaaactggatgttttccatggtctcttacaatgtatgacagaaacctttcagcaacaaacatgtttctctctagagattgagtgtgcgagttttctataatttatctagaattatgttatcaacctctagtaatctttttttgcttctgttagtaatcctattctttaacgtttatacttaatggaaaaactttgaaatacgagggtaaaatacctattggctctccatctactgatactgtaatgttattttcaaggtcggttaataatgcaatagattgtgattgaccataataaatttcatcctcattatcaatagcctcttccccccttcttatatctgcaagtttatcaagtattttgagtccacccgaattttttactattatagtatcgagtaatccatcatccatttcagctttagttgctgcgttgaatcctcctcccataatactgccatttgataccatcgccatcgtcatattggtcaaaagcttttttacgtttgcatcatcggtatcgttgaaaaattcaatcaattcacaaacattgctttgataggttggtattgtcgcaagtactcctgtaatggttgatagcagacgactgctaattctgtctcttaccattttagacctgtttattacttctgctccaattcctatttcagctgcatttaaaataaccctactgacataatctcctttttcttcttcttctttgtcgtcttttctattgcggacaattgctgttataatgtcgatttttttgtaactatcagttgaagtaacaaccttacaacattcttcgaaatctgatggcaatcctaatgactttactaagatatttctcgttccacctggaaggactgttaatatagcttctgaattaacatattctatatgaataaatttggacagatttacatcagctgttttgtcctgtaaattaaattctttatcataacttattttaaaaaatccatttgcaacttcattgagcatgccgtcccctccgatagggattatattggtataacctttttggagatattctcgagttagagtggtaccatcgttggctttctctgtaaatatgtattcgatgtcttctccaaaatatttttttaaaatagcatgtttagaatcccaatctttaccggtttgacctccgcttgaatttggatttacaataactatggatttttttttagtcatatagaatgccttctttcttttaaaagtccagattgccactatatttgtttataggtcatactctaatatgattgtcaaataatctcataagtaaatttgagattgatttacaactctttttctattttaattcaatgtataattcataccggacttcatttttagtctttactacatcatatatcttatagacggcaatggatatagaaatagtatttaaacaaattactgttgcatcgataagaaagaatcccaaaaatctttacttcaaagaggatataaaattgatgctatgagaattgcagtgatggttaccggcctgggcctatttctaataatacatgtcataacgtcaaactacaaaaaaagatatatacaattgcaatagataaggcaaatgcactatagcatcgctattgctatgactctgtctttatcccttttcatggtatattattttccacaagcatacggtgtgttccatcgagaggatttcattataactgacatgggattaaagaatggcaatccattcatgacggtccaaggtgaggcaggaagatcggtttcagttgatatgggggatgaatcgttttattcctatacatttgttactgataaaggcatattcgcatcgagtgtagcattgggtgaagacgaaaattctccatattattcagtcgatggattcgaggtagataaatttgaaataggagcatgtcttgaagatagaaccgctacaggtgagccgaagtttagcggcaagactgttgaattcatcccaagggggttggtttttgagaatgtttcaaaggcatatgctatccaggtggtctcagatgacccagatgatgattgtgaaagtggaaatcatatatacaagattttttcaagcaagtaattctagcttaatattttttatgggcaccactcgattatctttaataatgtatatgattaaacatactgctttatacaataaaacatgatctttaaaaaagactcaatctaaattccacacacagggacaatgaaatattttgtttaaaaacttccacgtgtcattacaaggactgaagaaaccaaagtgggatttagcaaacgcagaaaaaactgacccaacaaaactaatggcctatattgtgactaaaaacagatttcgagagatatattctggaagttttatttctaataatcaatgatgaaatagacgccttcaagctataagattatcttaagttaacagagcccttctagtacaaagaaggtataaataaaacatacttaagtaaatggcaatgagtacaagaatcactctcttgataacgatcgcagcagccactcttataatatcgttctcaccacccttcaatgagaagtacatactaatcaaccgaaatcaagactaaactctaattattgcctaggatttttattccttcgttcttttatatattcaaaaaataatgatgacaagccgccagcaaatcccgctcctatcaatgttatcattgaaccataggccaaccaaaagttttttaattcttcttgaaaagttagaggctcgatcacattaattgtgaaattaccacttttgatttcgtatcctttagtatcgataaatataggatatttattttgaaattcgataaaattcgaaggaaaatttgatccgaatgaaatattggccgtaaccggaatagaatgggtccctaatttagcatcttgtggtgcactaatttcaatttggatgggttctgtagttgaccccccgatcgtagaattagtaagattatcgttttgatttattaattcaatcttaagagaggtataattctcaaagtcctgtagatcggtaatagtagatatcttgccactacttgataagatttgcagtcctatagtttttgtttcaccctttcttaacgtgatttcttcaggcgatgtagatattgtgaatgaatcgctaggaatatttatccaattagttagatctattcctatggtcccatcatcatatgaaactaaattataaatcatcatcctgtatgatgggctaacagaaatcttttccatatctagtgaaaagtctacataattgttactctcttcaaaactggtataaccactatagttttgttgaacatctattattttatattgacccagagaagaatattcaagtaacaatttgttccaattttgcaaattttttgaattagtattattaatccattggagttctaactggtaatcaacgccctctttacctgttgaagaatctctatcgccatctattaatattccgtatgccacagaagagatattcttgatgtcattatttcttagtaggttatcaccgatccacattgtagaatttaattggtttattttttcaaaaaatgcaaccctttgtatatctagtgccgacatagagaacgtatttaatgacttgttttggactatcgctccggtttccaaacttattatcttaacatcagttaactcatccattatttcttttcttggaaagtcagaataaacggaggcaatagatattgaaatagaatataacaacaggcacaaaattaaacaaaaaacaccagttttaaaatctaaagaacgttgacagccaccgcatcttctgaacatatttggagttaataaaaaaagttatttgattgttacttgtaacttgactccacaatttgaccctgtataataattaatagaaaagaagcacttattatttcaagattaactatagataggtttaatccaatattaattcttcaacacttcggctataggagacaagatgattcgatttttgaattaatcttctcaatactctaacacaaaagtaaataagtcaaatttgttggtcctaagcgaattaaataaatattaaaattgatgggttgtcttaagatactaaatgctatttaattacattgctttatcatctttgtttatttttttgatttcatttctaatcggagataccttcatgaacaacagttcaatcctaggaatttcattccagaaggattgctgttcgcctctccttttatcacctatggcctcttctggaaataatctctatatagtatggccagacaacaagactggaaattgggaattattttttactaggagcgtagatggaggatatacttttgagaaaccaattaacataagcaataacacttccttttcagccaatgctactataatatcgcacgaagatcatgtttccatcacatggtgggataataaaaccggggaaatagaaccgtttgtaagatcaagtcataatagcggtgagagttttaatagcgctctaatgttaaacacttctttcatagggtagaactttcaagatatagttagaatgacgtcatgaaattagtaatatttactaaaaatgtatgtgaattctgagattaggcaaccaaaaagtgtcttcattcgattgttaatcaagataatttcatgcagttttggtgaaggctttaagtcatgaagtcattaaagtagttgggaatccatgaatgattatgaatattatgatgacgtgacagtatcctgtgaaaaatgtggtaataatgacaaggcccatttatggtttgataaaaaagagcaggtgtatttgattagttgtgataattgtggtgtaaatgagaagaagatggtaaaggctgcacaggctgctgagaacaaacaggtgttttgttgtgaaagttttaaagatttcttaaatcaagaattatatattgatgaaaatccgcgagtgtttgaggttatgagaaaacttttctactattttgaaggtggtcctaatccaattgttgaacagataaagttttgtcctttctgtggggttaaattggattttgttgttgggatggctggatagccagatgataaagttttgtttcaaacaatatcataaattgttgtaagagctttgagtatgattgaaagccaacatatcttgatatttaactttggtttttctctaatgcatccaccatttttctagttgtattcagattgtttaagttaaacttgaagtatttcgaatcttgcccttgagttttcagaactattagcctattcagttatcagaatcatgcaaattgacttacatactatctgtatttactacaatgcatagtaaagagataaattcccttgtatgattattaccatttcatacggaatagctgaaagaaaaaagaccgcctagcacccttagacatgaatcatccaactcaattaaacggcctggaagtagtcgccccccccccccattctctttggaaacatgatattacatcctattactagtaaattatgtagcttagtcaaacttttgtgttatcggatcacatttggaatatcgatctaaaagtagcgggcgataattataaaaacagaatttgttcctcttgatagactagaaaggtgataatcaattaagagataaagaattgaactaactcgggtttctttgcaggagtgtttatcccaaatatgtactgattatagtcatcaccatagtcaagatttacctcaaattcagtccccactggaatatcacttgatttgaatgtaaatatctttgaaacagtttgtccccctgggaaatagatatcatatgccggtttaaagatattgtcaggataattacccacgttgattgtgattccaccgtatgtgtccatcggtgactggtttgtaacttcaacaatgaccttgaaagtacctattgtatttgatggtggctggttgcttccattagaacatatttcaaatccaccattatatccgctcataaattctggtgtgtgatagtttgggccttttcctgcttgatttatgtatctctttgaaggatcagatatttttgcatcagaacacccatgagtgtatcccgaactgtaagcgagagtattcgatccactgttaccatcatcatctgctttgcagtccacaaggttaggataggtcctgcacagatcatctttatacccacaagttttcatgtcaggtctaaaaatcatcccggatggacagccttcggaatttgggatgcagcgtcctgtttcatcatcatcaaccgtgtgataatcttcaggacagccccctcttggaaaacactgaccatcctcattcatagcaaagccgtcaggacaattaccgttttcatctggagcacatttagacaatgaaggatcaaacaagcaatctctatcaggttgtgaatcagaggttccttcttctgccgggtttatatcattaatggtgttttgttcgtcatttttaatattcgaaccagaaatagatgcattttcagatttcaattgatcagtattttcttcatttttgtcaggtaaaggaggattatctgagaggatttgtgctgcgctttctggtgaagaactggtttcattagattgcccatacgcactaagacttggagtgactgatcccacaataagcgtaaaaattaataaaaaaatcgcaagttcagtataaatacattgtattttttttcctttcaccctatcgtaatcaatatattgatacatatcattgatttttatcaatatttaacagtaggaattgtaattctaaaacatttttatatattcttctagtagtattttaacgaagaatttgttgcactattgttaaacgagttgatgaatttaactagggccaccaacgacatttttcccttgaaatgttctatatattggatatgatgttgttgaaagaaaaagcacccataatatttagagtaatattattggaaccatccttgataaacgttactaagtatattttacatggtgggggtcgttggttcgcatctgacctcgcccctatccgttgtttttaatctgcgataagatacaaaacaatgcgatgatcatcatatgttcgacatgatagtagtttcagggggagcccttttaaatccttctcagatcaggtactatgacattaatttgactatcataatcaactatgtttaattatttgtatacatctaatcaatgaatcacaattttgtggtgatggccaaacggaaacttctgtttgaatcaattggctcctaactaaccaatttttcctttgatataagtcagggtatatgctaaaccaccacagataacacctatgcttaatattcctatggaaagggctattggagtagttagtgcgtttaatacgtcgacattctgaggacctatctttccttcggtaaagacagtcaatacaccagaccctgataatcctgcaaatatcatgagcaaggttgtcaagggacctccaatattcataccgatcagatgaatccatgccaatacatttaacatcccagaaatctggcgcctaagattgacctctaagtgaatgtaaaaaatggcggtaactgctatggcaactataaatataagataaaacactatcccaaggaaaaaccattttgcagggccttcaaaggataaagatagaaactgtatcatgtcaaagttatttgcaaaaataaattgggacattaccattgataacgcaagtgaagtcattatccctccttgaattatagcggtaatgatgaatcgattaccccattttgtcttatgtatatcatttgtcataagacattgttacctttggaagttattatatgttaaattctactgagccgcaatttaaaataacaaatcctatctcctccatgctctttattgatttataaataaaaattgaatccatctattgtgttaaatttgtttcacaaacctcgggccccattaaagggagtacactatttctgataaataattgatataggaaagttagtctgatttacttgtcatatcatctaattggtctaataagctactgactatatctaattcagatgttgcctcaacgacatttccatcgtttagtgcagtccttgcatcatctacatgttgttgtacctcatctaagcaaatgggaggacaatatgatacactagcagatgcgctagaaaaaccatctgataccatgctaccgcttgataaaatgaccgtggatattatagctaaaaagacaaatgaatgtttattcattgaaatttaattactttggtaaatttatacattggttatgattcaacaattataaagcttgagaggatttttaggtgaaatttattgaagagattgatcctatattttatactttcacaaacctatacattgaaaaatgtgaattaattccctgcatgatatgactttatctttcgagtaaaagtaaaaagttagcactattatgttattttagcactagtttatatattatatcggcattgctagtgatatgaacaagaaattaataacaaagggtttgatatctggtacagtaatgtttacaggtataggaattgtatttcctgaactatcggtcggaataggcagtatgataattggagggacatcgattggattcgcgttgcaagttttgaaggaatctgcaagaagaaagatagacaagatgatcttagaggagcttagataaagacattccaaccaatagtaattcttgtacctaatccaatggcaaaacattttaactttttttatttgatcattttcttgattaatgttactactgtatcaatttaacttatattctgattatttttttatcacttggtcgttgttttgatgatcatgtaaaatgattcaaatttgttatcagctttctattcaaataattaattggtcgattgtattttaacttattgaatagaataatataagactactttggtctgctttgatttctttggcgacgtttaatatgtcaaaatagccataattttagctctcaaggttagtaaattctctttatcaatagcaaaaccatgggttattatcttcccatcatcttgatagatgtacttagcaatagaatacatattttcataccatgatttgccctcatgttttttaaataaatctgtaactgttacttctgccttatcgaccatgttctgttgatgtcaaatcccaattactaaattattaagatttcacaattaaaaaaaatttctgctcaccgaaagaatttaatttgaatcagtaattagaacgaggtttaactgcaatacacctcctatttcagtggagctaaatccattgacaaaagatagatggatcaagcgatgacttcacaaatgtctcataacctgatgttgaccttccccaaaaaataagttatgttaccattaaaaatactagtataatcatcatatttaaagtgtgatttaataataatgcccattacaatgaacctgaatagagacctaaaaaaagaagttttaactcttaccgaatacttgatccattgtaactaccttaaaccccttttcgtgtaaatagttcatttccgattcaaataaatcaaggcttgtgctttgtgtatcttttatgtctccaattttatgataaattattatcggcaagtgactgttttttccatctcttttactatactcggctacatattctttaaatttttgtaacatttctgagtcagagtagaagtgttcttttttttccgcgtcgtgactccaaccaactatggtataacgtttaacactttcatcattttcatatctaatcttattacccgggtcccctcctgcagttcttgcaaattcataattgcttgaaacaagatctaaaatttctgaattgtcatctccagaattaaatggataggaaaaactattcacttttattcctctatcctctatacatttctttgactgaattatttcattatgcgcaacacccgtcattatattgtccaaatttgcatgactcatggaatgagaaccaatctcatgtccttcagtgtacagattctgtaattcattccagcttattctgttcttcttatccatataatcgcaaactacatagaacgttgccttgaattcaaacttatctaggattggttttgcatattgatattggcttttccagttgtcatcgaaattaattattgctattttgttatcattcaaatttggatttagagacagttccccaggttctgtttttatgctgtcgagtttcatttgacgattaacagaatcatccgttttttcactaaaatgaggactagtagagttcaataaacgactgcttgtctctaccatttcatttgtcttttgatccagatgttcattattttgtatatgatctggttgagtttcaactgtcatatctgttcgtccattctctgataagttaagatcatttagttccttagtagaatttgtaacttcatctaagttagaataatccatagtcaaatcagaaaatgatccaaaattaaaaggcactgaatagtccatttcttcaggaagagaaaagcccgatgcatcgttaattactatagtaatagcgaagatcgttaacgatattataatgccatgaagtgaaattagaataattcccaatatctatcataatattgattatctgattgctaatatggctaaggaaaaatttcatcagcactttcaacaggatcatttctcataaattttatagtgtatcaacttctataagatttcttagatgcatagtcatcatttaaaagatctactacattgattacttacaattagaccctaaggaatttaagaaaaggccatacagctcgaactcatcttgtatgtgtattatatttggattaatttcttttactaatttcaataacacttcggaattacatttgttgttatacgaatactaccgtaatctccagagccatcagaactggatataacaacaacgtctaaattatttgagtgtaaggatttgaccaagttatgggaatagcgaccaactccaccttacatcagaggttattcggtacaaaccattaaaattttcaagaaaaatcattcactctgtattatttacactctataaagtatatcatttttaaaatagatttactggactctcgaccaaagatcttttttaataaggttggacaaacatgtaatattttgattagaacctagtctagttttgcatcgacattattcttttgattcttgttatagaatctaactagcgctgattagggacgcctgggtgtttggctgatactataaaaagtttgtttcctaagatataacaatgaagaccttcattaacattagtattccagtaatcctaaccattagtttggtattattactaaatatgggaagctccaacatttacggacaatttatggcacagacaaaccaaactaatcagacaagtggacaaaatactactgaacaagctcaacaacaattagatcaggctaaccaacaaatgcaacaagctgagcaacaaaaacaacaagctgagcaacaattacaacaatcaaaccaaactcaatcacaacaaggcaatcaatctaaacaacaagacgcagaaatgaatgaaaaactacttaattatacaaatgacgctattttagctttaaatgaggacaatacaaccgccgctcaagataacctagtacaaattcaaaatgcattaatcaacgccagtggtaaacaagtagtagtagtcccagctccagctgtatcatcaccatccgatgatgatgaagattcggactaatttttttattttattttatagctttaattagtcgcccattatttaaaaaccgtttactcattattgagactcgaatattttgtccgcaataattaaagcatgctgtgtttgaattagagcttactaattagctaacatacagtaatccagaagaatagcagactaagaagaacaatttatctcatttcaagaaatctaatacggcttctataaactacatattataaatgaaatattgatagaaatagagatttattacatagtagtggtaagcgaaaattaaaagttgtattcagtatacaggtcattatgatattcaaaaattcctccaaataagagttatatcactacgctaggaatgcagttaaccaatgctagatacaccactgttatttctttcattcccagtattccaaggagttataatcgatgaaccattttctgtagatgttattttggaaccagaggaggaattatttttaaataaatcagattgtgcattggcaaacaatgtccatgccgacattgttgccaaaatgataattatcgaggtgaaagatattacaaagattaatctatcgttcatagtataattgcttaaagaatatcttttataagccggtatattattcaaagtcaatccggcaatccaataagatgaatggctggagtatttatttttgttaagatgaaaagattttacaaaattgaacaaatatattcatgccacggaaagatcaaacaaccaggaaataaccagtgcagaaaagactaggaaatgaaagagaatacatttgatatatgttataatagattcaaaggttttcctcaattattatcttaatcatgattaaatatttaccgaatcgatcttaatccagaatagaaattaatatgataattgatcccatacctcatggttcgaagcctcttctcgaatccaagtcagcatgctccttttttgtttccaacttgcaaattcatagaattaaactagtctaagcatctttattggatttattgtttagtgcgattacatgcggttatgatctgtatccgacccagcctactgaataattatgaacaaatccaaataatgaattgtttaatgttagataagtaaaatcgttcaggaagtataggtaaaatttattaggagatactaggacttaaaccaaaaagaattggaacgtcttttatgtaaaagtcactcatcaaaatagagttgaatttattttacaggatagatcaattttgttggaccaaatggactatactttgggtcagctgtagctccatgtaatgcatcatcatcatatttatcatgtgcttgttgagtttgattttctcttatagctatctcttccaaagctctttccggtgttaacccaaatatcttttgcatgattccattaaatcctcctttgtgctcccatttaccgtcataatttccataataaccctcttggattatctttacatgacccatttcatgattggccaatgccaacctgaatcggtcccattctctactttctgccggatttagttgcgcttgaggattaccgggaaagactatgttaatgtcaattatcaattgggaattacagtcaattgtattttgttccgatagattgcctttcaattcaggcggatcggatattgtaccggcccaaaatatttcgccacttctttcatcagtgagtatatctttgtaagtcgctaaataccatgattcaacggcgggtaaatctttcaatatgtttcccggtctaggaaaaggtagaagatctatatcgccattgtagaattcaaattgtttattaccacaatctggtttaacttgtatatgtgccgtattgattggactattaaaacatgccattagataaggaggacggtccaagactttcgtttgaaatgatgcttcataaaaccctgctttcatagggagaaaatagaatatacccctcgtgggatttcctgtaccagaagtaaattcagcacctcgaggaccgttagtcataatacaagtaactattgtatttggatctattccttcacaacgaacaggaattgtaactggttcaccttctttcacacaaaagtttgactcgcagatctcgtcaactgctaaagcagcaaattctgtcttgttttcaaaagaaatttggggcttaccttcatcttcgctactttcacttttctcgggattattgacatcttgatttgacttcaacatatcaccgatctgagggatattctctaaaccacttatccctggtaaattttcatgttgtatatcaggtataagggaggcgtaagtgaccttcacaaaaaataatggaattaaaattaggaaagagaaccctaatggataaacctcatcgcattttaaatatttttttaatttcacttggaatttatgtggattattggcccatttatgcactatttaattctcatatactatatcttattattatattatacaaaaaaaagtgcttgcttgtatcctctactaatagatttgtgggaatcaagagattaaagcgattgatttcagactcgcttcattcagaaattctagcgataatcgttttatgttaaacgattaaagtttaaaaacaagtgattacgatatgttaaactaatcattaataataaaaaagtttagactacttctaaattggtattactattcttgtcaaataacattctattgctataaatattgtctccttgagtaaggcaccaggagaggcattcgaatcccattcgctgccagtcattattgataaatgaacaaaaatcaaattcagtttttgtgttaaatttgtttcacaaatctatgccccaaacctttaattcgataaccgcaaatttgtaccgttaacaatataaattcgacccgacccacttcaaaattataggataaatcatacctttacttgtcaacgtttaattataactacctcacgtggaatcaaatccgagaccttccttatgcacttgtttctttgtaattaatttcaagaacaaagcaaactaatttcagaaaataatagatgaaattagctattttggcatttttgaaaatgcttcttctgctgcctttttcatttcttctttagtaagatccttgatgtgtgttgctattgaccaaacatgtccaaatggatcttggatgattccatgtctatctccccagaactgatctttaactgaatctaaggattttcctccttcagcaattgcaagattaaatgtcttgtctacatcttcaacgtataaaaacaaggaaaccggactcccaccaatagttggtggtgaaagacatttcatttctggaaattcatcggataacataatttttgaatcgccaattgtgagctctgcatgagctaccgatttgttatcgggcatcatcatggttccgttatctgtagcttgaaatactttcttatagtactgtattgcctttagtccatcctttacaaccagcgtgggagtaattgtgtgatatcctttagggatctttttcacttgactcatagttacttctaattattagttgaatttattatagctggtcaaacaatgttcacactagctatagtaataaattgattataatagtatatgatatgatctaacaattatacactgggtaatataagttcgtgtatcttgatcttttaacgcccatacattagaaatagataatagaactgccatcgatgatcattctcttaatatacacttgactgaataaagctaatcgttcttgatcttactattcagatgaacggttttatttgaatcatgatcagttttgtattctattttgacctccaattctattctaagaacaaaaactgaagtttattgataattctattatttatacttctttcaaatatgtgtcatattaaacaggggaaacctggagtcataaagtctcacaatgtcaaatgatcatttactcaacaaaaataagggtaagggcattgatatatcaactttgatcgaagaaggctaattcgcttaacttcattaatagcaccgtggcctcatcctgttgtcggaggctagtccttaaccaatcaaagctgttccttcaatgaagatggataagacataattgtattttcttattcatatgatgataataaaacgaatcaacatataaaaccaggcaaatattctttataacaataaactgttagaggaatccattgtaatgctaaatccaacaacaacaacaacagcagcagcagtctcaatagtaattattactgttccatatccggtatactactgaattaatcattattattgagtatgatagatgtcctctgcttggataaatcgattctcatgattgttctattgagttacaaaagaagatccaaattccgataagcatttgatctattttgaaaatagtcacaagttaaattttgatgtaaacctatgacttcccatcatgtaatcaaattttatccctccattgtagacacagataatgactaaaagttttttaaatgtgtaaataattacataatagacttaacggctatcaatcgcatcggtatatttattgtcatgtattaaatcacttctagaataagcttttgtataatctacgttatgaccaagaattattcttgtaatacctctttctaaggtaacaataaggtctagcaatccatttctatcagggattggttttccatcgggagttttatttctagttgttttccattctagatctattgcgaaaatgtcttttgtaatgaatctgtttcttatagttagtatggttaaagtcgcatctttcaaaactgatttgaacggatattcgtgtagtttttcaatctgctcttttcctttgacgtgctgtcctaatacgtcagtccactcaccatcttcaacgaacaattctgcaaattctttagcatcatgtctattccaagctatagtaaacttttcaatgagagtgtttatttttgatatctcatcgctcaatacatatgatatatggaacaaatagtatattaaaagtgacaatacataagatagtttgtctatgtaaccattatagagtcaatatcctactacatgttggacatggtatagaaaataggttttagaaatttcctactgtaatccttatataatatttaattaaattgtgtctttatattaaaactatcatgtatggtgaaattaactatttctggtcttttgacaggactattttctccgaaggtatattgattataatcatcaccatagtcaatatttacttcaaatcctgttccgatgggcacatcgcctgatttgaatgtaaacgtctttgatgtcatatgcccggaagggaagtaaatgccatatgctgatttgaaaatattttcgggatcatgatccactctgattataatgctgccggctatatctcttggagattgatttgatacttcgacaatgactttaaatgcttccttgggtgtcgaatctgatgatgaattattctcacccgagcacgactcaaatccatcattatatcctctcaggaattcatttgtatgataacctggccccttacctggttgattgacatatctttcagaagtatcagatacttttgaatcagaacagccatgactataaccagatctatacgataaattgtttgttacatcgtcctctttacatacctccaggtcggggtggttttgacaaacgcgatctttgttctcacatgatggataatcgggattcattataaaacccgggtcacaaggaacgttatccgggatacatcttccgctttcatcatcttcatgactatggtattcttctggacacctatcatgacttggatagcactggtcatctccattcctagaaaaaccttctggacatttaccattttcatctggagcacatttaggcaatgaaggatcaaacaaacagtcaccatcaggttgcgaatcagatagattctcttcagtttgctttagttcagaagtggtggcactttggtcatcattatcacttgaagaggaactggaagaagcatttttttccagttgggtgtcagagatgattggaggagattcattttcttggaaagaagtgaaatcattggattgcccagaagcgttgaaaccagttgcggccgagcccgaaaaaagtataaaaaccaatagaaaaattacaagtctgcaatcaaaatattgaattttcttgctttctgtttgaaaagaactagtattgctatggatatctatatcttttatcaatatttattactatgaattgtaattctaaaacatttgcaaatattgttatagcagtattttcacgaacaatacttttgaggctttcgcagcattggaaagatgggtggaaagtcatttacctgaatggtacctagcagttcaaatccgtgtcgttcataaagaggaatattccttttattagatgattctagatatgctaaaacattatcgttgtcaaacctaattgttgcatgttccaaaagggcagagccgagtcctttgccatgatgaagtggatcaactccaataagtggcaaataccaatgaggctcatttgggtgatggctgcccatttccttgaacacctctgaaataatgctctgagcctcttcagaagtggtatcgtgtaatagtccgagtattgtatcaacgtcaggttcaacttttggaggtagccaaagagctgagccagaatagtttccaatgtagtaagcggtcttatgaacaaacgattttcctccaaaagcctttgcaaatttagaaaaatgtaaaaggtatttctgcggatgtggccagacccaacgagtcgcaggatcagctacaaaggccagttttagagcatcaataacagccccttcctctgattcagtagccgttttgacatgtgaaattgtcattagattatctctataatgtatgaaatcataacattttaacatttaaggtccagtctgaattaaattagtatcgttttatgatttcctctctatgtttttcctcattccaaagcctcgaaatgatcttgtccttagtttatagttacagcaagggcaagaagtttcatcccactttataaaaatctcacatatgctacacctcttctgtccttccatatacctggatggactattctgatttcttttggccttgtatcttacacatactccattacaactcataacgatgagaacgtgaaaaataatactgtagtgggaataaatatgtactcaattacccaactcttgcatcaactcatccaaaactggtcttatcattatgtgattattttatttacatcaggtctataataatgattgacgaaaacctcgaaattgtaccgttaacaacatacaacctacttagcgagtattaaatatacctctttaattaggcccgatgttaataatagtaaagctaaatatcctcaatttagacgatccaaaagaattttgttgaatcgggcactatgaaatgtggtcctcttatggtattaatttattcccatctgaaactaacctctattacccaatctatcttgcagctagatttgtaacacagttactattcacaacaatatcagtattatttgtatcatgatcttatttagacccgattatgagtttcaatttagagattcaacaaaattctagtattatatttgacagatgaattgagtcaccgttaataatacaggaaacaatcgatttcaattctgatagttaggacttaaactaggaaatatgtgcaaattgacaataacccggaccagacagatttcgcatatttttgtcacctttaacttctacgacaacggtcaatatgaagattcgctatcaagacacaattgtagatagagtcctatgatgctatgatgctatgactcaagacttttaagaaaattctcgctagaaaaattcttagatttgttaatttcaatatttttagggtttcttggtatattagacttgatcatgtatgtgtaaatgaatactaatcttgtacctgccaaagcccagggatgttgcaatttatattctgttgaccaaggtatttctaatatatcccatgagattcctgaatctgtggaacaatagatacccctattatttaagcaataaaactcatcgcctatattaggattggattcaagaatagaaatgacggttccttttgggtttggtattccgtcagtaatcagattccattgtttatcattagacgaacgtctgtataaaaatgactctaaatcttgtatataatgtgacttccaagcgttacttgcggcagatgtaatcatattgtaaggatcatttgaattcaaggcaagtccaaataggtaagtatgaagatcaagtccattatcatcttttttccatgaattagcataatcatcactttcaaaataaccatctccagcagcagaatagagtcttcctggtgcttttttatgagttcttaatacatgagtatcatatggactatactcaactctatcaatccaagtcttaccaccatcaacgcttttaattagggctccagcctctaccgcagcaaagatatatccatttttgttcttgtcaagttctatccatcgaacatgatgagtccatggtctaggaggaaaggaccaagtaggagatgatttcaatttattaaatccatcaattttctcccaactttgaccaccatcatttgacgtgcaaattatactgggctccattccaacaaataacttgcctagtcctgattctcctttttcagtcggactagttgaaacagatgtgatatgaaatcctggactgtttagagagatttctacccaactttgaccaccatcatcagttttccacagtcctgcgtcaaaagttccgcagtacgctctattgtgattttttgcatcaaatgctattgaattaggatggtagtgttttaattgttcacccattttccatccattttttgtagaatatagcaccaagagtgaatcttgcattgctgctagaagtgtggtcattttgctaatcacaactacccaatcatattatttgaggataatgtaattattttagatattgttaaccaacacatacatttcttctatatcaagaaatgttattgaataagcctcctataattcacaatatctttgtttcatgatctgtttcttttcatgaaccaaactcagagacagaataaaaagtagtatggaaggtcgtaacacaattctagttaataaattgaaataattctaaatattctaagaataaaaaatagatatctatgcgggagtaattctataaataactccattatcatgtgatagtatatacaagaatccatcatcaggtcctgttaccagatctgttatacttccaaaaccattcccaaagactatagaagattgttcctcttcattatcaacgactaaatctggaatcatgtcaagaatgaatccatttctctcgggattcatttcaaaataatacaagaatccattattattgtcgcctacaaatacattattggaatatgcttgacccaaactagtagagtttaaaaattctatatcagtgagagccggtggagctagccatgtcagaattggatcagcataatgagaaccttcaaagctaactaattcatcttcagtattaccagatatagaaattggacccattattgtttgccaaccgctgttaaatcctggtctgacaatattgatttcatcatttgatgcaggtccgttttcggtatcccagatacttttagtaaccgggtcgaaggttaatccaaatgaatttctaatgccatatgcaaaatatttacttagtggatcactaggatcggtggaaaatggattgtcttgtgctattgttccgtcaaggagatttattctaaatatgattccggtatcatcagggctaggaccatcctgaaagttttgtaacataccatcatgattcaaatctcctataactccataaagatagttatccggtccaatcattaattttccaccatcatgattgggcccaggtattgcagggagatctaagatgagagttggactttctaatgtttgaccattccaagtatatttgtaaattctattttttaattcaccatcttcagctccaagttctgtataataaaggaaaacattcttcgtaataccattttgaatagaacgatcatcatttcttacattttcatccacagcaataccaagtagccccctttcactttgggaatcaacagctatttccaatacgggctgaggttgtaattggccatttgaaattaatcgtactagtccgtccttttctaaaaccaatatattgttgctatctaaaaaagccatactggtaggtgaatttagaccctcaacaaatgattcaacctttagactttgatcatcaacagactgtgcaaaagcaatgggcaattgatattgcaacaacaatcctgtcactaaaactaacatacaagagattatgaaaattttaatagattttttaatgcagaggtcagcattattattattgaaatcatttctaaatatcattatgtttatcaatatacctgatagcataaataaggtatatttttgtgttcacatattaaaaaaatagttaagtttaaccttatagaaacatttaaaaaaagatacaaaatctaccgcaacaattcataccttaaccttaaccatgatttaatcaactgtgcggaacttatattatatatgagatcggatttattaactagttgtacgttcattgcagtcttaatctagcgaatttttctttgaggactaaaagatgatacaaatcatgactatattcttcttttctataataattgaagtggtagtattgattacaaaaatagaaaaatggtcttgaaatgtttaggtattttaattataacattttatcaaatgttgttattgttgcatatctgctgtattagcttgctctgatatgacctcttctgtaaactctctagtttctgttaccggctttttctttattactacttcctcttttacatagggagtctttgaaacttctacttcttctttctttaatggtatttctatctcttctcttgaggtaactggttcttgtgatgtcgacgtatctccggtcggtggtcttcgctcgatagatatctcttcatgtgttaccggcacctcaatagtttgtgtttctatgacaggttcttttgtaatggttgcatagctttcctcaactcttttgttcacgtctagtctttctccagttatcggtacagtcacttcttcatttcctgcagaatttgatgcttcattatccatattctgtgatgatgctggaaatgcttctccctggtacatgcttgctgcctcttcactagaaatactgaacctgagaatatcgccatcataactttcaaccttctctttgggtatgaaaaatttttctttgttaaggatacctttttgtacaaaaacataaccatttgaaacatcttgaacctcgccaaaatcctcatcatttgatcccctggcttctttttttataacatcattccaatcaataattgaactcataaagttatttatatggcattgcttatatagttaggtagatattactatcaatggtaatagctacagttagtctctgcagtagtattctttatcacaaaatagcaatatagtatgtattgatatatcattcaataattatttataacatataacatatctacatttgaggatcactatgtcccccaccagccctattgaaagctggacaattaataattaaccttattatgactagttatgattaaaattatgtttactagtgccactgttttttagaaaagcatagaaaataattaattatatttaaaaaagaagagaagttagatagtttccttttactgttgggctagtgcgttatttccggaattatcctgattttggaagctgaaattatttcccgaatttttggtattctcgcctgaaactacttgactgttctgacttgaggattggctttgaccaatgccttgtgatgcgctatttccattaccgttattgtcatcatctgaattttgtgctaatgcgttgttccctgagttcttttggttttgaaggtttatgttattgcaagaggcatccgtgttgtcacctgaaatgcattgtgaattctgtcttgaagattgagattggcctataccttgtgaagcactgtttccactaccgttattgtcatcatggtcatcatggtcattgtcatcattatcgtcgtctatggatttagaaccaaaatcaccatcataatcgtcatcataatgtgctcttaagttcttgtcacatgcttcttcattatcttcatagtaatcttcgtcatccttacattgatctatgtctactccatagtgtgcaaatgctgtctggaaattagatattgcaggaccaagggtcattgctatcgcaaatactgctacaactaatactgcatttaattttgtgttatttgactttaacattttaatcgtgaattatataataataacatataataaaataatttttgaatatgatcaggtcatatagtactagtgcaagattttagaataatattctataatattcactgcgaatacgagcttagttactaaatagtattgcccgtagatatataggtaaccacttttgcgtccatcttgattttaaacgaatgatctcattaagagataattggctgatgctgtttgataaagcaccagatctctaaacagatatctcgatagatggaattgaaagcgaaggtatacagtcttcattgtatctaatacatgatccgttttgattgatatcgcttttctcgtatacaatagcattttgctattctatttcaaattcacagatatatttaacaacatgtttgtactccctccttcttaaatgcctatccggccatgcaattgaattcaggataattacatttttacttgaaattgagttgatctctttttaaatggcttttttgatttatcttgtacttccaatagcccttgtaaagtaagtctatttagtatcatattgcagatataaaagaaaatgtgaaataacttgcatctttagaatatttcaacatctaatccggatagtgcttttaattacatttgatagttcaagaataaaagccctgatctacaaaaaaagatcttttatggataaggtcataatcattagtgttgaacttacaaggacagcatacattcggcataaaaaatagtaaaacccgtcctaaaatttttactttttatcaatgctaaagtcaatttacaatataccatctaaagagcgattaactaatttatgatttgtattgtaattattgaaacgaccttaccgattgtatgtttacaaactcagccattccaaatccagatagttcctatccaacctgtcattttatccacatccacaggaaattagaaatctgaaactattacttggtttatagtaaccatccttgactgaagttaatagtctacataataattaatcataattatatgataagattattttgaggtttgaatatcaaagaacaatgcaatacataaaatataataaagtccttttaaaaccaggtaaacggaatcatagtaccaaggtgattttagaatttttcagagaggttcaaacacaagaaaataaaatgaaaggatttatagtaatggatagtttagaagacccttctgaatccatagtccttactttttgggaaaataaagaagatatgaataatttttatcaagcagataattaacttttatcggatttggttgaaaacttaaaccctcttttgaaaaattaccagaaagaaaaggttatcaagtatcgaattttagaatctaattgccaagactattggacattctttgtacggacaaaaggtaaaacatctatagacatatagtagtaaattaaacactaagcaaaataatgagtcgatatgtctgtttttatctaatttagcagatatttatactataattagaaaatactatcatgacaagtgataagaatcaccaaggtattcttgggatacatcatatcacagctatagcaggtaacccccaaacaaatattgatttttacactggttttttgggactgcgactagtcaaattaactgttaattttgatgatccacaaacatatcatttctattatggagataatataggtagaccaggtacaattctgactttttttccttggcaaaccatgccaaaaggttttaggggaacgggccaagtaattactacatcttttttaataccagaaaattccttagaatattggacttatagactaaaaaatcaaaagattagttatactggtccgaccaagaggttcgataatgatgaacaagtaattacactttatgatccagagggaatggaaatagaacttgttgcacacaaggacgccgaaacaagaaaagaccatgtttggaaaatgggccctattcctgaagaatatgctaccagagggttctattcagcaaccatttccttggaaggatatgaacggacagctgatctcttaactgaaaacatgggcttctcaaaaactaagaatgaaggaaacagatttcgatttgaaatcaaagataaagaaaaaataatagataatttgtatggtaacaagcaaaaaagagaacctgatcttttaaattctccatctactgtggacctcgtatgtctaccctatactcaacggggttatatgggagtaggtactgttcatcacatcgcatggcgtactcccactgatgaaagccagttggatatgcgaaaaaagatagtcgatacgggtcttgatgccactcctgtaattgatagaagatattttcattcagtatatttcagagaacctggcggtattctatttgaaatagcaaccgatctgcctggttttatggtagaccaaaaattggaggagctgggacaaaagctcttgcttcccgaatggttagagccgggccgcaaatatcttgaacaagtacttccaaaaattagtacaccatcacttgacaatttttctttttcatcatcttcatcttttaatcaaacctataatacctacaaagtgaaagataatgaagcaaattgattttaagtaccgtttcatcccctctccattgcagcagcatctctcagacaattctgataaagcatatggatccagagacaatcaatcagatacattgactttattattgcttcatggtacaggtggaaatgaggatgatttgatacaagttggtcaaatgatatcgccttctgcgtctttattaagtcctcgaggaaaggtgttggaaaatggaatgcctcgattttttaagcgacttactgaaggtgtatttgacatagaggatctaaagcataggaccagagaattagctgattttgttaaggaggcatcaaatatttacagttttgatctaaacaagacaattgcagtaggtttttctaatggtgcaaatatagcagcaagccttctgctttcatatccagaaacgataattggtgcaattctgtttagggcaatggttccttttataccaaattctccaatcgatctatcggataagaatgtgctgttatctgcaggaatgtttgatcctatagtatcagaaagtcagactcaaagcctgtttgatattctagaaaaaagtagagcatatgtgactttgaaatggcagcaatcaggtcataatcttacagaattagatatcttggacgctaaagaatggatgtctaaaaatattcaatagatgcgatgctgaaatatgttatgttaatattaaaaatagatatcagtgctaataataacaataaatgaatccgctagagaagttttttagagacaaatcttttatattctctacaagttattatcacgtcttctaaagtggtaggtatcgtttcatctacaaattttttagcaaatcgatctttagcaaaacccttagatcagaaatattgaagcaaataaaccttctaaaaaagaatgcaatcactttttcattttctctaaaattaaatttgatagaataatgtggtgttgatttgtttaaacctatcgcataaataggttttgcaatagttaaagttaaatgaaacaaatctaaataaattaataatgtcttctgctactcgctctatcatagtagtggatgacgaaatagaacttgcaacccttttcaaaacattcttgaaccagcaaggatttaacactatatcatttgtggatccagttctggctttagagtattttaaagagacatcggataagcattctttaataataactgatttaaggatgcctagtttgaatgggctggagctcgcaaaaaagataagggaactaaatacaaacatcaagattttcttgatgactgcttttgaaacaagggatttagaaaatcatatagattttaagatggctagaattgataggttaattcaaaaacctgttcgtttttctgacttgaaagaaatgataaataaagcatgtaaaacatgatttagataaagagttattaagaccatttagacaatgcattaagtaaattcaaataatatgcttgcttaatagatcctaattgcatgtcgctttcatgatgatttattattatttactttatatcttccgacagataaaataagtttattatgaatagtaaccgtaaaatcatttaccttattgagatttagagcaaaaattaaccaacaaattagtaacagaatttctaaattttaatactgatttttgaatttaaccggtattaaatgccattctattgtaatcgcattttattaactggtaaaagtaataattacagttaatagctgaaattactgtaaatcctctttatttaactttttattgtctttacttaaaacttctttttcgtatgaaaatatccatttttttttccaaaaaacaaataacgatattatagttatagctaacatcactatcactaaaaagcctagatatcttggtaatgtgtgtaaattatttaaatcaaagccttgtaaccctagtacgcctatcaaaagcgaaagcggtaatacgatagctgaaaaaatagtcaacacccgcattgtctcgtttatctgtaaagaaatactacttgaaaacagttctcttgtagaatttattgtatcctgatatgattgaatcatttcaatgagctggttaatattattatatacaatctgaagatattttatatcatctttgtctttttccatattagcatgatagtttattatatttctagcatcccagaaatatcgtcgaagagtaataacttgtcttgataaggtatccaaatatttaagcacccgtctggatggcctatattgtgcgtctttttcgatatcaaaaactttgagctcgattgcggtcaaaagttgttcgtaatcttctataatactagatattatgctatagtaaagtgcatctattgaagattccaatatcgtttttctgtctgcgagaattagttttacttttgttagcaagtctattttatttgaatgaagagttatgagccatgtatcccctacataaaagtacaatggcgtagtttcaagattttgtaaatcattaaatttcaagtcaagtaaaataataaatttactattgcgatctgtttcttttaccactggttttttggatttttgtctgattttatctaatgctttcttatttaatgaaaactgcttttccaaatttgtaatatctttatctgttggatcagatatgtcaatccaaagattatagttttcccgtaggtctccatctgaatcatttttctcttctattatttcctttttattgtaatagaagatatttttttgcactatatttgatatagttttaaagtattaatgtctatttcgttttgtagcagatccatcaaccaagtattgttaaagactattccttggtgaaatggtttaataaatttcaaatttgatatcattataatctatattatgttcaattacggatataacattttgagctaccgctttatgtgtaggaaaaggaatgtttaatcttttagatcttgtattttattgattcaaatcgtattcattgattgcgtttaaagattcctcggctcacaagttcaattttttagtttaactttttgtgactttaacataatcgttcctaatgccaggaaaaccaatccgcctatgaccaagaaagtcaaatcgaacataaatggatccgcaacttcaatgacgtggtgcatttgtagaatgtggtgattgattattccctcaatagtgttaaagccaccaaatccaataaaagccaggccaataaatgatcgtttatatgatagaaaataatctttatccttagaactttgggaaatccaaagaataataattccagatatcgttattattagagagaatgcaagaaatactccatcatgtaaaatattcatttgcagagactcaattgtgtttgggattatcttatgagaggaggtatggtgccactgtaatatcgcgtgaaagataatgatatctatcaacccagcaataccaattccaattagaattgccgagatagccgattttctcttacttccactttctcccttcttataactactttcgctcacattatctcacattaaccatcaaaccatgaataacatacgatttaaagtacaaatattagatgattctatttgtttggaaataatctcatatctggatatcataaccacaatcagaaacaaatcaagcaacctggcaaatatcattatcttttcaagacattagcgtataatagatgctgcagtattaccttcatttgatatttcaaaattatatgatagaagtgagaaatataataatcattttacttaagttatggatcaatattttaacaataatataaatattaaatcttcattaatagaaattcaatttttatataaattgatcataagtagtttagactagcaagatatctattactaatatcccttgcatcggacatcctgattaatactacatttacaagacgatggaaaaatggctaagataagaatattcatttcttatatttattgttcttctaatggctctcttgaatattttaccttaagaaccaacatccaaacgtttaatgatgccccaatagagttgccaataacaataacaatatccgcccttccaattccataaataacccatagagaaagcccagcaatcaagactagaagaaaacgaattgatacatcctcggtatcctttgtttttaatgctttcttaatctgtggaacggtacttgcaactgtgaacacagtggccaaaagtccgatgaatgttattagaatatctaccacctattttacgataaataacatatcttttattgatcataatatttgttattgaacttgaaggacgctaaacgactcaagcatcatattgacattacatcgccacaaagatgcaattcaattatcaataaaaaaactcaccccaagtactaatatcgtgttaaagccgtcggtccgatacatcgatgttctgataataaagttttatcaacactctattttcgaaatagtagaaatcccaatgtagaaaagactcgatgaaggtcaataaatagaatttcatttgaaatatgtatatataattgctttatagtggctgaacgaacctaaaaatcgtacctttgacattttaatctaaatggctcattgaataattctttggattatagattttcaaaatttaaggttaggtagtctttatttcattgaatttacttaactctttattctgctctaccaatagtgccattattgttgaaatcattagttcagtatcactttctgatcttgtttgaatagatttttgatatttgtaatatacttcattaaccattttaagcagtaatttcttatctgcagatgatagaccctctgtaagattgttcaactttttaataattttattatgattcttgtcattttgcaggagagaatcatcagaagtatcaaagtatctaaacatgtggtataatgttactttgtatatttaaggaattagtatttccggtatattattaatgactacctaatcttctctaaccttaaaacaagaggtttttaacttgcaaaacattagtacagtctgttaatggatgtatttacctttagacagttaaaggagtccaaatattatgatccaatacttacggaggttatgtttgattatgacatgatgcttgagatggtatttcactccatgactattattgaaaaagggtatgataccgtgtgggatgcaaatatgttcaactttactagaatgtattttcaagaaggaatggaatatgttgaaaaattaatcacggataagggaattagaataagattaatcgttgaagcaacactagaaaacattgatgccatagattcgctaaaatactacgagattcggtgtctggatgacataaagggtaattttgggatatttgacaatagggcatatatggtatatattttccatagagataacgacaaaccagaccaaactctttggagcaattccaaaacattggtagataaacaacgaatcctcttcgacaaaatgtggaatatatcaattccactatcaataagaagaaaagaattagagtatgaaaaaagattaggccgtaagaagataataacagattatgatacactcctcaatgaaatcgatactttaacaattacatgtaaaaaggaattactcatattatcgtctactaagatcctatgcattatacttagtaagaacaattttgtaaattattttccaccattattaaaaaatggtgtaaaaatcaaaatcctagttgataacaccgactcaaatttgataaaattgattactgcaataaactataccaatcgcattaatcccatccatttgatgtattcaaataagataagtgaatttaatgaattggtaataataagcgatgataaatatatgctacaagtaagccgcgatgttaataatcaattacttgcatttttttcacgtgaggaatacaatattctggttcaaggaataatgtttgagaaacactggaatgatgttaagagtctagcagcagtcaccaataggtacgaataacagtaatatttattaaatcgacaacaagaaatacagaaatactaattcttaaataaagttcaatcaatcaaaatcttgttctcgaatttattgcaaagaatctggctaatttagttaacttactaagacaatatctatattattatttttttaataatagtcattctagaaatagtttatttagctacattagcatattgacagaattatttatagaatttgtaggccaaacgtttgattcactcttaagaatgataacgtatcctaaattcttgatattgaaactaattcaagcatcaatgctgggactaacctaggaattagcaccttggttcaataactgtctaaataaaacatcctagacaaaataatattgatttgctaggttttattataattgtttatgattgcaattgtgtttactagtgctaccgtttctataacattctagaaaataattaattatataaaaatatggaatgtaggctacttctactgttgggctagtgcgttatttccggaattctcttgattttggaagttaaagttgttaccagagcctattgtatcaccaccagaaacgacttggctgttttgtcttgatgactgagattgaacaattgcttgcgatgcactgtttccatcatcatcatcgtcatcgttactttgtgctaaagcattgttaccggaattctcttgattttggaagttaaagttgttaccagagcctattgtatcaccaccagaaacgacttggctgttttgaatagagcgctgaacttgtgcgatgatttgagatgcactgtttccatcatcgtcatcatcatcatcgtgatggctccctcctgcaaatgccatatttgtattatagtttaatccaataggagacacagtcatggcaattgctattgctgttattactgctaaaatagaaatttgttttttattaatacccgtcaatttagtaaatattacttaataataaacgatataacttgtatcaaaaatcgttatggtaaaatcatagagaagaatattgcatccagtttgttatgtgaaatcaagaatccgctatcgctggtataaataattcatatttcatatacctcgtattggtcaattatccttcaacagtctttaaacctattttaccctactgtaaaaaaagtattagtgatataaattaaccaattacaaagtatgtggtagaagatgagtatagaaaactaaaatcatcatcccaccggattttaaagtagtatgagaataaatgaaaaaaagattctcatgtagttgtattaataaatataatacaattttgaacccgtattaagaaattacaagaaaaggtttgaattaaaatcaattacagcttgctcaattctgttaattatcctagatactacatgggtactatatgtatgatttctttcccgttattattaattcaaattattattcctatcgagttttctaagaacacagtgtagaatcaaatggccactccatgttatcgagatttgagtgacgtcatatcaatggagaagcgataatctttcataagcctcgttgaccatctggattggaatgatttctacatccgcggtgatcttatgcttgctgcaaaattctagcatctcctgtgtttcggagatacacccgataagcgacccagaaaggctccgacgattaaagagaagactcatggcagaaactgcatgcagtgagtcaggtgctccgactagtgtgagattgccatcgggtcggagtaattgtaggtaggcgttaatgtcgtgttcggcagagacgtgtcgataataaagtcgaaactgcctacatgcttcatcatctaattggcattgcttgaaacgaccacttcgtctaggcgtagacgaagtgtatcttctttttttataagcgaagtagtaaagagaacaacatgtgcaccaagcgcatgagcaaactttactgccatatgacctaggcctcctaaaaccaccacaccgactgtatttcctttagtcacccccccagtgacgcaagggatagtatgttgttatccctgcgcataaaagaggagcaactcccgcgagattcaagttgggagagacatgtaaaacaaagggctctttcaccacaatactgtcagaatagcctccatatgtgacacctccaagatgcatatctggagaattataggctaatgtaatgtgtggacagaactgttccagaccggctcggcactgagggcagtctccatcggagtcgactaagcatccaaccgcagcaggtcgccaggcttaaacttggttactgcagagccaacctttgttacacgaccgacaatctcatgtccaggaacgcatggataaacagtgggcatagcactccactcattacggatttgatgtaggtcagagtgacagataccacagaaaaggatctcgatttggacgttgtcattaccaggattgcgcctcggaatagtagttgggataaggtgagattttggatcggcagcagagtaagcctgggattcaaactgtccatgtgactgtgaactaaatcgagtagttgacatgacaatatgaaaacggtatcgatataaatggattagtcaggcaagttcggtttcttcactagggcaacagatattatgcctttatctatttttccctaaaattagtccaaataagattcctggatatatggactatatcatttctttttccaatttgatgtacttggctagagtaaccttcagctcaattaactccggagtagtaaacatagataataaaacatgattgtccaagggttccttattgatttgaatttctttgaaccaccccttggtccaatcggatccttgtcgccttatgattgttaattgaattccaatatgtgttaagttatatgttccaaagggtattcttgatataaggtatttacagtcttcgactaatctgatccttgattccctttcagatatcataatgaaaattatgttctgttttagtataattaagtttgaaaggttttttcaataataattctaaatagattttgttagtattagtgttacttgtaatttatgatttatatatcatttaactgacaatttaataagaatagaataatggcataggtcgattcaccaccttgatgaagccgtttgcatctagatattgtaatactcgttttttttagtgaatcatcgatgttttatttacatgatcaaggattcccatatagaggaaatattgatattgacatacattcatctccattgaattctgtacatgatgcatatagaagcatctctgccaaatacttgatgttgtatttgaaaaagttataatcttcaataatatacaagatcagatcaaagtagagagataacgcattccgtagataaattataaaaaaaaattaatgtttctatttttaaaaactaatcttctgtttttacgaatggatcaattttttgctcgtttgaatatacataatctgggttgttgggatctccctgtttatgggcatgtttgatgtgctcatctagttcaaccttattgcgagcaactagtccacaaatactgcacctttctcctcttggaatccccggttctgaattttctttttgtgaaaaaccttgcacttgtggtaattctgatccaggatctgaacccatactaaaaatatctgagtttggatattaaactctttatgcagtgatcggctcatatgcatttttgaaggcgatccaaacgacaataggcatgaaaattatgaagtggtgtctaaggcaacgtcagcttatccaataaaagaggagaataacaccgcgataagtagcggcggtaatagtaagtgtagcagtaatagcaatgaagaaaaagtaaaagatctggggaacagcagttaatctattttatcttttgcttttccggcaacatcctttgttgtgtctacaaccttgtctttaacatctcctaacttatctgtgatactatccagaacagattctcctcctgctcctttttctcttctctgttcaaaagtctttagttcagattctgaaacctttaatattatttgtgcaccatcataagcttcaatcttcgattttggtactaaataaatgtgctcactcattccatccttttcaactatgattgaatcatctttttcaccaattatatttcctatagtttggcgttccgacgaaattacacccttttttgatattattagttcagaaaaatctatgttagacattaactttctttctcttataacttgtttattatcttttaaagcagtgaaaagttattagaaacattttgatataaccagtataaaggtttagctaattcattattaaataaaattattataataaataaaacatgttcatatctttatcaagtacaataacatctagtaaacatgtcttcagacaatcaagctaatctaattctagacttgtacaaaatttatgacagtcatagagattcgagactctggtttttagatgaattaaatgctaatagttacatagagtatcatgaaaaatattcgggaacatcaaatgaaagatcgcactttattgcagtttgtggattctttgagttatctggcaccctaattagtcatggtttgatatccacagacatgtattttgatatttttaatcctagtcccttttggcataaagcaaaacccatagtagatggaatgagagaaacaaggcctcagatatatgaaaattttgagaagttaagcgaaaagagaactaattggaaaaagaaaaattcgaagaatatagagtaggatagatgataattatctagatagtatatagattattagataagattcagattagttggagagcattctagtcatataacaatatataattaggtaataatcagcaataccgacgattttcttaattttcaacatcaaattcgtgccgctggggaaatataatccgatcacacattgtgacatgaaattacttagattttgaggcatcctcttggaaaattttagtcggcttgcgtaagaaatttattcaatactaatagttacagataccagtacgatttattaatgatagaaaaaaaagacatatttgatttaagaattccactgtttatgacagtattaatgattccaagtttgtttactggtataaatcaatccttttcagaaggaacatttgtttatgtttctaatggcgaagatgaaaatattgcagttatgcagttggatcctgaagccggtgatctgaaaatgatagaaaaggtagatgctggaccaaatgtaaagcatatggcattgagcccagatcatcgattcctgtatgcatctattcgttcagaacctttttcggtgattacttatttgattaactcagagacaggtaacctgacccagttttctaaagtatcattacccgataacatggcatacatctcagtagatcaaacgggtcattttcttttatcagtatcatatactgatgcaaaaattgccgtgaatccaataagcctcaatgggtcggttcaatcagaacctgttcaagtaatttctacaagtcccaatccccattcaatcctagttgatcaatctaatcaatttgtatatattcctcatttgggaaatgatcagataaaacaatttttatttgatgaattcacgggagttcttacgccaaatgatccggcattcgtatacactaaagatggttctggaccaagacattttgttttctcaccaaataacatgtttgtttatgtatcgactgaaacggatgggatggtgtattcttataaaataaataacaagacagggactttaactgaaatccagaggatttcagcaatgccttctacgataagccttgaatcatcaactacggcgacggaaaatggtttgtcgggtatggaaaatataaaaggcgctagtcgtggagttgcagatattcacattactcctgatagccaatggctatacgtaagtgaacgagctgaaagtacaattactgcgtttgctgttgaccaacactcagggaatttgacatacatcggaaattatgatactgaaaatataccacgcggtataaacattgatcctagtggtaattttgtgattgcagcaggacaggaatcaggttatgtatctgtacatgcaatcaatcaggaaactggtgaattaaaactcttggatagatatgagtcaggtaaagaccccaactggattgaaattgttgaatttacttgattgattattctacgccaccaataacaccattaatgttgagataattagtttagtgtcacccatgtgaaaagaatcaatatatcctaaagcagcatatgatcaaaactatgcctcattactaaaataatatttaaaaaacctatctttaataaaaacagtggctatacctcatgactacaaattctataaaactgaaatcgttaaaagatcccacagaagagtcagatggactaagaattctaatagcaagatttaggccaagatatcttcctaaagcaaaagaaaactaggatgaatggtggaaagaattagctccaagcaagcccctatggaaagaatacatcaaagataaaaaaatagattggcctgaatactcaaggcgttttaaaatagagataagaaacaatcctcaagcggtaaaggctttacacaagatatcttctcaaagtatcgatagaatcgctaaaaacaataagaagaatgctgataattattatcaagaagaacagagactattagatcaggatcattctttgacaaaattcaacgttgtaacacttctctgtcactgcagagatgaaaaacattgtcaccggtcaatagtgaaatacatggtagacgatataggcagacgataaatatagaatgagaaaatttgacgtagttcatgtggactcatgaggattgcaaaagactgttttgccatcgaccacaatatgactaaattttatatatgaagataagaggaagccccatccatcgtcgccattgcgataagagaggaagaaaggataagtaatgatcacactttaagttaatattgtaacacctgttagatacataattttatattaaaatcttgatataaagttcatataattctaattaaagaataatgcatctaccatatctatataattataccttattaatgctggtgctgcagcatagatgatgaatattattgaaaatgaaataccatatctagtagaggcaaaaacatgcggttgtacggaaaaggggaaaagtatttcatattctttcatcgagtcttctcatggtctatgtgtagataaaagtgaattgctgctgagtcagattcaagcttgtgaaagattattgaaatattctaaggatgatagtgaaaccctcgtgttagagaatgaaatatccaaattaaaattgggtttggatctgatgagatattaaatataaagagaactttaattcagagtccctctctgaactaggtagacagagtagtttgtcagatttgagctttaacaccaatgactaaacttgtatattttgtccaacatcttatactataacgaggtcaatctcgaaaataatactaaaatatactttatagcaaatttataatcattatgccagtggaaatcacagacatgttttgtctatattaggcattaaaaaccgtttgataccgacgtttatatagtataatatctaatagatactatgtcaaagaaagcagaaacaagagaaaatcattcaagttacaccaatgaacataacattaacaattacaataacaataatatcgatttccaagaatccattaaccaatcatttgatgaaaccaaagataatattaaaaaatcaatagatgaatcaagaaaccaaattccaagaattaatagtattgtaaatagttatcaagaacaatcactacaaactgcaaaagagatatcagaagaatatatagattctcaaaaagaagtcgtcaattcactccaatcagcatggaggccatacaatgaagcctttaatggattagttaccaacttctattctcctgatgcagcagttaaagcatattcaacatttgttagtactgttgcagacaataccgtatcagctattagactttcaaacaacgttattttctcaacccttgatgcatggaaaccagtcctacaacaaacaaaagattttgcaagacacatatcaaacacaggagtaaacgccgcaagaacgtttgagcaaaattcaagacaaatagcagcagatgttaaagatgtaacagccgattcaaacgtaaacgcatctactacatcaactactaccaaagactccacaaatcattaacaaaacgactagttaaataacgcacaacacggtaatgtgcgtattaattctgtcactttgagtttggattttataatgtttcctatgtagaaaaacggatatactataatgatatcatgggatcctatatcaagtcattatgctcagatattattattaaagtataaaagccatactcaacataaagtgaattttttttgttgatgagtaataaaaatatgtgcatgatcccttttctaaaaaactgttgcaaagaatagacaagtcgtcttctcctgctcatattagtaagcttcagattgctgtagattttattgctcccaaaggaacacccgttctagcagcagcagacggtgttgtaacctacaccatgatgattaatattggatctcgttgcatcacgcgggttttatactaattttattgcaatcaaacattcaaatggtgaatattctcgatatgatcacctagattacaacagatctacagtcgaattaaatcaaaaggttcatgccggtgaagagatatccaaagttggaatgacaggatatacgtataccccacacctgcactttcaagtatatgtatacacaggatataatgtttgaaccgatattaaaacaatagagattgaaaattttagaaatattttataattcatcttgtattgtaaatagtatgttcacatgatagcttttttgtagcaactagtttggatcgtatatattggataaaaaattccgatttgtacgacattaagacacttcttctaacttactaaaatccccaaaagtaacgatcgaacctggagtaataagttccataaattccctatacatttcgtctccacttttatcaccttccattgccttcataaattcctgtacatgtttggcatctctataggactgtatttccagccagacctcctcgtcattattagcagaaatgatttttgataaatttacaaaatccatcatattttctctagtgtttaagttaaatacttcaaattttaatacgccatgtttcataaaaaaatcatgagaatgtttgttaacctttaccaaagaatcgtggttctttttaggggaccgatataggaaaatagctacttgactcccagactgatttgaattctcatttatattcgaactattcattggatcgtatttattgtcatccaataaaaaggagtatgggaaaaaagtatacttgcaaagtcttaatgaaatgaagtagtcttttcatgttcactataggtgtttagcgcgagataaaaattttgaataaaaaacaaacaaataatatgcataaaatctatgctgagctaactactacttgtgtagtacaaggaggttattagaatggtttgttcttctaataacctaaaattatctgagttaaacgatatactatgtatgtcataaatagtatcatcaataatagttgtgtatgaaccaattcgcttttactagattccaaagtttgagcttacttaaagaagaagaaaaagatgataaaactgaaatatctagtaatgttgaggaagtaaattgagtaaagatggaagtgccaccggaggcaacactaatgataataacaaacgtataagcaacaagcatagtaccgtcatctggccactaattggaggaatcgtggtgattgcattcagcatactgttgctgacattacgagcgataataccatcacttatcataatgctaacaggaatttctctaattgtatattggatatacattacaaaaacgaaaaatcaaggaactggaccaaaatatgatagaaaatgtctctgtgcaatatgtgaacataaagagtctagtgtatgtattcatcaaaaatgcatatgttgttcaatagccaaaggagacaaaatcgtgggccatactaataatcctttggagtagtaggtgactgatagaaaaatcaattattaaaactgttgacacttattattatcatccgccatccattcacccattaatccatcattagtttgggtgttaacccaggttattgcatagtcaatcaatcatccttttgaatgataaaatgaaatcaatattatcgattccttgttatataaagacgacagattgcaatgttctccttaatatagaattgtacactacatttccttataagaaaatttagtatattttatatacgataatgcaaatgaatgtcatatgactaaaataattaaacttcaagtcatatcgccttctaacgtagagaaaagaataatttttagtacaaacgataaagatgcattagttaaaggggtcgaactggaatctcacgtttgtggctgttgtggatttattttagcagaaaatgtaatgacgtacaattatcgcgatataatattacaatgtcctaattgtaaatcttataacgaggcaccaaaaaatgagaatttcattacatgatttgaatatccattaattgattaccccaatcttcaaaaaaaaattctcaaatgtaaaaccttttttatatatttataattcttggccctcagtatacgaccactattgatcgttgcgattgattagatgtcaagataacttataacagagttacactttctatgcatatattttacctatatagtgatcaattctatcttaaaatatttatctattctaccatcgtagagaagtcagacgattaatattattatatgtgtagagtaaaacaaatgaatctaatgaatcgcaagtcaccttttcttgaccacatcttgcttgtggtcatagcaattatagtggtcggattgaccagctttgttattaatttaaatttactattatcaaatgctacatctactattggccaaatggtaccttctagtgacaatgaaattatacttatggataataatactaaattcgttcctattgataaagtcgatccaaaaaaagttgatgtgggggacatagaaattgcctttaagacatttggaaagggccccccgatcttactcattagtgggagtggaaatgtaatggacgtctggccttcacattttcttaaggaattagcaaaaagccataaagtaattatttttgataatcgaggagttggaaatactacggaaggtataaagtctttctcagttaaacaatttgcaaatgatactttgggtctaatgaacgtattaggaatacaagaagctgatgtacttgggttctctatgggttcctttgttgctcaacaattggttgttacgtatccagaaaaagtaaacagattaatattatatggtgcatcatgtggtgggaaggaaggtattcctcaacaacccaaagtaattaatacattatcagattttgtaaataatcgcacagaagatgccgattccttcctggaagttacatttccacaaaattggattaaagaaaacccaaactttttggatatgatcccaaagacatctgaaattattctttctactaccgtaaaaaaacagtttgagataaatgaagactggctttctaataattggcatggaatctgcgatttacttcaaaaagttaatgtgcctactctaataataacaggcactgaagatgaagcgattcctccaggaaatgcacttattcttgtagataaggttcctggagcatggcttgtgcaaatcaaagatgccggacatggattgatgtatcagtatcctgaaatctttacccagatagtagaaacatttttgaatacaacaggaactaggacatgagcaataaacaccgttttccttttcttaaatgattttgatctttaaagttggaatcaaaatgcaactttagcacgtaatccagttcatcaaatatttttagattacagttattacaaaaacggtaaagatgccacagaaatatagaccataaaggatgataaaatatacattgttgagtttgtagctcaagacgagttctatagtttatacttaccagtcgtaaacgaaattactgattcatttcaaattatgaattcttaaaattagtagtacgcaatacaacactctaaatgatttaaaatatatcaaatcaaaacattctatatcatctgaattgttatgctagctctttattttacttttgatactcataatttcaagtatgatgcaattgcaggtagaaatggaaagtaagttccataatgacaaaaataaaattgaggatatagttgctgttcttagaaaaaatccatggtgatattatatttgacaatttcgagtctgtgtaataatatcctcagaacagagattcttacgggcctttgaacaactagactatttatgctaaaatataactctcactaccttgtaattcatcaataataaatgcagtaatcaaaacaatctttatttttccatttaatttccttacctcacaagctaaatcaattcctgacataatgggcattctaaaatctgtaagcaataatgaaaaatcattcatattttttaaaaaaattcaagccccattaatgggtcaataaatatacgactttaaattctgatttttccaaggacgtcttaaaaagcaaagccagtttactttcgtcatctattactattgccgataatagtagaacagggattgacaatgtcatatttatatcgaatatgatttattcaaccatttccttgagataataacatatattatatcacattcatggttattgcaaaacgtatttgtcattatttaattttagtttgaagacttcagttaactgaacttttgaaatattttatttattctgtattttaataattaataacctactgaaattaaaaataatttcattgtttttatgatatcagatcgcacaaatcttgtaaatattcataatatcagagcaagttcaacatcaaacatatcttttaacatattccgccgtttattcaacataaagcaaaatatcatcaagattcaatctttcgttaaatttttttagttcaattctaaataacaaatgaatcccctttacattagttgtatataccctttttttccattgtaggaaattagttcattctcaattaggtaaaataaatatttttttatcaagactttggaaataggtaacgtcctgcatatagcagaacttagatcggaaattgtcatatctgtcatacatgctatcagaataggttgaaagatagctgcttgcattactaaggtattttcatttatttgtttattgtctttggttaatttcattcttatttcaaaatcctttcacatacaattatttattatatgaatgctgggaatatgccctagatctatataaacgattttttcaattggtctgaaggagttatattcagaatgttcattgaaattattacatttttcaaaatacacaaaactcctctcaaagtatgtgcttttggtttgctctccaacatgtgtagaagaaatgaatcaaaattttatataaagacagatcgaataatcgatgtagtatttttagtatttttagtagggcgtcatgtttaacaaggtaggaatgctcataaattgatatgatagaattgcttttttgtaaatagataatttttatctatttttatttttttatttgtaaattactttttttagtatagtgtcgatcgctaacagtcgacagtataataagcagccttagtttttgatcataatataacaaatctaatctatacatctaactatggagaaataatttcagttgctataatatgtttacactttacatgtcggtaaataaagtcaccacaagtacagctctgtttttctaagtttacaagataaattttgtctttattcacggaactctttaccttgtataccctactgtcagatgttgtcttgtcttcaatcagatgcagtcctttttgatcttttgtattaattgttttgaaattttcttcagccattatagatgctttgttaagactcgactcaacaatgcctattgctttgataactctattttcgtgattttcaattctatcgagtttattaattattgaatcttttgatcctttcttgattttgtttgacaaatttgttatcacggagggattatttgactccctaaggggagttgacgatggtaatgatgatattgatgtttttatttgtacacttttagatacgcttctctttaatttttgtttcctaataatgttaattttatcgttttctgcagtcacggctttattaaccacattaattacattatcatctttagtgtcaggaacatagactacataaattaatgcaatatttttgccttcatattttctaagtactctacctattcgttgaactatttggtttatgttagatgtagtagccagaatgatctctattcggacttgaggaacatcatatcctatttccaaagtatgtactgatagaagaacattaaaagtagtgccccaatcatttagaattctttgtctctctattgcctttacctttgcatcaataatttttgatcctattcctcgagccatcaaattatcccttagtttttcaattgattctatagtttcactaaataccataattttttcatcaggaaattttttctgaattatatttgctgtctcagttaacttattttcggcatagcttaacagtaactttctcttacggatgttcgcaaaccaagctttcgccattccgcttgcgaatccccctttctttaaaagattagtcattgaatcgacgtcatatcttttgaatttatttgaaatgttctttatcttagtagagtatatatcatattctctgagttcattttctgtgagagaaactttgataggaattactactggttttgctagccttttatctttaacggcttttttgatagggtattttataataggtggtaacaccgctaatattgtgctatttttaaagtctctctcgtctaaagtggccgtgagccccaaaattgccttctttgaatcttcgacgaccatgtcaaaaattttgataaacgattttgatgtatctctaatcaaatgtacttcgtcaaatataaccatattagagcgtcttatcaatagtggatttcttactacactatggtatgtgcatatcattatttcttttttttctttgcgctcactaaagtaagctccaactttctcctttggaatgccgtatgcaactagtctgtcaatagtttgatctattaaggagattcgaggcactagaaataaaatattaaagaatgaatacggtatatgttcattattgccactgccttctgcaacagctatttcaaattctttagtattagaaacgccatttcttttattttccaatattaaattggtgttgcttatcttatcaaccttaatcagcgcttccgcagtttcagatgataaatggagatttgctagtctctttgcacattcaaaggcaatttctgtttttcctgttcctgtactgtagagaatagttcccctattattatttgtcatccatgaatctaccgcggataattgatcatcctttagattaaacggaaacttcaatgagcaaataattggaaaagaaaattttttggactgtgagattgtatattctattttcaacttattttcaacaatttcggcattttttaaattatcgttatttctattattcatggctgacaatataaaatatttgtactaggtggatcattgtttaattttatcaactattattacgataaattgattaatatacctttataaaaaaatttccaacctatatacgaatagaatcgcttgaaaaatattagaaaatatgaatgcagatggtctaatggaactaagtattctactaaaatttttgttcttatgactaggaatagaagcagctttccaaacttttactgtttgtatatacaatatcaacatgaaattgctattcttttaagatactttgatatcttgctaaaaataaaatcaatattgaaatatagaatgtataatattatatagagtagagacgtcataaaaatttataaaacctttagattaattcgaaaatacctaactattttattatcagaacgtcttctttctcttatgcaaatatgcaaatagcttctgtcaaagctttactatctaatgattatcaaatattgtcagtaaaaaattaaagggaaagtagatctgaaaaggaagattgattattttttttctcagtaatatattcagaccaatcgactttatctaccatctgatttcccttaatttcttctaataagttgaatagacgacttgagttcttgtatactattctgaaagaaatatttgtgtctggatttcccactctcaaagacatatcagttatatattttctatggcgattgtaaatctcatcaagtacttttcgactgcttcccttttttagtactaattgagacttcagcaactcttaggcccaactttgttacatccaaagaatagtttttcttgagtatatcaaatttttctaaagtagcacgcctcctttgtatagtagaaagaggaatctttagctttgatgcaatctcggagctttttatgtccccattgttgagtagttcctctataattttcaggtttagattatccagatgtactgcagatttaataacagggacggaatccgcattcgagagtagatccgtcttattatcatcacttgataaatattcaggtttggatcttaaatatgatatagaatcaccattaatattttcaggatgagagtttgctttcttatttgtataaaacctttttactcgccttggcaatatatacatatatttagatagtatgagatttaagtatatcctttgttagtttatgagatattatatcacaaagttataagaaattggccactaaatcatattgataatacttaattgaatctactataaaaaattgataaacagtatcacaccaatgatattctgcattataatcttatagatagtaatgtagcttttgctattgaccttctacactttctgcctttctgatgcttttaacttctgtgttaaagcaaaattaataatattcgatacattatcaccaatcgaatatacttgttcagaccagtcaacattcgaagtccaaggcatcgccttgatttcctctaataggaagtgaagctgctcggaatcatcatatacaatttcaagacaaagattattagagctatttattctcgttgatgctcttagaatagatctatcgaatcttttgagtaatttttcgccggtttcctttgctctaccttttagaacgtcaacaaatattagagcatttctaaatcccatctgatccaaattcaattcatactttttcctgaatatcgttttctcaattctccttcgtcttctttgtacagtagaaagaggaatctttagctttgatgcaatctcggagctttttatgtccccattgttgagtagttcctctataattttcaggtttagtttatccagaacagagattatacccatttcattattttttgtttcaaaattagtgctatcgtaattactgtaatttccattagcgttattgttatcgattatggaagagtatttaactttatttacagattgtttatcgggactttttctagatttattatctatttttacaatattgcggttattatctgttaaaatagtagtcacatcattttttggaggttttcttgacacagaactcattgttgttacgattcgatgacttttaaagatatagtatcggagttatttgatttttttgtttagcaattgataaatttctgatttcaaaaactattataggatgttaaaaaatcattctcattatactgcatcacattgcatctcatagaacgataatttgctttttttgattggagttattgtgattcacattttttgatttgcataagaaacttcaaaaaacagagaagactgtacttgatatacatcaatcaattaaacagaaatagagcgggatatttattttatttattttatttcatagtccttggtatgttcgataaatactatattgaataaattttattatgaaatttatgggatactgggcttctcaagagcaatactcaatgcaggatttatgtaaatttgtccttgaggccgaaataggtgggtttacttcgactatgacaagtgatcattttcatccttggcatcatgatggcggattcggaatctttacctggatttggttagcagctgctgccgagagaacaaaaaacatgaagtttattaccggagttactgctccaatatttagatataatcctgcaatagtagctcaagcctttgcttctcttgatgtgttgtatcctagacgaattgctcttggaataggaactggagaagcaatgaacgaagtttcagttggttttgattggccctctcctaaaatcagattggagaggaccattgaatcattacaaataataagaaattatggaataaagaccaaaatagccagcaaaaaaagaataatgaatcccagtctaattctagcagtacatcaggtaacgattttatcacatttgacggacaatattttaaaacaaaagaagctaaactttatacacctccttcttctagaaacattcctttgtatatggccgcttcaggttctgaggcgatccagactgctgcagtctatactgatggtctgataacaatctcaaaaccagaccaagttagggaggtatttgataaaattgaaaaggctgctctcgaagcaggtaaagacccgcaagaacttgaaaaaataggcaagcctagaatttcctattctgaagactatgataaagcattcaaatcctcggagttttggaaaactacagaaatagaaaatgtttttaataccgatatttcctataaaattacagcaaaaagctgagatagaggtttctgatgaaaaattaagaaaatctactttaatagtcacctcgatagaagatttgataaaaccactcgaagagtattttgatgtaggttatacacaaatttatttacagagcactagtcctgacgaagtagaatttatacaacaagtctgtaataatgtgttgccttattttcgtgacagcaaatgaagtctgctaaaggggaatacaagaattaataaatagcacatattcatgttattgtttttcagcttaaatttcaaattttttttcttcccctctttttgcagcgactgctgctgcttatgatgtgaattgatcatagtttacaaatacgtcatagaatctatatctagttgggatattgttcaaagttgtttaatacaagccaaacaattattgttataaagaatccttatctaatggagttttcaaaaggataagcctatcagatttaaatatgtagaggtacatctacaaccatgcccagcctatatcattttgatattcctattgataacgcaggtcgagctaaacagttctataaggatgtgtttggattggatatgaagaaattaaacagaagtaaattcaaggggtcgaattatggatgtgtgaaacagaggatgaaaatggcagaaaaggtattaccggaggaatgatgaaacgtgattcactaccttcagttacaaactatattttggtcaactcgatagatgaatatatttcaaaaataaatcattccggtggtaaagttacattgcataaaacagaaatacctcctgttgggttttttgcaatgtttttggacagtgaaaataacgcatttggactctgaaaaaggaaaataggtttgaattggattgtttctatcattcactctttctttaattaatttagttgaagaattagaaatgttacctctattataaactgatgtgaatttttttattaaaaattccatatctaaaattttttatatagaccattgttggtttaactataccttaaactcgggtattaatggtttaatatcaattatacttccatcccattcccggatgatcttaacccgtaatttttctaaactcaggcttttaagaatactatgtatgttatgagtatcagggattctaaccacacagttggtatatccgcgcctttgtaaaagatcagacttttcaccagtcaaatatctctcagcaaattgcatgaaaacttttgacacgtagtaaccatggtatctattattcagtgaaaatagattctgaaatttttccttagaaaattcaacctcattatccaggatcgggatctgtactggtaaataaatatgataaccattgccgtgtccacaacacggtaggttgaccatcgataacttcctttattcgctttaatgtttgttttaagagatagtcgagtttcctaattgggtataggcagcttgtacaaagggaaaggtccatattaatgagaatcaaattgggcgattggataagaattccattattttctaaaatttcaggatagccatttatgagacactctttataattcgcttctctacacctttgaaatatctcctcctttgaatttattgagatcagtccattggaactaaaagtcatcattttgcgtggaaatttagcaataggacttctaaaatgagataatacaaaatcaatggattctatttcaataatttgccacctccaacctctatattttaatttattacgaataaaaatacagtagtaggttgattaattatttattttgattcaatgataattttctttctcatatcaagttcataaataaattatacacaggttaacatctacaaaaatatctaaatattatcatattccattattctgtgtaaaacaatgatagggcataaatattaatttaagtatatttaattaacataaactttgttatcgataagattttcgtagaaacgggatgtaacagctgggttatatgagctattacatctcatttctgtgtaaagttctaaattcaaaagtagaccatgaccaataaatttaggttcaagcatatttaaaataaaacctctattcaccatttacgatgtgccatttttacagacttttgatttttttacatgtattatgattaacatgactttatattccaaaactaaaagaggtaatagagtaatctatatacctattttttgccacatcaattataaaaaaaattctactagacaaactcctttagtaaggaactcaaattcaagtatttattgtgaataattacatgtagggtaggatgcaattcaaactagctatgaaacctaaagtatccgttaaataaggaaatcaaaaatcggatcaaatggaagtatagattactagaatttttttaataatcacatcatttctattcattttgtatttcataatatgaaccttgtctttaattcaaaaagattacagggtttacgaaggatcatctcaatatattaaacaatcttctatttcaatagaatttatcaatggtaggtaagacttacatatctccatgtaacacatcatagaattgaataaatctattgtacatgtcgttcctcacagtcattatgatgctatttggattttcagtaaggaagaaaattttgatattaattgtaactttattataaaaaaagctattgaaattttaaaaaatgaaaaagactttaaatttattattgaacagacatatctcttagaaaatattgaaacaagttatccagaactattttcagaaattaaaggattcatcaaagatgggcgaatagaaattgcaggaggagaatatctcatgtcagatgtgatgctaccctcaggtgaggtattgataagagaaattctagaaggcaaaaattatgtaaaggagaagttcgaaaaagacgttatagtcgcctggggtgcagatgaattcggttataatgcacagtggccacaaatactaaaggaaagtggttacaagtacttcgcattcagaaggggcgtaacagagccactggtatctgaattctattggaaaggtattgacggtacatctattctatcgcactggatgcctttaggttaccgagccggattagatctatcacttttacatgaaacttttgagcaacttagaagacaatcatctacaagacatgttcttatgccttccggcagtggatctacacctccccagccagagttatgtgacacactcaacaagtataatgaatctgccaaaagtatcattgaaaatccactaatgaaggtatcgactccctcagaattctttgaggcattagaacaagaaatagaagagaaaagcatccacatgtctatcaaaaaaggggaaatgtattctggaaaagcatcattcgtattcccagatagtacctcaacaagatcatggatcaaacaaggtttcaaagaatttgaaacctatttactcatgcttgaaagatggaattcgatacttcatttgatatcaaaagaaaatgatcatgctgatgaccttaaaaattactggaagcaagcattattttttgcaatgcatgactctttacctggtactggtattgacgcagtatatgatgagatgaggtcaacatttgataaattagagaatacattaaaaaaatcatatcttgaatgtattactaaaatatccaaaatactattcagacaggacaataaggctcatcacatcctagtattcaactctgtgtcatgggacataaaagaatgggtagaagcaaaaatcaactttgatattgatgaggcaattgagataatggaacttagaactgtgaatagtagcgaaatagtggatatagaaatattagatttagaattacatgaaaaagatcgaggaataaaaagtgtccaaatagggttcatcgcaagaattccttctcttggtttttccgcatatgaaataatattcaggaagaaggaaaaaggtaaaaataacaatatggatcaatcgcccctgcttgcatatccaagatcctatgagacaagatttacttttgacgatttcacactagaaattgacgcggaaactggcatatttacattgatgaaagctgatcgcctttatttcattggcaatgaagtccgtatagaagaggaactaggagacttgtactatcataaagatgtaactggaataataaaatcagaaagtggtgaaggtataccatttggagtattcaaaaaagaaaaatatagtgttttgaatgggaagatcagaactaaaatagtgtttcagaataaatactatgccattcgttggccatatcgacttaatgaaaaattacctacaattatttaccaacatagtttcttgacagtgagaaaagagatatcgatttacaaaggattgtcacgaatagactgtacaacatacatagaaaataatcatcctcatgtgcgaattagggtcaagtttgatgttccatttaaaggatacacttactggaccggtacacaatttggcgctatccaaagaccaactaatttattttacttaaacaaagatcctgatgtactaaagaaatggaaagaaatacccagtggtacatttccttcaatagaatggatagacttttccaacaaagaacaagatatgggcgtcacccttgctcattttggaataccttcacatgaaattagagacaatagcatatacctcacattattaagaggagtagaaacactttctgcagatgggaccaagggtccatgtattgcgactcctgatgcggcagaaaagagaccctatacattcaaatattcgctaattccccacaatggagattggcgcgatgcatcaagttataaagaaggcatcgctttcaatatgaaacctactgcaattcatctctcaaaaaaaggtcaccaaatttggaatgacaaatcaagcgagcatgatcctgcaggcaccttactggatacaaacctacctaatggtttctcatttttgtctatatcaccaaagaatgtaattctaagtacactcaaaactccacaggattctagttttaaaagcgactccaaaggagtcatactacggttatatgaaacggaaggtaaaacagttactgcagatataaatttccagtatcctataaagtctgcagcatatgtggaccttatggaggatatcaaagataacacagttgaagcgattacggtttctggtccaagcaaaaacattcttagcttacctatcaagggttttaaaataatcactttaagaatagaatttgatttctatggccaaatttaaacaaacgatgatttcttatagtccctattcccctattcactacaggagcggttccttctacctacatactaaaatataggaacgattaaaaaataatctggatcattgaataatcgctcctgtcaataatatcatattaaaaatgtaaatcaactgatatcttgacctcacaattgtcgttattctgatggacttcaatttgcaaaaaataaagccgtaacgtactccagtgattggagatcatattcgaaataatttagaaataagagtcgtttgtttgatcactacatcaactaggatcatagatatatagccgtctttttatctaaaaatgaacatatatgaaattactaattttggctgcaattttccttttgattggcacaatatgctttgctcagtcaaaagcaaatgctcaggaaggaggatttacaattacaattaacccaggtgcgaccaatagtgatagtctaaaccctataaacccagctaatattacaataccagtaggggctactgttatttggcttaacaaagattcagcttatcatcaaatagtatccggcactcctgaggaaggtccaacaaatgtcttctatggagatttttttggtacgaatgaggcttacaataggacttttgattcagcaggtgaaatcgattattacgatcctatatggacaaacattaggggacagattacaacagtaaatgagaacaatacaggatcagggtttgttactactagtaattctactagtagtaatttcacaacaagtaacgatgcgaacacagtaaatggaacgtccttgattaacgaacctccgcagtcagataatgttaacacagccaatgttagaagttcaaattcaaatcaagttcaatcaggaataaccggagagaatacccaatcatttactactgagcaacaacaaccaatccaagaaccagtacaacaacaaccaatccaagaaccagtacaacaacaaccaatccaagaaccagtacaacaacaaccaatccaagaaccagtacaacaacaaccaatccaagaaccagtacaacaaatcgtacaggaccagtttcaaattccacaacatgataccattgatagttttaaagcaaatggaaaaattaattccttcattgtaacatcatcaagtgcatggaatgcaactggagattggaatatgatagtagaaaatggtgaaatgataaatttcgtcaccaacatggcatggtttaatggtactacaggtcatactcacgattttctgaattttgattcaagcggagaaattgaactacctgctgacaatatagtaaccatagatggggaaattgacgtagcttctaatggagtaatatcctgggatggcgtcgaatcaacaattaatatcggaggtggtggcaagatcataactatatcagtagatcatgaagctaccgatcatcattttgctggacaaccaatagttggaacagttacctcactgacaccttgctcagacagtccaggagctagtatggaaatattacccacttgtagttagtacaaaaaaaagaggatgttagcatgtactgattcatcaatcaattaacattcttttttaataaaatcggaatttctgaaaaataaatatctaatttgtttaatatgtatcagctaaatccgctgaaactaaatgtaactaatttctacatagatatatatcacttgaatttcggcatcaagattggaaaaatttgactaacaaattctaatatagcggtattcttcattggattagaaaaaatactaattaatattaaataattatcataataattattaatatatatttcatttataaaaatacctcatatgattgataattgtaatgaaagtatggattttttatagactttatccatttaatagttatgaaatagaaagtgaatggcaaactaccactagtaaatcaattcaattcagtgtcggtatatagtttctttgaatgcaaagatgagccaagatgttgtgtgatgcaaagtgtaagcctcgattgcaacttgcatttacaaattcatctagtgaattacagtaatcaggagaaccctctggaggcaggtagagtatcgaacaccatccttttattgaagaactcgtatgtgattcaagaagtatatccctatttgataatgaaagtaagatgtgtggatactaattaaatcattattcatttctttgtttttttttgtttaaaagaatttgagatattagcttgctgataatatatgatgaattattttagatctgcaggcaaaaatacgtatacagcatttacggcatggcatgatcctagtaatcaaacgattaactaagatgttagcaattatcacctttcatccaatcatcattttgagtggtcggaatatatccaaaaatgaaacacaaaaattattttgaataaatagtaatgcagatttgaaagataaccaaccgttaacttacgcctacaatattttttcctctgaatagagaaggtctactgtttgagcataatattgtacagcagatatcaaaaaagaaactaaaatagtgaaatttaagaggaataggaataagaataagaataagaagtaatttcgatgtaggattactatctattttttactgcctctatctgtccattattagcttttacaactactttcttaaaatcaggatcgcccccttcaggcgttatgaagattgatgcaaatggtcccatatttcctaaaggttgaattggatcattatcaaattgaacagtaacgttattgatagaattgaaattattgttacttaatttaacgcttattgtctccacaggacctcctctttggattatttcgatattcaagcctgatgttgaaaaatatacgaataagacaaccgctgcaaccactgcaaatccaacaaatattattctgcgtattatttttaaaatatttcgctttttgcccgatctaccattttcaggagaccttccatcatcccaacgtcccataacttatttgataaatattattcacgcaaataagtgttctatacataaatgatatagatctcaacaaacgtttttcttggtccggtaattaggttttacctttcctatgatgattacgaatcatacgaactaaagcgaaatgtcaaaatcttatttctaattatctgataattccatcacattgataatttactgtatctgcttaaaaggcgactttgaagaatattaaagaaaataaaagttaatatgtatccatttgataatcttaaattttttgttttatctttatatccagagcaaaaaaaataaagtttattggttttgtaaatcaatctatttaatttccacattaagaagttccatttccaattggactggttttaactttgaatacccccaccatattaattagttctgacaatttgccgccagatatgtcaacagaatcgtccccctcccctcccccgtattctcaaaaactgccatccttatagtaatcttcaattgcttcgaatttatatggatcaacatccattgggtttccatcattgaatgcctattgagccgtcccgtggatataagcgatgttactattcctcaatacggatgtggagtttactactgcaactaccgagttcactccatagagagtagcattacctctaaattggtccgaggcatttttagagacagtaaacttctcaaattatatagtatatcccaaatcaaggttagaatgatacaaagatgaattatatttttacaatctgcaaatgttagctttttcactaatagagctattcgacaatgtaacgctaactaatccgagcccaaaaataatcaatgtaaattattatatactgaatgcagattttttcattatcgtagaggaaacattctagactaatgaccgtttctttttttctttctcttaaagaatttgaaaaattagtcttctagaatgtattatagcatggtgtattattatccgcaaataagatacaagaaatcagccgatattgtatatttacccatctctcggggtataaacatccgcacgatgaacaagttttgatatacttatacacgttcatttttttttttgatgctattcgtttaaagaatctcttgatccaaactcattcttaaatccatatagactagccagtctttttacatcattgttggttattttacatgactgatgggcaagttttaaacaataaggatatcccttgatactgtgataacataaaccatcaactagattttgaatttcggtttgggtaatatcaggtctatttataatttcaatctttattagcggaacatatgcagtaagccttgcatatatttccattacatttaaagtatcagagataaagttatttttactagcaagactaaatccggtcttgtagcccaatttattataataataaatatcggcggctcttgagccatattcactgaactgattctttgatgtagaattttttgaaacaaataaaacatcactcttttgataactatcaaagagggactgaacgttttctctataagatacatttttgttatgaattaaattggatattattgacccatcaacacagacatgatctggtttttgatccaatacagatttaactagatcgatttccattttcatagctctagcacttagagagtcgcctgtaatgttagaaatcccgtaatcccatcttgatcctaacacattattatgtgagctaactgagacgctatcaataacaaacagatcgattccctgaaaggattttttattccagctgctatcaatacccacactatagaccggtttttttattggttcatactccacccactttgcagaggcaatctttagaagatcgttatattcatctccatggatggatgaaagctttttttccttatttttgatagcatctagataaagatctggcaacactatactctacttaattcaagcactaaatttatttattattcatcttgaacaaaacggagaatcaaaggctgggaaaatactattttttgtgtcaatgcagtcatagtttaatcacggagatggacttgagggattcggggttttcgactaataaaaggtcatcattcgaaatatcaatatctaagagttttttacgcatcaatcttcttaatatcttccccgatcgattcttgggaaggtcattaacaaaataaatggctttaggaagtagaaattttccaattttgcttatcaatagtttttcaagatcctgctttattgaagagtttgtctggtttgttatatcaacattatttaaaacacagaaaacacatacagattcaccacttaactcgtccgggatgccaacaacggcggactcaacgattcctgaatagcttgttaacacttcttcaatttcactagggtcaatcctgtgtccggaaattttcatgacatcatctacccttccagatatgtaccacatattttgtgaatccgttcgcaccttatcgccatgattccaaatattgggaaatttcgaccaatatgtatacaggtatctttcatcatcattcaataagcctttagtcataccaggccatggattcctaattacgagatatccatcattaacagatttaccttgctcatttaagatatcaacatccaaccctggtacaggtatacctactgatgtaggtacattgtccaggaatggaagcatgctaagaattgcgcctcctatttcagtgccacctgacaaatttatgataggacaacgattgttcccaattttagaaaaataccaatcccatgctcccttatttaatcgctctcctgtggaaaccagtagtctaagagaagaaaagtgaaactttgaaaaatcaatattatttctcatgaattgtcttatcgccgtcggggcagctccaaatattgtaacatgcaggtcatcaatttgttttgcccaataatccacataaggaaagtccaatgtatcttcaaaaatgacagcagttgatcctattataggagatccatatattatccatgtttgaccagtaatccaacctagatcagcataccaaaagataatatcagtagatttgaggtctatcaagtaggatgattgatgagcggaaagaatagaaaatcctccgtgtgtctgaatagtaccctttggttttcctgtcgttccggaagtgtataaaataaacaatggatcaccagaatccattaactctgattcgaatttactgtttgaatcatatctgttaaatgcctcattatagattcgtttaaaggaaaacactccatcattaaaggtattatcgaaaacagattctcctgtttctgacacaattattttttttacaaaagtattggataatacatcttcccaatgtgatcttaaattaattactctaccccttctatgaaaaaaatcactagtaattaagtatgaagaatttgaatcaacaagtctctgttcaagcgcggtcttgccaaaacctgagaaaatagggacgtgaaccgctcctaattttgaaatcgcataaatcgctacaaatgactccattctcataggaagataaattcctactacgtcacccttcttaactccgatatcttgtaaggcatgggcaaatacgtttacccttaattccagctccttaaaggtgagcttctcctttattccatcagggtttacaaaaataaacgcagtcttaaatggatgtttattaagattactttgaataacattattaataatattacattttcctccaacaaaccattcgcaccaaggtaatcctttttgcacatcaactacctttttgaatggctcactccattgaatgccaaggtcatcattgacagccctccaataccattcaacattatcaatagatttcagcaataaatcctctaaggtatcaatattatttctctccataaattgaattaaattattatcctttgtccattccgatttagaggaacttatggaatagaaaggtacctttagttttttaaccatctatattttaatcgtttagaatgcttttcagatatattattctatttttatcgtgaatttgactgcctttaattaagtggtgaaattaactgagtggatattgaaagttgaaagtatgttctctcacttgtgcctcgctgcccctattcaatgtataaaaataagttccgtttacatcgtacgctcttgaagtagtagaggaactagaattatctgtcgttgcactcagtatttttccttgagaatcaaaaagtgaagttccatcttcggttaagggttctctatcacgaagggctattgactgatttcctattattgtatacactgattcaagagaatctacaaaaccctctgttctagatcctacatctccagaacttatccttacattattaagataaacattataggtaacagtttcaaggattgcagcccccttatttggattatatacattgaagacagtttccaattgagattcattatttacttgtacaactttcaccgaatcaactgataaagataaattctggctgttgagttgctgaggagttagttctgtcttttctggagaaccagatgccaaagattgatttggcagagtggatatattatttgtaccattgacttctgattcaggattattatttgattttgaattttgagataaaaaccctatgttaaacaagtaaaaaactactccaataattattatacctaaaccaactgcatatataaccctcgtattcataaatatgagaatttaatatttgatcctataaaatggtttagaaaaaattttaagaatgaaattacgtagtgttataaattataccaaatgacgtctttaacacatcaaaaagggaaatgggatgcgaaaaattatcacaaagtttcttccatacaagaaacctgggcaatagaactattatctcaaagaaaatggaagggaaatgaggtattagtagatgcaggatgtggaactggaagggttactaaaatcatttcaaacattttgaaagagggtaaaatctatgctatcgatctggatcataacatgattgaaaacgcaaagttaaatctaaaggatcaagaaaatgtaatatttatcaaatccgatttatccaccgtagaactaccagaaccagtagacattatcttttctaatgcagtaatacattggataaaagatcattacagtctatttagcaactttttgaaactactaaagaaatccggagaaatattaattcaatgtggtggtaaaggaaatctaagaacagtccagccaatattagatttgacaagaaaaagcaatgcgttcaaaggctattttcaggattgggaagatccgtggaattttccttcagccgaggagacatattcaatgatggaaagagtggggtttaaaaaaattgaaactggtcaaacaaaaaaaatggcgaaattttcaagttttgaagaatataaactgttcataaaaactatgatattgaaaccatatttatcatatttgcctcctgattacaataatcaaatcatagattcttttatagattgtttctttaaatattataagaggagcatcaaaaggattaaccaaagtccctaatgactataatattgattacacaagactaaacattcgtgccttcaagtgaactcctagagataaacacaactgattggtggaagatattgtcccgggcgtcaaagaataaaatgattaaaacctttgtaaaaatgaacacaaatgtcaaataaaatataatctagttggtagtttgggttaaatcaaatgtaaataggtaaacgaagagtaatcaaagggcaatgggagtgtcattttgcaaatagcttctaataggggaaataattttgtccaagtatctgacagttgcctcctttaaatccattggatgtatcttgtcttgttcgtaatcatttttgagatcattgtacgaatagtatgatatgttccctccatatttttgtgggcgctccaatacaaattcatcgaaacgatggaataatacatagttaatgatctccaagactggattgttcaatgagatcttcgtgggacaataagctttttttatttttctataaatctcatcgtgagtatcatgaattaatatactactagatggattactcttgctcattttactaaaaattttattatcatcatctgatgagccatcatctggttccgcagtggtactggtaggaataggttcagatagaccaggtaataaatgatgatgaacggaaataggcaccttccaacctaactttggaaaaacttctctcaccaacatatgaatcttgcgttgatcggttcctgcatgaacaatatccaaatccatggctttgatatccacagattgcatagaaggataaagaagttgcgaaaaatcaagtgaatctttctctgttcttcccataatggttaatgatctcaatgttctagcaagcgtaatttgctttgaaaaaagtacaaaatttttccaataatcatcggtctcctcataaagcttggtcccgtgaataatgttaactccaggacaaaaaaatttgaatgctttttcataataatccgaaatttttgaaattaattcccaatcactatttagtttgttattaatataagtatgccaatcagctagaaatacattagcttggacgccggccttgataaaatcattgatcttaaaacctgtaattataaggctacctaaatgtaattttccggaaatttccaatcctatataatgtctaggagttgttttggtctcaaacaatgtagccaattcatttggtgccactatttcttctgttggaggcatctctattaatcgaatcttttcttcaacgtccattgtaaaattttagtatagagattattataaattgtataatttaacaaactttattgaacaagaccaaatcaggttaggggtaaaagttgtactaatcttttaacttgtcaacttttatactgttgagcttccttggaaaaacataagaatcagattctggcaaagagaaaatagaatcagagattgtagaagtattttttctagtactttcaattgcaaaaaatggctcgcaatttactttaatgaatttcttcctgttacgatattttttatccattttaaaataaagataatattccaccactccttcccgaatcccagtaggacataccaataaattgtcaaacttttgtttattcatcaatgtttttatgataaaactaccggtcgttattgtttttgctctttcggggtcgatggatcttaaatttgacaattcatcgtcagacagtccttgaaaaatagtatttgcaagagctatcactcttttatcaagtactgagtgaccatgataaacagagggggctaaatttattatttttgacataaacttgtaaatcgctctactcgttccgcctattgcaaccagttttgtatctgacggcctttccaaactcaattgatcagttgaggggatatttttaatcaatgatttttctaatcctttatagcggaaattgggccagcgcttcctctcctcaataacactattacggtttacgaattcttcagctagtctcaaaacacccatatccaaacaaattgtttttattatcttaaaatcttgaacatgtatcagttcaaggctaccaccaccgagatcaaagaatatgccattagggatatgcatataggattgagctcccaaatatgaaaagaacccttcttctgggccggataaaatattaaatagaaatccagtattgtcttttaaggtatccactacgaatttctggttagttgcatctcttactgcactagtagctattggaataactatacctacatgcttttctttcaaatcttttttaaaactatcgagtgcttggattgttcgatcaatatgtctatcagatatgatgttgtcattactattcaattctgaaccgatttgaacgtaatcctgtttttgatactgtttcttgtaatgcccatttttataaatattgtatgtagaaatttttatagaattataaccaagatctattatagcaagactttcctttttcccagaatctatggactcataatacaactatagtaaaaactactaaaaagaagtttatttaatttttgtttataggctatgcataaaagctatgagtaaaacccccagaggaaaataaaacaatacggatggaaaggtaggttatcatcggtattgagaaagcgtaaccttttccccgggtttcatatctctctgagtttttatctttttaacagcatcttcgaaatgcttcatagtaacatgtgcctccgttgcatgttttgcagcgtcttcaggattactatatttttgaagatactcatgtaacacgagtgaaaccgccgtatttgcaactgcagacatatctgctccgctaaacccatcagtgagttcagcaatcctctgtaaattgacatcacctgttaatggtttttcttttgcatatatttccaagatctttaaccttgtacttatatctggttttggaacaaagactatcttgtcgaatctccctggtcttagtaatgcgctgtcaatcatatccagacgattagttgctgctattataactacaccgtttaattcttgaattccatccatttctgttagtagttgagaaaccatccgttcagtgccagcattaacaccttccattcccctgataggagcaatggaatctatttcatcaaagaaaacaacacatggtgcggcttgtcttgcacgtcggaaaatttcccgaacccctctttcagactctcctatccattttgacaataattctggtcctttcacactgatgaaattggcttcggattctgtagcaactgccttggcaagcattgtttttccggtaccagatggaccgtgcatcaggattcctttaggtacagagtgacccagtttggtataaaggtcaggataccttaatggccattctactgcttcttgtagttctcgtttaacttcatctaatccacctatatcattccactcaacatcaggagattctagataaacttctctcatggcagaaggcattacttctttaagggcattttcaaagtcagacatgcatataattaatttttcaagtgtctcgggtggaattttctcatcttccaagttaagttcgggtaacaatcgtcgaagacatttcattgcagcttccttacagagatattccaaatctgcaccaacaaaaccatgacttacagatgctatcttttcttgatttacatctgattctaacggcatatttcttgtatgaatttgtagaatttccaatctaccacgcttatcagggactttgatttcaatctcccggtcaaatcgaccaggtcttcttagagctggatcgatagcattgggtctatttgtggcagcaataactataactttacctcttgcttctaatccatccatcaaagataataactgagatacaactcttcgttcaacttctcccgttacttcttctctctttggagttatagagtctatttcatctataaatattatagaaggagccttttccttggtttctttaaatatctcacgcagtcttgcttcagattcaccgtagaatttgctcattatttctggaccagagatactgataaagtgtgcattactctcattggccactgcttttgccaacaaggttttaccggtacctggaggtccatacaacaacactccctttggtgcttctatacccagtttttcaaatatttcgggatgtcgtaatggcagttctatcatttcacgaactttttgaatttcttcttttaagccaccaatatcttcgtatgttacttgtggtactccacggagagtttctccacgttcagctatatgaaatacagttttttgagtaactaaaacggcatcaacaccggggccaggtgtgacaccaatgacttgaaatgtaagtctaccgccaaaatatggtaccatcacattgtcacctttgattaatggtacactttcaagagcatcagctaaatatcgttcatcaattggaggaatagcttctaatggtgcaacaatgactttttctgcaggaacagctttaatctttctaacaattacagtgtctccaatagctacacccgcattattcctaaccagaccatcaactctgattatacccttaccttcgtccgaaggatacagaggtaagcattttgcaactgttttacgtttacctctaatttccacgacatcacctgtagacgcgcttaaagcatccatagaatcataatcaattctagcaacaccacggccaacatctcgtgtataagcttcaagcacctttaaagaaagagtattactctgagacatgattactacttaatatttgataacatactacttatacacttttgtaaaacaaactctagcgtaatcaggtattttatggttcattataataatatcgagaaaagaggtaaaacctaaatgtactaaagaaattataatgatgctctgatgaaatagtctaccggttaaactcaaattagcaatctattatcttacgagaccaacaataggtatattcacaaactcgttgaataaaggcgtttgactgtcgaaattaataaacaagattctattgtcgataactgatatcgtcacaccaacacccttaaagttatttgtctcatcggaaatagtcgcattctttgacttcatttcttgaacaacatctatcttaccggaatacgttacatcttcattctgttgctgtacagaattccccacaaaattcgataaatgataggaggttgtattgcctatgtcgttattattattagttaattgtgtactaccgttgttattgttgttgtttgcagtagtatcattttcagaggtaatagtttcagacaagttataataaacaggctgttttataaaactggcattaaagtcctttgaaccattatccttagtggttaaagaccagttaccgaatagactgtttattataacaccactatcttgattatattctgaacccgcaattgtgccatttagatcagccttaggagatccagaattaacgttgttagtagaggtagtagtagttgttccatcatcgcaggtatttttggtcgtactggttgttttaccattttcattagtttgcgactgaattgagatgttattattacaattgttgtcattattgctagattcaatggttgattgaatgttatcctgagtctgtttcatgaaatcatcaagatttaattgcgcatttacagtattaaaattaaaagcaagaggagctgaaaccattaaaataggtattagaaggacaatgaaactggatttatttacttttatatcaaaattactattattttgtaatatattaaaacgatagactttttcactagacattaataattcatactttctatatgcaaaacacgatttatgttttactgaataaaagatagggatttatattagttcattttcttatataaaataattataaatgattttaacagtatttaagactcttagatattctcctcgcatctaaaacgaatgatcgattaatgaagcaatcatcaccagacattgataaacttgcaggaatggaatactactctacagaatttgatggaataggcggaactataaagaaaaatgctgaggattttcatgtgcaagaaataataaataacattttcttagaacagatctcccctgatcagacttcaaacaatgttttcccagtttatgaaataaaaaaaaaggagtggattcaagtcatgcgatcttaattttgagaaaaaaaaccggccttgatctaaaaatagttggtataaaagacgcaaaggccgccacaattcaatacgccagcagcaatacaaggaaagcagtaaaaaatattgatcttggaaaaataaaactaacactggttggtttctcaagaaaaccaattgaaaagaacaatttggttggaaacatatttcaaataagaattgctgaaccaaaaagggacaaagtagataatattttacaatttttgagcgatattaatagattgggcaactattatggattacaaagatttggaagtgaaaggttggtgactcatttagtcgggaaagccattcttgaaagaaaatttgataaggcaactgagattttaatgacttataccacaaactatgattcaaaattcagtcgggaaatcagggaaaaattgagtgacattaaaagtaatccaaatttaatacgagaaatcccccctggaatggatatagagaaaaatctagctcaggcaatattaaggggaaaagactctatttcagccttaagaacaatccccattaatatcagaaggctatttgttcaagcatttcaggcatttctttttaataagaccttaagcattgctattagggatgacttctcactcaccaaacctgaagaaaatgatctctgttttgatgtatttggagatgatttgacctttggaaaaattcgcaaatatgaaaaaggaaaacctactgacagcagagttaagagattgcccattattaggttaccaggatattctttccaaccgggaaagaatagatttgacaagatcataaaggaattcatgaaacaagaaaatttaaacgccaaagatttttttattaaggaaatgcaggaattaagtgaatcaggtggttttaggcaagcttgttatgtatgtaaaaacttcaaatataaaaaagaagaaaattccttattggtaggattctctgtgcctaaaggatcttatgccaccgttttgttaagagaactaattaaaccagtcaatcctattgagtcaggtttttaaatgaattcgaaaatgaagtatctgacgattttacaaaaaaaagaggtcaataaatagacataattatgaccatgcgtctaaatacataaacaagtgagtgtgataagattccagccaagaatgatttacaactattcaaagcattcataacaataggaatattagttatattattcggtttggcctttataattattgatatagttgtgaatgaatttaccgaaggtttgagagaaataggaattagattcttaatagtaggaatggtaacgatagcaatagcttttgtctatagacatcacgtagtaatcggattcatacttagacaatttaaaaataaattgacaaatcaggacagattttcaaaatggtacaagccataaacaaaatgtatactttgaatattatttgattatcaattattatcatgatggtctaatccgccatatttgaattcaaatcaagactcaaaacaaacaattaaaaagataaattcttacaagttgagtagctatttggtaattgaagaaataaggtatgattttaaagaacatcctgagcaatttcggagctactttacaaagatcatgaagttgataataatatccaaactaaattgtcttgaaaggaacctcacatctttgaaatattttaatgaaatagtagataggattgaaggttgtgatattcacaagataaagtatggcaagccaatgatatttactaaattcttaggttatgaattcaattatcatacagtaagagtaaagataaagattattgacaaatatacaatagacatatcattagagtctatcatctcagattttgtggaaacattcgacaagctaagtgctgatacgaatgtaattaactggaatataaataagtattcaacaagtggaactaaattagaagatgatcaagagaagaattcgcaagacgagccaaattttcatttgatggagaaggaaaccaagttaactttctatctgttggattcatttatccaggctatatatattttgatgacccaatcagccgtggatactaatagtctaggtggtcgagtaattgagatcaaagatatatcggtttcaagaaaaattcttaatattgaaatgctagtggatgaaaaaactgtgattttagatttgctcccaaagtctaaaaatggcgtggtgatttcaatagataatgatgaaaaaattggagagactatcaaaactgtgatgttacaaaataacttcaactgaggtttcacgcgttttagtacgattcataagcttcatactccacccctgtctaacaatgcagctagaaaaagtataccgatagataaaccaaccgttaaacgacccaataaaattattttatttcttaaagatgaaaaatatttatctgggacttctctttgcatgatactaatttcaacattcttgtttagaattaaaatgtgaataacataaacaattatcattatacatactagtatgattttagccagaagaatatatccatatgtagattcaaacaaataataaggctgctccaaaaacgatcgagcattatatactccagtaataattagtaagattaatgaagtcccacccaggtagttgaatcgacgtcctactacaaccatgaatgaaattctcttattgacatctggtatagtcttcttaagaaaaggtgccaaaacaatccctagaaaaatagatccacctacccatattgaagaaaaaaccagatgaatccatgtaactaatggatcgagaataaacattggatagtgtcttattcctatcccataatatattattataaacaaagttttttaataccaatactttacagattaattcgatagaatattgtttttaagtagacgcagattagtattaataggaacagctacggttatcgtaggagtcattgtattattacctttaattttaacaataaccttacctgatttaagtgcaatcgacataataataaagaatatagaattagaagacatttctgaagataatattgctaccctaaagatagtattcaatataaagaatccaacaggtcaagcgctaactacatcaaaaattgattatgaattaactgctaacggagaatctattggggaatatacaaagtcatatattgacatccctgttaatggtagaccccaactgttgtcaaatacagatacaaacattacttcagtgatagaagttccggttcttaatgaaaaaattaggacggatttaaggaataataatcaatcactgcaaattattgaatggactgctgatggaaatgcaataatagagtcaggatttagctcagctcccaaaatatttaatgcaacatggtaaagtctatccaaacatgctattttttagtttgagtcgaataaaaataaagtatgacttttaaagtaaatctcgttcggatgatggctcttcctgagttagtataaatttatcaaaagaagttacaatccattcttcgatgatttgacatttagcagggctgtattgattagattcgtcctcatttgaacaaagatgttgataggaacaacaaagacaaggtgcaccttcaaccatacttacatcaataggtttttgttcttccgcatcaatagaaatagtctttttcacgactaatttatacgtccatcggccccgataaagtgctttttctcgtgttattaatgactgtttttccaaatttcctaccagtcttgaaccatctctactatctagtgagaaaagtttacataattcggtttgaaaaacaccctcttcaccacttcctgtgatagcgtcgaatactttatcgatgagatcatttttagaacgaacagataattttgaaccaataatttcagatgacaaaacatattataaacaacaaaatgatataaatgtctttataacaaaatgacaccacaatgtaaaagggacagatggcaaaacacaaaattacatcttcagataatactgataatataaccttgcctattggatgaatttattaagaaaagtataaattcaaatattgtgttgacaggataatgcttctttttaattttcaggaaaagttgcaaaaaagccagtatgtacgaaatcatagcacaattaataaccagatacacataaaatagataatctgacagaaatagcaaactaaattcaaatccagacattatttgaataaaaaaaagaactttttatttttaactgatacattgatccacatatttattctatcaatttatggatgcatccccgaactttcttcagaatataccgagatgataatttcaacaagttcataagtacataatagatatactgattagcccctaattggtttaaaatagcctgatagatatagtatagacaaaagaagactactgaaaacaagatgaagtaaaaagataattggcaatttggaagaactgcactataccctactcaaaaaaatagaaagattagataaacaacatacaagacattgaaatctatccgatatatatataagaaaaattcgaaaagaaagaatgaaaaatatagatgacaaataaatcatatctcagtattgataatgaaaaaaatttattttaattctatgaaaaatgtattacataatatttcataaagaataaaattaagataatcttttacggacttatgatatcctggtggtcctgcacaggagcgggtctgtacgcatttcactcatgtaaattttttctcgttgtttttagaaaatctttagttaaatttgaaactgcagaaatatcttgtcctctcatctgatttaccattttctcaaaattttgattactatattcatttggtatattttgcatgcgaaccttaagtgaagaaattatctgattgtgtatctgttcgagttcggacggattcttctttggtactggatttaaatcagctggcccaacagtatagcttagaccaattttcttaatgttattatttacaaaatccatacaataactagatcaaacatctaataaaagtatttttttattgattttcatgaaccaatgtattgaaggtataatcgtgcttatccatttagcagagcccagattgtccttatggtaatatggtaataataaaaagataatagcgcgaaaaagagattcttaattcacccctcgttgatcaattgctaaaaataaagacaaaaaaatggctccactaatcatcaactcatggaaatatctctaattataatcactattattaaagatgttactaaattctattgattaagaagacagtatgatattatatcataatagattagctaatgatctaaagtatagaagatctggttattctgaaactcaattggatatcaaaagtaacagttggctattcctatttgcctatttgccatttataatcttattataataattatgatcgattcttatcatttttccggtctccgtcaactcgattagttcgtcaaaaaattgactgctttgattatatgtttcagtaccaaaaggatgcaaccagaaccttcgcctcatcaatggatgattttgatccttaggattaatatattccatgatagggccaaattgcagtacatattttccaaaccaaaatccaagtcccacattatgtactattttgggatactttactaggatattatccatatccgaaagattcacataaaataaatttacattattttcggaatgccattttataaaaagtaaggaactgttttggtttactcgaatatcttcatctagtttttctttttccataatcaaaaacctataatttttcttattcaaagtagaatcttttattcgcctcaaagatttttcttgatgacttatgagatttaaaggatcattattttgtaaatcccagtactctcctggaggtaagtaggttgcggaaatataatcctgaccattttcaaataaaaccctatatatcaagcctgtggaaagtaatccaatttctaacccctttgaagggttggttaattctttgaatttatttaaaatagttacaaaccttgcttcgcaaaaattttggataggagccacaaagttatcagcaaatttttcatattgaatcaagggcttgagatctatactaaattcgatatcagaattattcccatattcatcatttttataaaatgagtatacattttctaattcattgtggtgttttagcatgatcttacctttgtcgtataatgtcaggccaaatttattcttgtcaaacaaataatcgttctttactttttgataagcataatcagttaataatatttgattaggccttgctatatccattattcttcttgcaagaactaactcatgaccccaaggtgcaaattcagtatgaacaccatcttggaaggaaagaaaggatccaaacccgattcctatccgtataaaaacttgttctttattttctacagatgtattaaactgttttatatttttgtggatataaattgaaagctctagtggatgatcatattttgagaaaacgattaacattccatctcctgtgaatgacttgtatatttcaggatgctcatgagtttcgagaaacctagaaattaaatctttgattcgatttatcttttttaattgacttgatatggataaattaggatcagaagagccaacaatatcgataaaaaaataccatccatcatctatactctggttaaggtcatttctattcatatttccgattatagttaatttgtttggcgattccaatttataactgttaaacaatgaaagttaagaaatttaattatgattccaaaaaatagatttgaaaaaaggcagtcaaaataaaggtaacaaaaaatatgtatgaagaataatttcttggaaatataatcaataggttaaaacatccacaatattgtccaagtcgaatactgctctttatttccatctatttttatggaaaataaactattaacccgtttggatacatctagtatggcaaattaacatgaaaaaacagtttatcagaaagagcatgtgtttcaattagggtttgagaataacaattaagttacgtaataattgaataggaagacaataatatacaagagtttgcgaatagaagttttgtagtatttaatcctcaatttaggaactagaaataattaaatagatagtaatgaaaattgtctagaaaataggagtatgctagtatagagataaatagttcgatctcaatcaaggaatccttttgaattatagatagaatgtcaaacacgattatcattcttcattcccctgaaatgttctttcagatgcgacaatctgctaaaaaatactcaaaatagaatctatacaactatagatctgtattcgaacattaatttgtttctgggatctggaggcaacatgataagagtattaagaatattctaatttttatcaaggaaagagggttgagataaatcatgaggacatttttatttagataatcattttggattcatgagatcaactagattaaagatcttgacgcccagtcttctgttttagttaactgtataaccatatagccacaataagtaattggacattaacatatttatcaccgcagattaaacatactgtgtgactttgacctctggttaactcgatctctagtagtcaagaatatgcaatattgtgtaatggactcactaaagattatggatcacaaactgccgtggatcaaataaatttacaaatcaaaagtggaagtatttttggcttattaggtccgaatggggccggaaagactacggtgattaagatgttaactggcttatctaaaccaacgcaagggaaagcattagttgcaggctatgatgttatgactcactccttaaaagtgaaagaaaatataggatggatttcatctgaggtaattttagacgattctctgactataatggagaatatttggattcagtctagattacacagtatgaacaatacttggaagaaaaaagcaacagggttattgaaatatttggaattggatgaaaaagacaataaaagggttggaaaattttcgactgggatgaaaaagaaattggaaataatcatggcgctaatacatgatccaaaggtcctgtttatggatgaaccaacaattggactagatgcaaattccagaagattgctttggagattgataaagaaaataaatacggaatacggagttacaatattattaactactcattatatcgaagaagcggatgtattgtgtgatgatattgctataattaacgatggtaaaattgttgctaccggctcaccccaacagctaaagtctagagccagcggagacattgtggaaattgatttcttctcacatttcgactataagattttagaagacgttagtgggatactggaaataattgaagtaggtttagaaaatagtgatacggaacaaagaacacgatcggagagctctttgaggttacgtattaaagtcggaaacgccgaaactattttatcgaaattaatttcgaaaataacagcatttcagccagcgcttattaaatcaattaagatagaaaaaccaaatttggaatcggcttttctagaacttacgggaaaacgatttgaagaaatggaagaaactacatacgatcaaaataggatcgattaaaatcaatataaaaagtaaagacaagaatgattagaatacttaatcaactttttggattgtatataagagagataaaaactacgtttagaagtccggccataatagtattaagtattatccaacctttattatggataattttttttgggagtagttttgcatccgcaccaagagggtttcttgaagatttctttcatacggataattacatagcattcttattatcaggacagcttgctacttcgatgctatttgtaggaatgtttagttcattgagtctcattcaagataaaaaatctggatacctgagaagaataatggtcacccctactagaaattatactatattcctatctaaagtattaggagcttcaacccgggggatgttgcaagttccaatcgtcttcgctggcgtaatgttatttggagtacaactaccagacataattggaatagtggcttttatagtatcgctattccttctaagtttaggtctttcttcaatatatctatttttaactatgaaaagttcagactggcaaatcccaactgtagtggccaacttcataaaccttcctctgatgttttctagtacagcattgtttccaaacgaaaactttccgacttggatgcaagtaatttcgaacctaaaccccgtttcattttcgtctacatttggaagagaaattattatttctggcaatattgccaatgctaactggttgtattttttttatctattaatatttgcttccagtacgttactcataggtgtactagtggcgaataaagctttgaaaattgattgatccaaaatataccttcacagggtatggtgtaatcattttgtcaaaatctttgaccctttatattataaaagatcaaatcaaatatgttaactacttctactaagttttttctaattaattgtattcatgccaacattcattcttttatctaataaattccaggtctagatagggcatatctatctagatatgcctaggagcaattaacaaaaacaatggaatcattgttgaaaactagcataaagtctcttatactttttagttgataacttttaatgtcagttattcaagaaaatcatacacttcaaaggtctttaaaatgtactccgaaagcaagtcaccggtatatatagtgattaagttagatattttatcagacattgttaaattaattaatttatctctttaaggttataaagttaagaacgcagtagatgaatataatcgagcctctaggtagaatgacgggattttccttacctgttgttaactgtatttattaccagaacttgatatagatcatctaaaaaaaaggagaaaatattataaaaaagtggtttttgttgttttggatatattattctagttattgtgtagttgaattaccagtcataccggtagaattatccatactcatggtcatattacccatttgatccattggcattgttgaattatccattgtcattgacatgttatcttgtgctactactggtgttaccattgctactcctgcaaataaagatgctgctgccacgatacttaaaactacgaatacattgaatttattcatgcaatgtaccttttacttcatactatataacgctagtttaatatatggaaatttttcagttaattttatagaagaaattcgatactaattttgaaaatgcttggttggaatttcctatcaaatatacctaactagaattttccgtatattatagaaaaagtgtatgaacattatcgtcatagataattgtcaaaactaaagctctacgtggagataaaaatatcttcaattaacttttaaatgcttatattgaataagaccatattttcttgcgaaacataactctatccgataaaagcaaagatacttgaataagatactgtaatacctaatgatttttgaacataaaagtttaataaagtaggattattgaagtatatcaaaattatccattggatgatcatgtccctagacatgagtacaacaacaatagttaaagcgtacagtacatctcggtataggataggcatggcaatctggcgtataggatgaatggacatgttggctgttgttatccttgttttatgatacatctatcgcattacttttaggtattatctttgcgcatattatctactttgatatatcatttactaatctatcggtattcagatgaaaaaagatttttgctatagattatattaataaaggttggtaaacgaattatataatcacataacttgatgtctagtttcatctcatctacctgtgcttttataacggagatataaaagaaataggagataatttagtatcaatcatcttattcaaaggattttctaagagaaattatttagatgttgaactagtaataaaataattcaaacaagtaattccttaagtgattcatatcttttcacatactccattccttttggagatatcacataatggggaacgtcattgtattcgctatttaataaaaggttcttgtcagtaacctcctggataaattgattagataataatgagaataatatctgcttatttgctgcaattcgatatttcgttaaagggattggatagtagctaagatatgagagggcatcgtacaacgaatcataatgagtcttatgctcgcttctttttgatttttgatagcttattatcataaccatgacttatttagtcacaatataggtagtaacatacttaaaaagccataaactaacaaaaaactcgaagtttattatatataaatttaacagtaaaatcgtcgactgaaaaacttgtaccgccctgcaatatacaataatgtccaattatgtcatattaacggttattaatttatacataaaatacgaatgcttttcagaaaaacgtggatatatttaataggaatattccataaacggttaatgaacattcaatctcttttcataatatttgcattcttaggaatattttctattatgaccggaaatattggaactctgttgcacaatatagtcaatcttcttttacaactccaccattggataatctaacaggtattgcggaaggtaatactacatcatcaaattcgaccagtacttctgacagtagtggagaaagtggagataactaatccatcaagcatcataaattcttttactaatatttcagtaaaaatttactatatagcaatttattatggaaaagcataatagtaataggcaaccatgcagttaaaaagtttaaggattagctacaaatttttacagtcaaaatattatataattgctctatctatggttttattattatcgacctttattttagacccacagttggatgcattcgctcaacaacagcaagatacaggattcttagtcaattcgatttgtcaattagttcaggataatagtttgatctcgacattagtgggactagatcaggcattaaatatatgtaataatctaaattcgattggatcaaatcaagcactatctgaattatgttccactattggtgacttaaatgttattaatatagacacctactgcaatcaacatacatcaattcagactcagcctctaaacgagagtaataagatacccaatagccaagacaatatggatagcaatctaaatgagacagtaaatccagcttcaaattctattatagatagaattttaggtttattctttggctttcttaatttttaatctttcaatcaaactgtataaattatttattcgtacataatcaaccaaagtcaaataaatcacccaagaaacctccttttttgtgttttcttctacgatagtagtcatcgtcatcgtcatcgtcatcatgacctcttccatagtgatatttttggtagtgttcatcttcgtacctgttttgcatatttgcaactttttctaactctccacgatctagccatacacctttgcatctaggacattgatctatttcaacgcctgatctattgcttaatctcatttcagtggaacaattaggacacgataaactcattgtctgaaatttgtactttaaaccaaataattgttataaactaacatcctttacgtcaaaaatatatcaactttattaaaataaaacgagtcatcattttctttgaattagatcattattgttaattcatttttatttagtagtctataacttctttcatttttgttctcaattttgaaaagtattataaagattttcaaataaggaaatatttgtaattactacaaatttattttagtcgataaagcttcattatttccaagtgatttatcttgccatacaacaaataggctactattagaagatacggtcatggatggacattctgatattccggcattattgctaatatttatggcttcactaaatgagtcccccaaatcacgacttttcatgagaaagatgtcctgattaccttcaaaagtattattgagcggagtagcttgtattgcaacaactaactcaccagaatgctgaataagttcgacgtttagtgggtttaagaattgacccttaataaaagatggcttggtaaaactgttaccattatctatacttttagtgaaatagataccatcgcctggtatattgctactaatatttacattagtcgatagagaggtatcacgattgttagtagatgggtcaggagaaccccaaacaatatatatataattatcgttagcagttatttggacctcacctggcttctctttatcgtttaaacggatttcttcgtcgaaactacttccattgtcagtagatttgacaaaaaatattccctcattagaattgtttgttccgacaattgatttatcttcactatcaatattccatgctatatacacattgtcttgataggaagaaattttaggaaaagagcttttccctgcgttgtcgctaagggacactacgtcaccaaaggagctcccgccgtcattactggagataaacgatatgttactgttatcttgtgaatttttttgggaatcttgccatactatatacacattattcccagatacagatatctcttgattataagaatcagctccgttatttgaaagattgattacatcaccaaatgtttgtccaccatctgtacttgaaataaggtagacatccctattcagggaagtattatctgcccaaactatatagacattgtttccattaattgccacttgaggatgctcagaaaatccagagttatttgatagattgattacatcaccaaatgtttgtccaccatctgtacttgattttaaaagtatatcataattaatccgattatcgccaaacaggttatcctgccacacgacatatactttattttgagatgattctgtctgagggtatacagaatctttattgttatcacttatgttctctataataaatgtattattagtttcgttttgttcttgtgagtaagacatccgctcatagcccataccctgaattagagtcggaaataacattattaaacaaataatagcaaaacaatttagtttcctatatgaaaacataagataactaatcaacgtcttcaataatagtttaacttaagaggcagttataacataggttccaaattacttatctagagctcataattttaatagaaaggaaatttacgcattgcaacatacacatttgtaggtaaagttagaatcaacaatattttactgggtatcaggagatactttttgaaacaagtgaagaaaactgcaatagcaagagctgtttttttttgttagtgaagagtatcaatgcaatatcgatgctcatattagcttcgtcggcgcatatgctaattcaaatatatttttgaaaaaagagggaaaggcttcatgtatggcaactaatcccaatcttgtatgtggtaataatattgaactattaagatgcgcgaatatatctacatgctataaagataatcaaatccgctatgatctcagcatattattaaaagtaacagtgaatcagatagatcaggtttatcatattatgggtagtaggttttaatattatagtcggcattgtatccacatatgtctattcatacaatctttaatggttctctagctgtaacattttatcacattcacaaggattagctaatattatatcgaaaaaattcgcaacatcgttgtgcagtaaactcaacaaagaatagtactacataaatattcttgttggaaatttataatatcggaacgaaaatataaaacgaccatagctgaataaaataacgcaacctatttcaaaatcggaagtggtaaagaattttccattcttaactcaacgagaaaaccaaaaaggggtcctaaatgacatatgtaatgcatttgattccgattatagatacgttattctagaggctccaacaggatttggaaaaagtgcagtagccatagcacttgctttgagtctaggctcaagttatatatgcacatctaccaaggatttacaaacgcaatattctaaagactatcgttatattaaggcagctaagggaaaaaataactatccctgtttattaaagcaagattttgtagataacggtacctatcaatgtggaatatgtgcttcatctaatgcaaatgagtgctatcacacaactgttgaatatgggcattgtatgacaaatgaatcatacaaagataatggttgtaaatataggacgtttgcaaaagattatcaaataattaatgaaagtacaaaagaagaagaaatatacatcgacaatgctaccatacagaggtatcaagcacaatattctggatggataccaataagtaatctaaaagtacgaaggcagtggaaaccatgcgaatattttaatcaattaaatattgcactagcatccagccattccatattcaattattctattttcctcgcatttttaccttataataaacgcctctcggagagagaacttttggtgttagatgaaggccatcttatagaaacagaaattgtcaagtttatgggactatcaatatctaaaaggagatggaaaaggtatattggtaattttgatattgtagattatggctatgacagtatagaaagatggattgactttttgattgaacttgagaccaaagtgatcgctgtcactggtaatgacgctttggtctcggcacttgatatagaaagaagcatcaaatatgattactataatactagaaagatactatcagaaaataaacaaagcaagaagagaatagtttctggttcagatttgtttgaaagtgatgaagaaatctcaaaaaaatataacgaagatgatatcgtgtcaaaaaattattcaaaaacacttggtgatgagttggctgttgacgctatcaaggatatggaaagattgacgcgaacaataaacagcgtacttgcaaatccaaaaaattggatagtatcagaaatcaaaaaggataattacaaaatagagaaagtggaattaaagccattagatattgctccttactgtaaatcggtatttgaaaaaggatccaaaatactgataatgagtgctactattctaaataacaaggcattttgcaaaagtattggtttaaatccagatgaggtaaagtttattcgagttaaatcagattttccagtagaacgcagggcaatttatcccctaaatattgcgtatcttaactatagtaaccttcaatcgattgatattatgtctaggattgcttcagctgttgataatctaatgtatactcataaaaatgacaaaggaattatccatactacatcgtatgagcagcttaactttatcaaagaaaatatatccaaggaaaattcaagaaggctgttattaacagatccagaaatacaaagggatgaaatcatatttcaacatgtatctacctccataccaaccgttcttatttcaccatcacttcacacaggtcttgacctaaaggatgaactgtcaagatttcaaataattactaaagtgccgtatccaaataaaagtgacaggtggactaatgcaaaaagacaggtggatgaagaatggtattattggcagacagcgttgagattgatacaggcatatggaagatcagttagatctaaagacgattgggcaagaacatatgttttagactcggcatttagctattttgtaagaaagaatagaaattcgttacctgactggtttgttcaagccatcaaaggtagaatatagataaaataattcatttatccattttggttatagctctgattttgtaatcgaatatacggattttgattcattgtattattaaagctatcttaatagggatcagaggaaaaactgttaatcaattgatttagatatctagataagttaaatagatattaaatcaattactcaaatttaagagccagttacagtaagagtgtatgtatgtacaatggactaataggagtaaaatttagtcaaatatttcaaaaattattctaaaatagaatctggtgttaaaattatactcatcatttaaatttactttatattctctagctctttagaacattcttgacagactgtttcatgttctttggaaatgaatgatttgccacatgatgaacattttatcgtgtgatcttcatacatatgtagaatacaatgaaataacaaagtattaaagcacttatctatcacttgattaaatcgatattcataaaaattaaattcgaatatatttattccaacatctagattggacattgacatgtactagtacgggaattgactaatcgaaaatatgaaggatatattacagagtgatagatgaccttatgtacaagataatgtgcatattgcatagaggtagaatgtgaagatttacagatttatgagcaactcgcaagttaataaatccgccaatttcaaattattgattatatgctttcaggcgaccctttttctatctaattataatattccataataacagcagcattgcctatactatttagagaatcaatcttttttagaagtgtaacaggcttaatggaacattatctattcagcccctcctacttactcccacttgagcatacacaatataactattagataaagcataagaaaaccttgcagatttaatagttatactagaatatgtcgaacttggtcgcataactttattattggcgtaacctagcatatgaattcctataatctatgcggtcaccgggatttgaattcccgctatgtctttattaaaagacaaagtcccgggttacgggctttctccatatgaaattatatatggaaggccagtgtcctaaccaaactagacgatgaccgcaacacaatttctttattttgttctgatattaaacttttccaatatggttatattgggatgatgaaaagttaatatttataatttcttactttcttttgttagaaaaaatatagtttaagagcgtgtctattgctttgttagttaatttatgtttataatagttagatcctttttttggttcctcagttagtttatctttttgtataacatcatacggtctatgatcgagtgcgccctgaaaatgaactttgaatttttgaagttttgaagccacaattgaatcaaaaacttctttttgccaaaccgaccctataaaataaatagttggaggattagtaagattagttactttattgagaacgttgtagataacagcttcaatcgttttagaattattatcattttctatatattgttcagagataccgccggctataagatgatcggtaataactctggtatattcatttttagatattaagattacagatgtattaaatttgtctggtttagatttcataatgatattgaatgtttgaatgcacaattcaattcttcccatgataaaaccaggaagcgaatcatcgacaatttctttggtagattcatcgtctatttcaccatttgggttgccatccctattaaaattacaatataataacatcagattaccgtaagtaaaagcactatcagacaatttgataatatagtatataactaacaaatttatagataacgaaatcaaaaatatgagattagttgatctttattttaccaactggtatttagatcggtaccctcttggatttatcatcatatcatcataattaaaggaggatgaatttcctattataatcgtagttatcattcccatcatgtcaggatattctaacatttttcctaaatttgtgacaacaattgactggctgtctctaaacgcaccttttactattgcaactggagtttctggactccggtattttagaaaaatatctcgtgcatccttaagttggtgaatgcgctttttactcgatggattatacacaacagtaacgaaatctccaagagcagcagcttcaactcgttttacaataatctcccacggcaccaagaggtcactcatactgacaactgcaaaatcggtcatcagcggggatccaataagagcactacatgaatttaaagaagagactccaggtacacattcaacttcaatccctttattttttttccatcctttttcagcaagaatttcatatatcaatcctaccattccatatattccagggtcccctgatgaaactagcgatacggtattccctttttcagcaaaatctatggcttgattagctcgatctacttcctgagtcataggatatcggtatacttctttatcggtaattagatcttctaccaatgacacataggtttcataacccacgatgatttggctttcttcaatcacctgtttggcgcgaaaggtcatatgatcatgatggcccgggccaacccctacaacgtataattttcctaaactcattacaagatagttattatctgtatacatttatttactttcttttcttcaaattaattgtgtatattgttgaactatatgaagatagatggaagaatctaaattacatcatttgaaagaataaaataattaattttaacatcctaacagatcagtatctacataataataaaataaatcaagatgtcttacctaaattaaactctttatataaagacctcactgctttttcacaatcatcatcccttaccacaaatgccagattcaattctgaagatccctgtgctatcattatcacattaacatcttcttttgctattgaggaaaaaactctgcctgcaattcccttgattccacgcatccctgatcccactacagtaactattgaaacatcttctaatacatttagatgttttattacttttcccaataatttcaactccaaagatgttatggctttgcccaaatcttcttttttcaaaaccatagaaatacttgattcagagggaccctgagatatcatcattatatttaccttattctgtgccagtgtatcaaaaatgtttgcagccgttccaggtgatcccaccataccaccaccactaacgtctattaatgcagtatttcttattgcaattatcgatttaatgatattattagaaattctcaaattttgggttatggtagtcccaggatgagataaattaaatgcatttcttaatttcagtgggatatttgaatccattacgggctccaaagctcttgggtgaatatattttgctccgaataataccatctcagcggcttcgctataagatatctgatcaagtacttgtgcgtcttttatgatcaaaggctctgccgttaataatccatccacatcactccataaatatacctcgtctgcatcaatgcaagaagcaattatcgtagcagtataatcagaaccacttcgacccaaggttgtaatatagccatgttgatctgctgctatatatccagtaattaccggaattttaccttctaggatcaatgggatcagtttagcatttactctgaaccttgtagtattcatcaaaggtcttgcttcaccaaaattagaatccgtaacgataccaatctcttttccagtaaggaaaggagaatccaagttgtaattttgtaacgaataacttacaatcggagctgccaatcgttctccaaatgataacatatgatccagagaccttggagtaatttcagaaatcaaaaccaatccctccaaaatggcttggaattcttttaaaatatccaagatcacattcttggcttctgttttcaatttctgatcggttatagtattctcaattaaatcgacatgaagtgtagtcatttcatctatgaatgtctttattgcacttctatttccctttattatcagttcagaaagcatgataattttatctgttacaccagagatagctgatattacacaaacaatttcattatcttttcctttcaagtttttaaaagaatgtacaatattcacaagagtcttaatttttgacgccgagtccaagaccgaccctccgaacttcattattattctcatattaactaattacattgttaaataactaatgggatttatagagtattctgaagatgatattcgaatatatttgcctcggctagtaaccaatgaacccttatagtgtagtcatactcgagacagatttgttctattctaatcctggactcgtggtgctagataaaaatgaatacgacctatattggctattctaaattcaagacgtatcggcatcttcgtagaatattcaatcgcagctgatacaccaacagagcttaccgattttacaattttcaaaagatagtcaagactataagtggcctttgattcttcttttacattaatctcttccaatccttcgctatttggttccatcgtaacaacagcttctcctgtatcacttttacctacaaactcgatcctatccggataggattcaatttcaacgtattctgatacgacctctatatcagacaggatcttatcaaaagaggataaagaaagtataagtttagaattaaaggataattttggtaacggtgtagatacagttgtactttctatgagtcgcatcttgtattctcttttgtaactacccatcgtttttatcctcaagacatcttcatcaataatagacacctccaattcatctttcttgtctgttcgctttatcaattttgaaaattcagaaatccggacaccaaattttaactcagaatcgcatttatagctttcaaatgcagtattgggccaaaaaatatcaattaatgctacatgagacggatccatcccacggaatgaaattccctctgaggttgcttcaaaagtggcttcatctacgagagtagatatagctgaattaacaaccttccattcttctggggactttgttttagctacaaacatcaaatttaatcaactaaaacaactgtcatctataaattccaattgcataccaaaaaatattcttaagaataatttctccaggtatgactgcattttgtacatcgatagaattgcgtagtggcttcatcagcagaccttgtctgcaacatccaccaaaaagccatattattgaggcattttggacattccatattagtcgtaggcagtgcctcaataggcttatcagagtccattatttttaaaggatcgtcagaatattcgtaattagaaacagtttggatcacactggtagagttagtcgtactgcttgtctcgctagctactatgtgtccacactttaggcatgttaggactttttcctcttgtctattccttaaacgtgcatcgcattttggacaaaacttcatttgctagtaatcaccgcattcaattccctatggtgagcttcaacatacctgcaagatcatttgtaaatttggtagatgactctacggattcggccagtgccttatatggttcgttcttattggttagtatctttaacatatattctttgattagaggatgctttaatacaacgcctgcaaatctattatcagcattcttttgtagttcatgttgaattatatataaaatagatatatctatatcatgtattttaaattctaattctttgtccctagcatgtgtaacctcagcatgcatatacaaaagacaactacatattgaggatataaatgataccttctcagtatctaaattggacgaaaatgaaagtcgaattagtgctttaaccttgagaggagcacaagaaaggtcaatgaatgagaaattgtttgtattgaccttaagtttttccattgatggatttatccgacaagtattaacacaaaagaattgggagaaagcttataacaagcacgataattcactgagactcactatcaaactagatatcaaaaataatggaaaaattattgaatcaattaaattaataagaaaagctatttttttctggaccagaaacccaaaaattgatcataggatttggattatgatagttaaagacgatacgccattttatccattggaggaggaagaagctaggcagctattgtttgattttaatagggatatagaaataaaacctgatgcgttaagtaaaggtaagaacgacattacgatattggttgagttgtcatggggtaagcatgaattcatagagaaaaacagtttaaaaaaagaatctaacattcaacaaattaacaattgacaataactagaattgtacaagaaaataatttaatttaatttaaatataacctataattgccatctattatggctaaatttgatggaatcaaaggacaagaacttctagatgttgaagagaaagataatgaattgacattaattttcaaggacaataggtatttgtttgtaaaaatggaaaacggtaaattgcaaagtgattcggtaccagagtaatatgtaagctagcttgtcataggcttttcagcctgaattgtaataaaattaatttatttcaattaaaattttctcattatctaattgaattttataggttttaaggtcaccggattgtctccagtgttcattttgttcaatccaagcttcatcttttttccatgacttcatgttttctaattttcctgtaaaaatatcatattcatatccgtgcatgtaacaaactaccttatctccgtggaagcttcctttagataaagatgcacccttgtgcgggcacctgttgttaaaaacaaatactcgattgtttctttttccaattaaaatctcttctttttctatcgtgattttctcaaaggaattttcttttaattcgttcaatttcaaaccggtatcaaaaatcacgaatacaattaaaaaaatcttctttataaattattcaagttttatacactgataaaataaaaaaaattaaagtattggttttgtcatggttatagattctgtcatttgtttatacaatatgagaaagcgtcgtcctttttcagtcatcttataaatttgagccccatcatcataaatgattaagtcgtttttcataaggttagataagtattctttcatttgaagaaatgaaaggtatactttgtacatgattttagcctgtatcgcaccattgtctcctactgtttcaaggatcattgctataatttctaggcggcttctatttttcattttatccaaattattaataaatctaaaaaataaaaacggagcaatactaagaccaataggtatcttttagtgattttttagctttgatggtattgaaaatatgatatagatgatactaatcattcaaacaagcagtttaatattaaaaagatggcaattggaaatttaactaggagaatgaacgtaaatctattcagaaaaaatcaataatttacatataacattaatttaatcttcataataaacagaatgaataatttattggacccgacgtaaaatgtgcatgtgttatcaaatacagaataaatataggcatttgtgttaaagatatacgttacatatttgtaattgtttggtatagatataatttaacacaattttccaaaccaatctagagtttgatactttagaccgttaatatttactcaataccatagagcaaagataaataaaatatttcagtaacaaagcatgtattgtttaagcggctcgcagatttaagaacagaagataatataggaaataacattgtattaagaggctggatccatagactgcgaaagcagaaagaaaaaaccttcataatattgagagacgatagaggagatattattcaagcagtttgtccttctaaattatgcgaagatttgacgatcgaatcttccatacagatacaaggaaaattagaaaaagatccaagagcagttgaaggcggatacgaggtaaaagtggacaacatagtgattttcaacatagccaatgtagactatcccataggagagtatcagagtgatgaaattttacttgatttcaggcatttatcgctaagaacaagaaaaatgataaatattggaaaattaagaaattcgttattaaaatactccagagaatggtttgagaaagatgattggatggaagttactccacccatcctcgttcagagctccgttgagggagggtccacgctatttgaggtaaaatactttaatgaaaaagcgttcttatcccagagttctcaattatatcttgagtcgatgatttactgcttaggtccggtatggaccattagtccctcctttagagcagaaaagtcacggaccataagacacctggcggaattcacccatttagaagcagaagcaccatggatagatatgaaggatcttattgccactcaagaaaaattaatctttagcatcataactcaaatcagggaaaataataaaaaggaactaaattttttgaatgctgctgcaataaaaaaactagacgaaatttcaattccatttgaaaaaatagcttatgacaaagcgatagatattttgagatctgtagaatgcagaatccgagatcaggatggtaaagaaaggctcatagaatggggtgacgatttaagtctcgaatcagaaagagaactaacaaaggatagatctaatccgatattcgtaacgaattaccctttgagcataaagcccttttacgttaaacaggatccactaaatgaaaagaaaggattggctgtagaccttttagctccccaaggatatggagagatttcaggtggcgggataagggaggacaacctcgaaaaattaaaaaacaggataagagagacaaatctaaatccagatgattattcatggtatttggatcttagaaaatacggatcagtaccacatggaggatttggcctaggcttggaaaggctattaagatggattttagattttgacgacattaaagacgtcacattattccctagaacaatgaccaggatagtaccctaaagacaaatatacgatcataagttctacttttttctaatcatggagtaaatattggacttatggttagacaattttttgagaattgtaatcctttcgattcttgaaatgtctgccacctcaattgaagattgtagaaatttgattgattcatcatacctttttctatcaacaaaatatgggacaccattctttcatccatgggcaaatgaatatttagcaggatctttccaagaagattttgtcccaaaaattagctttgctatcaaagttaatgctctaacagtagatggatccacatttttaatgaagaggaatcttcgtaattcgatggtggtgcatcatataatttatgaatagtcgtccaatcgacatgttggtattgagtagtgagcataatattcattagtatgttggcctaaatcaaatggaagtaatttagagatagatgtagaattttcaaaccatcaatcgatcttactatcttttcttttagacaacaattgtttaaccgatgaaaaaagattcagaattctgattgtcttttagtatatcaacacctgctttttgactttccgttgaatctatagagattatattcaacacattattatcgtaaataatatcaccgataattcctgaatgcagttcggtcacaaaactaccctttctaaggtttttggaaaaccactgataacgtctggcagttttattatctttattcattccttgtgtatgattaacgtatttccatcgcaatcaaaagcaatactatgatgatataaaaaataattgtctggaatagcagaattatcaactttaacactcattttaattgcgtaaagtaaattattaattgactttcagagagattgaactcgttattgcacgttgatgttatttcatttggagtattccttgcttagtttcattttcctcctccaatcactattccatgatattctgcagaaagggatttcttcaagaacccccattacaactgttgtgaatccaggtaaatgctaatcaaaccccaaaacgcacgcaaacgcttgataccagagaggatcagatagcctcctcaaaaatttcagaggtttcatattcattatttagaaccatagaaatgcttccagacaatttaatcattcttcttataagataatttggaggattacctgaatgaagtggtaaagtaatgctacagtaatttaccaatatagcaatttaagctaatcgatataattatcttggtaaaaatagattattagttaataggataaaataatattatattgtgtcatttgtaatataaagatgcatcttacgcgtgaagaagaaaaaggcttatctggagaatatggcgaggctactgctactgcttataggatattagtcgctataggagaagcaactgatgcagaaaagcttgtacccatcaaatgggcacatgtctcaggagttaactataatacgatcggagatagtggattgcagtttttaaaagaaattagcaaagacgggaaagtaaaggtaaatacatcacttaatcctatgggctttgatagagaaaatccacctgagttatcgcctgaatttatcgaaaaacagtttgaaatagcaagaacctatgaaaagatcggagtcataccaactttttcatgtattccgtatgaaattttacctataccacaagaaaattctcaagtaagctttgcggaaagcagtgcggccgtattggctaattcacatctaaatattattacaaataaagaaagtgccttaagtgcattagccagcgcattaaccggaaaatccccttattcggatttaaggattgaagaaaatagaacaccaatggtcgaaatagttaatgagacagatttagaaaacgaactggattatggtctattaggatatttcacgggaaagacgattcaaaagagttgtaccggaatttgcaatatttccgaaaatacagatatgtggaatttgaagtcacttgccgcaggaattggaacatctggttcctgcggaatgtttaagtctaaaaaaccatctaaattgatagaaaaagtgaattatggaaaaaaggaaatgaaggagactagagatgagttgaatacatcagaggatggtcaattaattacatttgggagcccccaacttggaattgaagagatgagtaaaattcaaacgttgatggagggaaggaaattcaccaaaccctgtaagatcttttgtccaaaaacagtgttttgtaaggctaaacaatatggaattatagactcattatatcaatcaggagtagaatttatctccgatgcatgtacctgcctaacgcctcttataaataagaaaaattacgatagcataattactaatagtgtcaaggcatcttattatatgaaaacatcaaataaggtttcagtagctttaaagagtcttaaatcaatagtcaaagaatatacggtataactagtttggaattacctttaatataatagagttgagttttaatctggaaataaaatgtataaagatagttggaggtagggctagaggcaaattattgttgtcaaaaaaacctattaattttcttggaatggtaaatactcaatcaggagaaataataagcagtagtaaaggcatggaaaaacaaaatttaaagggaaaaatccttgttttccctaattcaattgggagtagcgtaggagcatacacgatttattctctaaagagtaacaatgtagcgcctaatggtataatttgtaccaatattgtggacataactacagcttcaggttgtgcgatttcaaacatacccttagctttcatcgacaatcagaggtatgatgaactggttaattgtattaaaatttcagataaagacaaggaacctgaaatcatactagataccgaagaagagaggattttaatcgattagaaaaaatctatataatcaatacttttcaactaatgtgtctcgtcatatggctttcgatgggcgaacggaccatttttgaatggaatgatgataaaagtccatatgacgagacacgagataattacatattagtctaaaaaatttaagactacatagaatatctaaaattatgaaaacgagttagtaagttttaaagcatatatttcaaaatgcgtaatgcatccttagtagaatgactattcagtttcagagtatgtgcgttataataatatagatgaatttgcaatccaaaacattttagtataaatctttacaagttataatattggtcaaattttgtcctgaatgtggtggtagcttgaattttgatacaattacaaagaactttatttgtagaggttgtgggctttatgctccaagagaaaaattcgaggaattgcatgaaaagaataatacaatagatcggaagaataaaagcgacgactatcttgattggtggcaatcttccaaaaaagataagaagaacgatcactagttctttagttttttttgttcatatccagcattgaaacagttttgcaaactgaacaaatttcgtcggttgagattccaccacaattcagacaagcatttttgctttgcttatcattactggaatttcttattattttagacagtttgttcatagagttaaaactattgtattttatacctggatggattttttctaaatcattaaaaaacacccgaaagtcgcttctgatgctttcgttcatataaggacattcgtctgcttgaaattcaatgcccatgtgaaaggcataaaatacgatttcattttcatataactctacaaggggtttaattttctttaatccattttgatattctattggtttaggatacatccaaccaattctctcaacatcgcccgaaaacaaatttatcataaatgtttgaaggtgatcatccaaattgtgcgctgttgcaataatgtctgattgcatcgaaagagctgcaacatctaatgcccttctcctaaatgtcccacaaatagaacatgagctagccttttttgatggtctttttacaatcgcttcatccatacttgaaccaaacaattctttatagctgaaaattttgaatggcacacctaatttattgcaaaaattttttactatggtcagagattcatcacgatagccctcaatcccttcatctattgtgattgcaataatatcattattgttatcttttgaaacttttttcaagatgtagagaagaacaagactgtcctttccgccggacacccctactgcgatccgttgaccataattaatcattgaatattttgaaattgtatgcaaagttttcttttcaattgaatgtgtgaaacaagttttacaaagaacttcaccagagtaatgccggttaaacactacgggtcttttattacatttattgcatgtaggcaccaaagcgctaagtacggtataccaacaaacaagttaaaagtgttcaagtcaaacaataattatctattttcaaatttgtgtaagtttaatcgtttatgtttactctaaaagggtaataatacctatctctagtgctttataatattcgctgagaagttattaaaggtcaactctgtattctaagtgccatagtcaatggtcataaatttgaagaccaaatgtaatgtcgttaattttctttaacaatcagacacattcctataattttggatgtgaggccgtatgcatgattaatatcaaatattgccaacacatatttagatatctgcaacaaaaaaacatttcaattttggttttaatttgttgaataaacacgtacttaaaagatatcctactaaaagctttagaaaggtctaataaattatttaaaattacaaaaatcaataaaaaaaactaaaacctaaacagggagattgtataaaaaaaggttttatttatttcgataaaaagatctaataaaggcgttccatgcattaaaggtatttgcgatatagtcagtatatgcgtctaatgctttgttatatagctttacattttcacgagtagtgtcgatggcatcaaaattaaactgattaccggcggtgattgcttttacaaagttatctacattttcattggtcttattgaatagctgttgatatgtttcattaggttgtgcttgagatacgtttacaaattcctttatcaatcctttttggtgagcaattgtcttattgataacatcttttgaagactgaattacttcaagttgaaaatcagaaactgattgtaggaatcgtggttgaattttaacatactcatcgattgattttatcatattttctttaatagtatcaagtgttttttctgctgattgttctgttaggttgatataagagtttacgtttttttccatgttgatagaggcatttgtattagttgtactaacttctttactcataggtatagataaacgttagtgacttataaactttaccagaattacccatttatttccagtaaaagccgctaaatggttaaaataaaaaattatgctttggttccgcagtttccgcagaacttttgtccatcgcctatttgggtaccacagtttgtgcagaatttgccgctagtataagtaccatcagctccaacagccaatgttttcttcttaccagtttgtccgcctgcagcaaagaatgcagcagcaactccaccaataattacagtaattatgattatcatcaatactgtgttatccaaattagttccgaacatagcagtaccagaaccatatgcacctgcttgttgagcattattaatcttctctgtagccagtttaagttgttcttccaaagttgcagcaccaggttggccgctatattgagcatatgcaatatttaatactggtaataatagtatagaacccattaccaatgaaaaagccgctaccattgagtatgccttgttcatattaaaaattactcagataggaattatataacttttatgttaaagaataatgataacatttaagatatgtaaatttttatattaaaccagagaaaaatggcgcgaactcatgcccacacccatggaaaatcacattcaatcagaccaacttctaaaaatgccccctcttgggtcattgacagtcaagagattatagaaaaaattgtagagttaggacaggatggaatgaccgctagtgagataggtttaagattaagagatgaatttgcagtcccattagttaagccaattattggaaaaaccattactcagattatggaggaaaatgccatccagagatcaatgcctgaagatctagaaaggcttcttcgcaaggctttaggattacaaaagcatttgaacacccacaatagtgataaaagaaatgtgaggtctctagagctgatagaatcgaaaatacacagattatccagatattataagaaaataggtaaaataaatcaatcatggaaatatgcagcagtaatcgctaaattagagtagagaatgcgatataccgatcgtgattatatattaaatgccgcaagtcaaaaattattaaatcaaatagaacatcaaaaagatatctttattctttgtaattcaaccgtagatggcctagtgagcagtgccatcttattaagttcaattcataatttaaaaggaaatgctacaattagaagctttaattcatcaaaacttgaagactttaaaacagaattggtgacggtcgttaatgagaagcacgatttgtatgtttttttagattttgagtcaaacttctatgattttataaccagcctcatgcaagaaagcagttacctattcattaattcagaccctcataatttggatcaacgcatagaacaagaaaaaatcgtaagctttgtgaatccgctgatatggcaaagggataatggcaaagaaaataggtatacttcatctagcttgacgtacctaatagttaaaaactttgatagaaagataattcgtagttcctttttaccgattgttgctgcattttctaagaacattgattttaatactgaacatatagaacttaaagaaattttacagactgcactagatctcaacttaatcgagaaaaaaaggggactgaactttggagtagttgaaactactcctattatagatgcgatagaaaataatacagcccactttataaaagggattacatggaacaaagaaaattcatttaagatagtagagaagtcaggcgttcaatttactgataataaaagagttagaacgttaaatgagcttgaggatgaagactttaacaaaatattcaacgccatcgaaaagtacatagaagaaaatcaccatcataaaaacaaaagcgatgacagaattaaagagatgaaagaaagaaatcgagatttattattcggttataattacatcctaacaaatgaagaagcgaacagtattctaaaaaatatcagttcgttctctaaagctctagacttatgtataagaaatcaaacttttggacttggattatcgatttgccttggagatagaaatgacacactgatgcaagtaaaaaatcaaatcacagattatgatagcataataaaaagtataagcaacaagatttttgatgaaaaatggagattctacgatgacaaggaaaccatttacattaacggggagggaatactggatgaaaaaaatatcgaacttttcacctcaattctcgaaaaatctgtttcatttgcagatagattgatttgtgttagaatcatgtcagcagatagtgatgaagaatacaaatataccttaatacagccaaatttagcaaaagtagactttgttaaaataaagaaaaagatttatgaccttgccgcaatttctgatgatttgaataataataataccagttcaataagtattatagtagatacaaacaataagatagaaattagagtccccacaattaatttagaagtctttttatcgaatattaaaaaaatagttttggatgcaaaaagattctgatatctgtattgatacaaaaatagtgatagaatgtgaagaagaaaaagaggtacagactatttttaaaaccctagatccagataataaagaattcccagagggtctaaaaatggaagtacaaacaaacaggacacagtttttgttcaacgttggattcaggtataataatggaaggaaaaataatattaacacacttataaacacaattgaggagatcatggaacatattacaattatcaaagatgtgactaaaattgattgatccaaagatcattaaagaaaatcatgaatcagtgaaagaaatgctagttaacagaaatatggattttcccctagacttactttttaacgcagacaaacaaagacgggatctgatagttgaattacaacgcgtaaagcatcagaaaaacatactatccatggagatagcaacaagaaagaaaagaaatgaagatgcttctacgaaaatctctgaaatgggtaaaataggtacggaaataaaaagattggaagaagaaagtaaaagaaatgaagaattattctcggaatacattggtagcttaccaaatttctttcatgaaaccgtaccattaggtaaagatgaaaatgataataaaatagcaagagaatacaatggtaggctaaagttattaaaaaaatctactacagaagaagaagaagggactgaaaatccaggtgttagaatcaaggcctatgaatatccttcaggaatttttcaaatgaaaaatcatatagatcttgcaaatggacttggtctaattgatttagaacgagcaggaaaaatttcaggatctcgtttttatattctaaaaaatgaaatggtcaagctaagcatggcattatctaattttgcaattgactatttgataaaagaaggatacacagtagtacaacctcctttcatgattagaagagaagccatggaaggagcagtcatattaagcgattttgaggaaaccatttacaagatagaaaatgaagacttgtatatgataggcacctcagaacatcccttagcatcaatgcacatgaatgaaatactaaatgggaaaaatcttcctatccgttatggtgggattagtacctgttttagaaaggaggcgggtgcacatggtaaagatatgaaaggactttttagggtacatcagtttgataaggtagaacaatttatcttttgtaaacccgaggactcttggaaggaacacgagcgacttttgcaaataactgaaaaattttatgaaactttagagattccttttaggacaataattttgtgctcaggagaccttggaaaagtgtctgcaaagacttatgatatagaagcatggtttcctgctcagaattcctatagagagatatgctcctgttctaattgcactgattatcaagcaaggagtttaaagataaggtatagaaacaatcctaacgatgaaacatctttagttcatacattaaatagtactcttgtagctattcagagaaccctggtcgccatactagagaattaccagacaagtaaggggacaatcatagttcctcaggctttgagaaaatatatgggtgatgtggatgaaataggtaaataatctaaaatatctaacgtgttatttaaaaattcatacatactttcaaaatatacaattaattactttcatctagtggagaaattttaatcgcaagatatattgttttgtgaaataaagcaaacaaaatgtatatatcttagttatcaggctcatattataatgagcttgttaaacgtactgtctcaaacaagtagtatgttccaaaactttggcttacaaatcgggcctcaatatgacccgttgttctacgatgtaatgatatacatatttggaactatgttatttggagtattcttactaggtgcaatttcattttggttgagaagaaaaggtcttggtggtcaatctgctaaagagaaatggactcaagaattagagaaatacttccaaaaagaacagataggattaatgcctgacgaaaaacaccactggtaataaaataaaaaggattaatcctttttatttatataataaatttttaattaatatttgtttcacttgtatcaaattatagttagccaatggggtttatcgcttggtgagatcgagaccatcaataatcttttcaaagactacgaagtcttagaaaatcccttaaatcaaaatgtaggctacgcaagcactttagaaatcgaatttgtaaaaaacaaagagacggaattctttgattgtataccgatcgaaaaatggacagatctggtagaagttattaaaaatattaagaaaagaagagggaaaaaagggttgaaattaagaataacgataacagattattttgaatccggagaagcgattaataccaacaagtacgtcaaaagtagcgatggaacagataataaaagagaaattgagttattattttttaaaagaaccatttttttgctagtacataagattgattcggaatttatcaaaggacttgaaagaatcgagatagcgattgaaaacattacagaattatttaggaaattaacccaatcctcggtttcaaaagatcatcaaaaaaaggatagatatgggtttgacaataccaactattaccatagtctaaacggtgactatgaatggactataggtaatggagaaaattggatccaaatgcagatttttttattcgatgataaaaagagggtttggaaaaacctttagagcgttgttaaaataaattaggaaaataagatagagcgattgctcaacccatagaattaaaaaagaccatctttaggaagataaagtatggggagaaaggatgacactggtagtagtgtcaataaaaatacaaacattttactagattttaagaacaaagaaatcaatattggagaagagttagagtgtgtaatatctattaactatactggaagatttgacagtataagcattaattcccagattgaggattcctcagatgtttttacatacacagagattaatggtaaaaaaattaatcatccctatgcaaggctttcgttaatgaagaaagaacttctagacccgaccaatataagattgaaagctattacaaaacatattcccaaaagtactgaatcagttgtcaaacttagagcaacgctaattcaagagcataaagaaatagcatctgatgttaaattcatcaaaataaaaaaatgaaataaatttatccaaagctaggttctacttctacctgtccagtcatccaaggatgaggttcacaatgatacaagtaatcaccccgttgtgtaaaagtaaattcaaatgtaccatttggaggaatcaatcctatagaagccaaagaatcaaatcgtccattgatagggtcttcatagtcattatcagtcgttactgtatgtgcggtaacatcatcatttgtccaaaccaccttatttgatacccccaaggatgctcttacttccttaggactatagaaatttggatttgaaggtagtgaagatccttcaactatggaaatttctgtaattccagatggattctggatttcctctgatacctcaggttttgcatttattgctggagtataaacgaattgatagtatgctaaactaatagtgactattactacaaaggaaataatactaatcccgccaatttgggactgtttttttactttttccaactagatttaattcctaattacgataataaatatttttttttatgaaactacaaaaatagaaaagggcttggataaatagaaaaataaaagatatgatggtggtaaaaattaggtactattcttggcaggattagtagttgttgatttccccatgttcgaaatagaagtagcagtggatggttcgggtgacttaatcctttggcgtaatttcttatcatcttgatcattcttactagagtgcaatggtgcagcattggtcggtaaatttggattggaatgattagacgatgtatagttagtagcagtagtagtagtatcaacacctcttgcggaattagttgaggatagtgaggactgtggtaaggagttttcttttgttacaggtatttcaggaacagggacaggttttttatcgtctaatgatttatccgatggggtattaaaaatacgatccgatgaatcagatagttcatcaaccctggcagttttagacggtaatgactttgtggaacctgggccaaaagatggaaatacgaatttgcgcttattggtggttacaacttcgacattcgacttggataatcctcgtccatatcgatatagatggaacattcccgaaaatacaagcatcaatattccaattaagaatagcgagtagttcttcattccattcaatacagcgtaataggcagctatgttcaagtaaacttggaatcctattaacactataaagaggatatacaaccatttagcgggaagttgtattggattcttctcggcgggtttttgtttctttgcattagcctccgcatttttcgccagctttatcatcaagtaagtaaagccaaaggacaacgggactagcaagaccattacagtgtataggaatatagggtcaactactaatcgttctaacaaagactttgtccggtctggatcgatataaaatccccaataggtagtaattatgatctgtgctatactagttatacccaacgcagttatgataggcctatccttccaagagaattttttgtacttatctatgaatggcattattaacaaggtgaatataaacaatccaggccaaagtacacctgtggtaaacttatcgaacgcacttcttaggaaaacatacaaccctgtaagataccattctggaacggtgatccccggcggtacattgggatcgaatttgagccccatatcaattggaaaaaccccaccagtcaacattatcgctcccgtaacggccatcaccataggaacatcaaataccaaaaatctaggaaaatgtactaccattaatcccaatagtacaatgggcaagaagaacacatggaaagcataaaatcggagtacaaagtcatgaaacccagatccgaagaacgcgttcatcatgtcgggccccaaaatagggatagaattagttagcgacgccgctatagaaatagctaattcggctctttcgctaaaaataatatcatacccggtaaaagcctcaagaatagttaatacacctaataatattcctgttacccacagcatttcatttcggattttatatctaccactgaaaaactggtaatacatatgcaatattgcaagcataaccatcgcgttagaggcatggtaatgtatatttctcatgtggaatccgtatggtatcgtatcgttaatcttacttacactatcccatgctctatccagtataggttcataccatagcattaggaaagctcctgtgatccctaaaattataaagacaacaaaagtcaacataccaaggaatccaagtgggctaacaaacttggttggtaatgtaaactttagacccatgaaaatagttctatcgaaaccactgtaaatccacttgaatagccttaccaggctattatcttgattatgtaaggaaacgcccatatccaactaccccatttcctgagggagtccaattaggaggcttgacccaaatattgccgtcatcatcaacctctaaatccaaacttggtaaaacattagaaggtggggcttgaagggcggcaggacctgcaaaagcaaccccggtcaaaggatgtacattgtcccgtggcatggacattctccacgtttcctgccgtcctcgggccaatatttccacaagcaccataaatgcaagcaaaccatactatacatcctgaaggcagaagcatcatttttttctcccccaagttctggagggagtcttataaattgccatgttctgaatgcttcttcatttaatacaggatcttctgacatcggataaacgacagcttcagcatgatttattttaaatgtattgacatttgcttgacttccgtcaggcagaaccacctttgatctctcttccgaggtttcttttggattaggcaaaaattttccccaatctacgaaaggagtaaaagtcataactgtgcctgcggctgcaagcaattttaaaaaatctctacgtgaaatctttcctccgtcaacttttggaggttgtcgttgagacattatattcaaaaatgtgaaaagatatcttataaatctttatttaattttttcatacctaacatcttaatttgattcatgattaacttttcaatgattagttttttttaaaaagaaaactactactttacaagagcaagggttaaaattgttaaatcaaatcaatttgtacaaaaaggataaatgtattctagacaattttcaataataaatttcatatttcaagtcagatcgagtcttattctaataattccatttctaacagaaatatttgagacatggagactactattcactggatgtggaacaagtatatcatatttccttttagtatcaataacatgcacgtataatgtatttgtagattcatcaaaatttgcttgaattttagagtcgttcaaagtattccgatcttctattattacatcaataaatttttctcccattatgatttcggggttaatggatttttctaaattatcagtatttatagatgttgatggatcattcttattcaacagattgtttgaaaaagaggtggaggatagagaagaccttcgtcgatagttttgtaaaggacgttgcttttgtataaaaaacacatttgaaaagaacttccatccaaaagctgttcccaaccctatgatgaatccaccgatatgagctagatatgcaaccccgcccgattgaccgattaatgcaaatactagttgcattataaaccaaaatggaatatacgctattgcaggaattctgactgtagtgataaaaaatgcaaatatgatggtatgaatcttggcacgaggaaagaaaattaaataagcgcccaaaacacccgatattgcaccagatgcacctattgcgggtatatttccttcacctgtagttacagcgtaaatactgtgcgcaaaagcagccatgaccccccaaaaaagatacagcatcaaatacttgacatgaccgaaacgatcttctaaattatcaccaaaaacatagagaaagaacatgttacctaaaaggtgcgctatacttccatgcataaacattgagctaaaaagtgatcccaggttttgacctgaaaggatcaattcaggaatggaaccataattggaatataatgtaattactgctgctctgtttgaaaagttagcggtaataatgatttcataaatgaaaatgataatattaatgccaattagaccatagtttacatagggacgtccatgtaatcgaggagtatcatcgtgtattgggaacataattaaatcaaattattattcaaaaaactaaaaaaatattgttttttcatgtaccgaaagggttgaaattaggcatatcgctattcgtttgattatgagcttttctaatatgtcgtcttagtcgatcgtcttcttcgaaaatcatatcacaatatttgcattttttcttattatcatctttctcattttttttattattatcctttgtattttttttagaaaataatttcacaattatttacaaaatgaagatataaattaaagttgcgattaacaacttgccaaaattctgccatactcgactaatgatcggatgaaatttgattactccattactatcatggtcaaggtagattttaccccattcagctttcgtagcttccatgttatagtttctttgactttatccatgctttcaccttctactagagctactatatcatagacaccataaacctgataaacgtgttttactaaatctattttttttaattcattaacaatcgattcctcacttcccaattctgcattcataagcacaaaagcttctggcatataccagagtagtacctataacaaatataaaaatgtgatttagattcgatttattggctcattaacttgttattatactatatttctggacttaattttgattcatcaaataatttagccctgctccattcgtaattaaagaagtcttcgcaccactcatgaaatgaggcatctttgctataaaacatgatattaagatcaggttccccctttagcgtaggaaaggatatgcaagattctttttcattaaatattgtcaccatgtttgttttatccatcattcgacgttccacgatgcctttagatacaagatttttccatccaagtttttttaatagttcatttcttcctttgggaatcacgacatcagccgggaagatataacagaatttgacattattatttactctttcagcaatagtttctattagatcgattggaacttgagagatgacttccttgatatagtcttgagagttatgatagactgccttccaacgttgaagaacagccattacacccacgaccacctcacaattattcagagaaccaattctttgaatgaattttaatggtaagttactaagtgtatgttcctggaaatagtctttgtgtttaaatggaaagttaaagtttggaataagagaaacaataatctccccgtacggagttaataataattcgccttctcctgttttttttacgagttttgaatcaattaatctgtttatattacgatgtgattcctgcattgtggcattcaaatctgttgccaattgtgataagcgataggattttattgataatttcataagcatatatattcgcaggtcccctgcaagttcaaagaaaactgattgaaagtcatcgtcggcctggctgagcatacgttaaattgagagaactgggatttaaacttgataatttatttgaaataaacctacagggatagaaaacaaaacgttttaattggttttggtaatgataaaatttgaagtgcccgggtagtatagaaatgcattattagcattgtaaaatccggtccagtatgggggactgtcactcccttgacccgggttcgaatcccggcccgggcgcttatatggttttcgtcttctcttctagagtcatcctcattattagtagtaaggttcttaataataggacgtttgtgataagtcatcttaatttaataattttcttggcattgtaaagaaaaaatcttgaattcaagtgccatcaatcgtcaagtaatatataacaatagtatctaaaagtaggacacttgaggaacttttgttaacggtatcacatgttttttattacttattaaattaataattttgtagataatagttaaaaaatactgaacatccgcagataaggtatttacaaataacagaatattgaccaaaataattgtagttaattctttcagttattggatatgattttaggacggaatagaaggattctttttgtttttcttgacatcccagccatacattgatacagcccatccaacaataactaacataacagatacgacttctgcatccaccatcggatttcggaattctgtaacattgggaggagattgtatattatattccgtatttggaattgcctctctaattacgatagggccggtaattgatattcctataactccaatcactaccatgattaaaccagctaccaatattggtttataactgaccatgcaaagaactacattttttcctatataaatataactcgttttcaatggaattaggtaagtagtttggcaggaccatcggcagcactgaatatttaactaacaatgatccatcaacaagaatatcgaaactatgagattcgttagttaattgctctttgtctctatcaacaatctaataactatattttgattatattaataaggtggactggattacttcatgtctaacctatactttgttcaaaataccattctgattggaatatcaatagcttgtatgatgatatcttttaaaataccttacataggaggcagggtcagttggtaaaaaagtatcaagttttgaatcaaagcagtcaaattctatcctaccgagtcataaaatcactaaatgcaatgcattaaacttcttcaaaatctggtttatttaccaattcaagaaccgtcactattatcctttaatgtaaaggaaatacaaaaaagcccatagttattctattacggcattttcccatttttgttaacatgtaatcgttatatatagatggcaacgtcaaaatcgtaaaaaatactacggcatcagaaattgttaaccatcaaattaacgtataagatgaattttttttggtattataattttgcttttaagattatgttaactcaatgcttaatttatctggatgtgtaaataggtgatacattttccaatacatttttagtttggtttttcttaaggaacacacttatcaactattttcaaagtttatttattgtccttacgatattatatcgatggatagaaatgatgagaaaaatgaagaatcagcggatagtgataaattaaaaaaagatatgctcaaacctataacgaaggcaaaatctgaactagacgaggaacttaaagagttagaggttgaaaattcgggtggaggaaaagatggtggaggaggttaggaaaatcgatctatttttcattcatgtgaactcatcctccaataattatcgtggtgtaaactgctcgtagtcagcttgaatactaattcttaaatcctttttaaacttgtaaacctaataaccgatagtaatacatgtttattaattaagatgataattacggttcatacttgattttccatcatatgagaacaaaatcgttatcctaaaaagtggttgatcgtcaactttatagatcatatctaaatcctattttatgaacaattctgtaaactagaacaacaatatgaattgattagtttttgatttgtttgtgtgtttgtttgttcacaagatcaattgccaactcatttaatttggataacttaaatggtttaatcaataatttaatgtttttagcgacaaattttttctcattattaaaggcttgtttaactgaatcatacgctgaaatgattagaatagatgcgaatggatattttccaaaaatctcatttgcggcttcaagtccgtttttgccatccggaagtttgtaatccaaaataacaagatctggcttaaactcttcgtagtcgtccatcacatttgaagctgtggtatttgaaacagaaatatgatatcccttgtttattagaaaatctttataaagatttaataaatcctgctcatcctcaatgatcataatctttatcacttctgtaaaatatcaactgcaacatacattaataaatcatcatgttttacttttttgagatttatcctgactgcaggtttgttctatatagttaaaatccaaaccaaacgatttacttattttattaaacccaagccttaaattgtcataattctgttatgaactaataaaatcaaatgtttacccataattttttaataacacactacttagaataactcataaaattatgaatacatcatcaactattgaatataaaaggcatccttccaaaaatgcggaaccagaaagcacctagaaggtattttagtaattttttacaatttctttttattttgaatatttggaagcgtcttcctcagatacgttaaaacgtaaattatgtccatcgaaattagaaactgatattttaggtatcataaatctagttttgtcaaccatacctctttctgtaataacatagtcttcactaatttcttggacctctcctaaatcataatcattaattcctcttgcttcctttttaattacatctgaccagttaatattaagattatctgacataaagtatcatataaaacaagttttaaatagatcatagagctggtttaacatttttctatttgttcataaaaagattaatcgattgtagattgatacacacagtgtatcatacgccactaggccaaatttactaaaaataggttcatttcatgatagaaacactcttaataatgtcaaattttctgatctattttttgaatatcggaaaaaagattattaaatgacaattattttccttttagaattccatgtattgatgaatttcaatgaatttttattatactttttatttcattatcaaatctaccttcaacttcgtcagaattttcttcacttcttgatccaataaaatgttgatttattattcttcttcagaatactactgaaggaaagaaaggttttcaaaaactagtcgatagacgatttcgatgattactcactattgcttctcatataattccgaagagtaatttcagcaataatgcggatatgataaaattttacaataatctgattcaccttccatagcaaaattctactggtgcaagaatcttaattattagatttaccattgccaaaaattgaccttgtcccaccctctggaaggtaatttggactcataggcacggagtcgatattcagcaataaatataataactatcagcttcaataatagtttggttgaatacagaaaaagaaagcgatgttcctacacctactgccgtggaatatgttcttttagaggaggttacaaatgaattatgggaagtagactatgaaaacgggattgcactaaatgttacagaaataataaaaccagaactggcaggaaatatgataaggttttcgggcaagattgaagattttctttcaaatgaaagaggccttaagaaactccactttcatgaatccgtcaactttcctatgcgggtccattttgaaactttacaataatcaatgattgcttaaattattgcattgcattaataattatatagtgtataagatatttgaattaaaggtcattaccttgacaactcatttaaagatatttataggactagaaaaagaattcttgaaaattatcatattgtaaaaaaataaaacagattattgtccgaatggggcttgtaattccgctccaccatatgtacctgctgcattaggatcgacatcatcaactggttcttcagttattataaactcggtataggtatagggattcaccatattatctgaaactttcaagctatttccatctagtgccccaagacttaatttatagttggatccatctgcgtcaaccaaccatgcttcaaatactttgtcttgttttggtacagcagtcatgtttattgatgtatcaagtgtcttattgttagcttcaatagagagtgtccctatcttttctgtaccaaatccaggccctggatctttcgctttatttatatccatagttacgggttcagcatttattgagttataactaattgtcatagaaagaatagtggccactactagtccaaatagagaaatcttaggtttagacattacaataataataactaatacaaagtataaatagttcacacatagagggactcacctatgtatacccaaagaagataaaaaggattccttacattaaaatccatttaaatagtaaataacgttaccctactaagtacctaaaaacgattatggtaagaatagatataatatgctggtggaaggtgtctaaatatcttttaccgtttcctacggattttcttcattgtattcagttaagacccctattaggatctttattttttcctatggatttagcgctagtagccttattttatcccctgttttatcagttttctttgacattatcttttatgttgagagtttcttccgacatcacatatactgttttacaatatttttatctatatataaaacggttgcttagtcatacttagacgaaaactacagaaatatttattgtggtaaacttagctttatttttacagagtaatcagtagtattaatttcagcatctatccccaaagtctgtttgagtaatgatttgaaaaatcctgacaggaacttggaaccctttccttccaatctatgtctaattacaataattttgtgctgatctatattcaattcatcataagttcccatgtacccatatgtacatactattttttcaatatattccaagacaccattaggcgtgatatcctttttccagaagagtatagtatcattaggaatgtcttttcccatttcaagaccaaagttataagcattatcatcattcaaacgacataataaagatctgaaaacttcacgatttacaataagcatgtctaattttgattgaaatctcgtaaattcagcatattgtttaaggacagagttaatcatagcgtttacagaaatacccattcgctccgcctctgaattaagaatttcagaaagggctttatcaatacgaaaggacctgacggttgacgatgagatacccatgataatatatacttctcataacttaaaagtgtaactatttgtaaccaattgtaaccgaatggagacaaaagggttattgtatacatagccgccttatatcttgcgatatatcatcattcgatgtataataatttaatagttcgaaacattgaacagttttccaccgtacaccaacacgctattatatacgactatgagaaaggtgaaaagctatgtaaatcatgtggcatgattgtccaagacaagatatatgatgccgaattagatactgatttttataggggtagaagcaatagtaacaccgttttgcctcattctattattcttaatgataaaggaatgtcaacagcaattgcagattatgacacctctacctccagaagattttcaaataggaaagaacataacaagatagagttcctaaataaaatcgttagttgctcaaaccaaaagagaaatttgaagatagttatagaccttttgaatcgtatcaaagataaactatcattgaactcattctgcatagaagaggcactgtcctactacaagaaggcattagaaaagggattaatcaaaggaaggtcgataaaggaaatgatagtctcttgtgtatatttagtatgtaagaagatcaatattccaagaacattgtcagagattgcacaaatagtagaggctgatgaaatctttgccgccagatgttatcgtctattaatgagagagctgaaaattacccatgtacaattcaaaccagctatttttataaggaagatagcagatgaggcagaaattagtgagagaacggcaagagaatctatagatatgcttttagctatacaaaatgagaatatattttcaggtaagaattccctatcaattgcagcagccattctttacataacatgtagaaaacacaaacaaaaaatatcgcaggcaagaatcgcatcggcagctaatattaacataatgactctaagaaaaagactttcagaggtcagaaatgtaatcgtaaatgcatcatttcttaattagatcttcttattcttcttattgtgatataaccttatttttattctaataattacagcaaatagattcataacagaattttgacttttgatatagttgtttaatctttcccagaccagaaatttactaatccactatagttattatcatcattttttttgtaaatgactagtatgaacactaacaaatgattcgtttaaataatttttaagatattcatattaaagattgacattaaaggaggacgcaattaatttacaccggttgcttaggggaaaaatagagatctctagtagaatatcttcagataatatttttgagaattcaaaagaagagggtagaggaactttaagctcgatttatactccgggcgtagcatatgtttcaacagaaatcaaaatgaataaagaattggcatatgattatacctcaaaatggaacaatatagcaatagtgtgtgatggaacaagagttctaggactcggcgatattggtccagaagcagcattacccgtaatggagggaaaagcagtcttatttaaaactcttggcaatgtaaatgcatttccactttgtatatccataaaagataaagaagaaataattaagtttatcaaagctattgaaccttcatttggtgccataaatatagaggacattgaatctcccaaagtcttagaaatagttgaacgccttcaaaaggaaatgtcaatcccaatttttcatgacgatagacatggtacagcagtcatcactcttgcagctttaataaatgcattacgaatagtaagaaagaactccaataatgttaaagtcgtgatcgcaggtgcagggtctgcaggatatggtatctttaagattctatatagagcaggctttaacgatataacagtaatagataagaaaggagccatttacgaaggaagagataacaacaatagtaacggaaaattaggaggtattaaatcaaccaaacaaaataatcccaaacaggagagtattagcttaaattcctttaagaaagaaatagctttaaacacgaatctaaacaaaatatctggtaatttagaaacagtaatcaaaggagcagatatctttattggaacatctggtattggcaatctcatgaattcacgaatggtgacatcgatgaagagagacccaataatatttgctttaagcaatccaacaccagaaattttgcctaatgaagcaaagagggtaggggccagaattgtagccacgggtagattagattttccaaatcaaatcaataacgcagtagttttcccatcaatatttagagcactattagacttaagaataagaaatcttgatgaagacatattgatttccatatccaaatctatagcagacctagttgatctaaagcatttaaacgaagaattcattattccaaaaataaacgatccgagaatactgccggtagtaacaaaatctttaaaggaatatattttgaaccaaaatcttagttgattttaatatattccaaaagcaggattaatatatacgatccgaacagaggtttcagaatcaatagaagtatgatatatccagaaatatattacaacaataatcgttgttgaggcaatggttagcactagtcgtagtaattagcactatgttaatatttaggtaatagtacaaaagaatatggtcttcataagagtgaaaaaggtaaaaggctttgattactattatctagttaaaagccaatgggattcaaaaagaaaaatatctatacagcatactataaaatatttgggaaaagcttctgatataacaattgacagtatccctttagaatacaaaaataatccaagaatcctatccctattagcatcagttactcaagaacatgaaaaaaaggtggttgtaacagcagaattgaaaaaaaaagtttttgacgcattaaaggatggtgaaatcgaaaagatagcgaatgttgcaggaaaattcaaggaacaggcaagcttggctgatttttatgacgaaattcttaaacctgtactgtatgatgttgggcttctctggcaagaaaggaaattagacattggaatggaacatgtctgcagcaatatggcaaacaagacaattcacaaaatcacaagttcaatcaagcctagtgacagaatggagagcattataatatgtactcctgatggagagcttcataatatagcatgtaatatcatcgagtccgtactatgtgaaaaagggtttcacgttaataacgtatcaccatcaattcccactgattcattgattaactatataggggaaaccaaaccatctatgatacttatttcagttactcttcgagataacataagttccgcaataaggctcataaaaaagatcagtacaatataccctattcctattttaattggaggaatagccataaattattgcagcgatactgaaagaaaaaatattgaatctgctagttctaacattcgaataattgcaaactccccattaagtgctatcgtaaagactattaaaggcgtatccaaggataatggtacaagaaatagcaagaattttgaacaagagttgatagtttaattaaaaaatcccatcaccaagacatacgatggacaatcgaaagaaaggcaagtcaaatgactccaaaattatctaataaacatttctttaatcagggatcaatgaatatgttatcaaatttataattcatcaaaagttcttaattatataatgaattggtatagtaatgtatggacatgtcggtgctttttcctagtaatcgcaattaatatttaacaactataaacaaataaaatattagaaattgtcaccaaaatttttcatattggagtctaccctgtcttgaggattattagtccctgtaagtttatgttcactcttatgaactctagcgtccatttctttttcatgttcttcacgtacatgatgcaatctatccttttcgtgaatgaattccttcccacatttatgacattttaagatcaacttatgatgaactgttctataatgattgatcaaatcctcctcagaggagaacttttctccatcaacttcgcaagaatattttttatgaaagaaatccacacaactactaggcattagatattattaaattcttttattacgtaatttgtattagcataaccacaataaggaaaaactattatccgtgatattttaatctcagaaattgaatcgttttaataataatagatttgacaaattcataaaaaagagttttaagagtatttgcggaaagtaaaacaagaatcctatcagaataagaatttacaatattttagatattactagaaaggataaaggatcagcttatcagattcattatccaatcatacacaggaatactagcaacagctatgaaagacatccttgagtttacagaaagattagtatttaattccttaccagaagtatcgaaaattaaccctcctgcttctttagctataaggtaacaagcggccatatctattgcccgtatcttgtctcggatatcgatgtaggcatttatagaaccacgtgcgaaatagcacaattctaatgcatttgcaccgaggtgtctaacgtgactaattgacgaaatcaattttgaaatagatataaaatggcgttccgataatccagaaatatttaagccaattaccatttcctttatagaaagagatggatcatttgaagtttttatttttttttcattcataaatgagcctttggacagggacgcataatataaatcctcagaaactagattaaataccacagcatcagtaacggactttaaattggtatctggagaataagcaagcgaacaacagtaaaatggtaaaccgcaatttgcattggttgtaccatcaactccatccataacaactagtccagtatctttgccctctatgaaaccgcattcctctcccacaacattaggattaaaagaattcttctttaaaacttcaaaaacagatttttcggcaagtaggtcaattttagtagacacatcaccacctgcaccaattccaaacttttcttgtccctcaacggttcctatcaaatcatgagtatttctataaacattaattgcacattcttttaatatatctaagatcggcatattgaatcacattaatcttattttaacaagcaaataaaaactatgaaatcaagatttagagtattcaacggatctaaaagttatatacaagaatataagttcaatcaaagtatgttttatatagtatttaatctcataaatgtaaaaaatattcttaccatcaataactaacatactatgcatctaatgagaataaaatagtaaatttcagctttcctgggaaatcatgatgcaagaatgttaaaagatgtatattcgacggccaagcgtcaagttcagtagtcatgtctgaaaactatacggattagaacctaataataaataataaaaactccaatctcttagatactgtataaatgtccagagagctgaataaattacaaaatgattccactacaaagacgacaaatgaggagcttttaggcgtcgtcatcggcgtaactaaaccaggatacattacttttgaaggtaaggagcctgttggattaggtgaatacatcacaataaccgatagttttcaaaagaggattctaggtgtggtggaatcatgtttcattaagagcgatgcactagatgaaatttccaactttgaagaagctctagagagcaagatagtagctgaaataaacaaaagagataagagctttaaagttaatgtaaaaattctcggtatgctagatttattaaaaaaatcaaaagccatcttacctgagataccaccattaccgggaaccgaagtacgtagggcaaaaaaggacgatttaaaggatatttttgattccgaggaagaatcatggctaaagataggtactcttttaagaaatacaaatgtgaatgtcagagtcaatataaatagacttacaactaggcacctaggaattttggcaatgacaggtatgggaaaaagtaatctagtcagtgttatcgcaaaatcgatagctaatattcccggcacgatggtgatctttgactatcacgacgaatatcgctttctgcagggagagaacattaattttgttcaggctcagataaacccaagattattaacatctgataagtttggagaagtcatagaaataagagaaaacgcagacattcaaaacacaatattactaaaggcctacgataatgacgatctgaagaagaagataggtgatgacttttgggaggaattagagaaaaatgtgagagatataggttttagggaaaagagatttgctagttctgcagacagagtattagacaagatcaaagaagcaaggagaagatttgatagtattttgattccaaatgcatcagatcctgtttctcaaatcagagaaggttgtataaatataataaatctgatagaatttacagagaaacaagctaatgtagcgatatcgttttacctcgaatcaatcttatatcaaaggaagctctcaaagagccagagctttaaatcaaattttgaaaacactgaccaaatattatttcatagtcccgtcattgtggtaattgaagaagcccatgtattcatgccaaaaaatgagaatactgatacaaagtatattgcctccaaggtcgcaagagagggaagaaaatttggagtaggattaataattgtatcccaacgaccacgaactttggatccaaatgtactaagtcaaatgggttccctggcaataatgaaattggttcaacaagaagatcaatcacaaattgaatcctctagcgaatcaataaacggtaagattattgaacaattaccatctcttaaccccggagaagcgttgttggtagggcaatgggtaaatttaccttcgtttgtaagaatagacgaaatagtagaaagaacaatgggtaaggatccagaaccagtaaacgaatggaaaaacatcaaagtcaaaaaagaaatgtcaattgaggacagtcggatgtatataagagaggattacatagaagaagaatacatagaataagatgataaagagttaaatacataaatttgtaaagttctttcccctatctataataatgaacattgccatgattaccaaaactaggaaaaggataattttaaaactgtatgatgaaaatctaaaaaatctgactaacgagatttttgaggatgtatatacattgaatttctttttacaaaccataccgaaaacttttgaccaagttaagactcttctgatttttaatgatttggaaaaaacaaacatcattttagaccgatccgataaagaggctgatttagaagattatgatcacaatataaagcttatactggccaaggatgagaattcctattatatagaagaatagacatttttttctcgacaaaggataaagaaaaaaatgacaatgccaaagttgactacttctatgtttcaggattattaaatctaaaacattttctagctatagaaaccttgcttatagagtgacatatcgggcattcagcccagttttttccaccagagtatcgccaataataattgcacttttggtatgtacactgaatccaaaatgtcttttttggacccttcaaccagttttcttgcaatggtttacgagttcttcgtgcctctctaggcaaacgagataatttcatggtgattacgacatttactatatttgttcatgatctattaatcttttcgatacatgcacttactgaacgcccattttgcggatataaaggaagtatataaaagcccagcaaatttttagacaatacttacactggaacccttctcagtcatcttaaatttatacacttgttcaacctcagaattttcaaatatctcttcatcatgggtaataattatcatttgggacaacggactcatccctttgctaaaggcatcagaaataatttttacaaatgatcgacgtctttcctcatccaaattggtcgtaggctcatctaatactataaaatcaatttttgatgatcccatcaagaatgcaattcccatcctaatagccaatgatacagcgaccttctcgcctccgctcaatgatatagtgtcaatttctcctcgcttcccatagcaaagcaccttaatttctctcggtttttcaactaatgtaattcttgacaatccaacgttgaaaatattgatgtattctgaggctttagtagaaatcaaggttagtgcccgtgttcttaaacttgaactcacaacaccatctctgttaaaaaccatcgagcgaatattttcaagatcggaaataaatttggaggcagacgataactctgaaatcaaagagcgaaattctgaattttctctttgaatgtctacgactgttttttccaatatagctttttgattgtgaatattaaccatttctgataaaagattgtttttggctaattttttctgttgataagagtctaaatcaatctcgagaacttcatttctcatattttgaataatatcgatcaagtttgaagaataatcatctaatctgtatttggataagtcgatattcactaaagtatcacttttgagttttgatatatcttggtaatcttttttcagattctctagtttatgctctaagatatcggtactgtcaccgatatcaaaatcataatttaatagagtccgctctgcagatattatatttttctccttccttttaagttcgatctcctccttgtttagttttgaaatttcagagagaagaatttgtttctctttgatcttcttattgagttcgaaagtgatatgagaaatatcaaacatttgattgagtgaaatgatttcagagttgcaaactggacacttgccatctttaatttggattttttgtgcacattcggtaaatccttccagcttacctatctccccctctactttgataattttattgtttagctcatctaattcagcattgaccatctgaatagtgataaagacttcatctttgtctcgtaaaaagataacagcattttttaagtccgcaatcattctttgtaatttatcaatttcggttttcaatgaatttgatcgttctataaaatattttaacaaagtattttctaaggatctaagttcagaaagtttagctatttttggttcaaggatttcaatttgtttttctaattcattaaatgtttctgttttttgggataaatgcacaatgactgtacctaatgtttgttttgattgcgaaagtctagattcattatctgtagttttcttaatgagaatatttatttgattatcgtcataaccctgtgttttttcccttagtatttttctaaattcttctatgacaatatgcatattactaaaagatttatctaatctatctaatccaatcatgttatttagtaattctttaaattccttgggctgggaatctattattttactaatttcaccttgctgaatgatacctgctatttgtaatttagtgtagttaatccccataatagactccgtttcacgaattactgattcaccaagttgctttcgttcaccagaaatgattggtcggtagactgatttgtcattttgatccgttccagatccattggtgctactgttatttttgaatatctgttctaatttagccgaagtcagtcgtccttgactatctatttgtcttctgatccgataatttgtaggtcctatagagaactctaaaattacaaatgatcctgtttcattattaacatatccacccatccctcttgttaacaaatttttatcggatttacgggtgtgctcatcgaatagtgcaaaagttatagaatcaataatactggatttaccagaaccattatgtcctacgaaaacagtaattccaggatgaaaatccagcgaagtatcagtgtgtgataaaaagttattcaaaattatcctctttatcatttcgaatcacctttcccgtttatttttgaattatccaaattttgataacctgatttattattttcaaaaaacttccaaagataatttgcaatttgattatttttatctctatcaatattcttgttatcgtgggagttatcgtcaccatgaaacatattgattaggtccaatgaaagatgactcaagggttcagaacggagagattttaaaatcaatgaagacagttctttatccatatcaaactctctggcattatcataagaaaagccaccagtgggatcttcacctagaatattccaattataatatagaaatgaagtatctaattgtaataattgtctagacagtattttaggatctatatcggcaccacttattttcaaattaataacaggtttctttgaatattgagcagattcttgtatgatatttcttaatttaccagccaaatctggatattctatttgatattcaaactgatgtcgtctcttttctagctttatccaatgagtattgatgtttgtagaagcttctgaaagatccactatgagaaatcccttctctacgtttgaaattgcttcattatgtcctagatcaactgaacccggatatgctaccaagccttcgtttaaagtaggaaatctcttttcaatatggtcatgatagtgacccatagcatagtaatcaaatccgattggcaaatcagtagaaaaaatttcacctgcaaatttattaaaatcatatagaccttgatgaagaacaagtatcttttttaacgaatgattttgaatattttgtttttgaacatcatttttcaggatagactctaattttctaaatggtctgatcataccgttatcaatattagaacgacgttccttattgaatccatagattaatatattttcaatttggaccggagaatcaggtttgagcctttttgccaatcccaaattgtgaaatagatacggcagaggtacatcattagatctacttatatcgtgctcacctaatacaaaaaatacaggtactgatttttcttttagtttttttaattccctggcgagtttaataatggctgcaccatttggtttaggattatgaaatatatctccagctaaaattatagcttttacatgctcgttaatggatttttcaatggcttctccaaaaacttcgtataaatcctcttctcgctcctggagattgaactgagcatagcccaaatggatatctgaaatatgagatacaagcaattctaattcacataatcaatgccatattttacttattaattgatattatcatgaaaagctgcattttagccgccacctgtcgcaccgcctaatgtcccccattgaacttcttgataattgtcaattaactcatttaataaatcattaatatccttatcttgttgttttgaggaaatatactcgcttagcaatgattgaagccttttataagtaatgtcatcaatttgcagatttctcatttctactcagactatcttgaggattaattatagatatagatttgcacgtacattcaaagaaagatttaacagtgatatgaattaccttataaattataaagaatgtcgattaataattctacagaaattttctctaacacagtgggtagaaagtttctcttaaatatactaagatttgataacggttattttatttcaatatcagagaatgaatcaaagcttggatctatttcggtgtcgttaagtgtgacaaacaaatcaaatactgccagagtaatccaagacaagaatgatcagttattcatagacactctttctactaggatctccctgatgaaaaatggtatctgcataatatcaatgttcacaaaaaataaattacatttagatgacatgaaaataattaatgaaaagatcctttcagatatagaggagaaataaatggtaaaaatagaaaacaacagggatcacacaagaatttttaaaaagagccataggaaatctgatttaaagtccaagcaaaagattggtgaaaatagtactagaaaggagaattcagaaattaatcaagattatgatttaagaagctttttatcaaatctagagagaagaggcgaattaataactatacataaaaaagtaaaaaagaagtttgaacttgcagcaataataagtaaatttgataagaaagaggcggtaatgtttacaaacattgacgaatctaaattcaaagttgtttcaaacatcttgggtactagggaacgttttttttatggaatcgaatcgtcatctccaaatagtaacgtcgatttgtctaacttaggaagtataggatcagactattatccaaaagaattttctaatggcgcaccattttataataataatactaaaaatctttatgatcttccaatcataagtcattttgaaaaagatgcaggtccatttataacttcctctacagtgtacgtaaaggaccaggagaatggaaatcaaaattcttcggttcataggatgttactacttaataacagtcaaatggtaataagaatggtagagggtaggcatcttcataaatgcttcgtttatgccaaagagcataaagaagatttgaaaattaatatagtagtcggaatgcatccggccctgaatattgcagcagcatatcaagcatcatatggaatcgatgaaattacaattgcgaattatctcttaaatggtaacttaaagctagcaaagaataattattctgatttaatgataccaaaacacagcgaaatagtaatagaaggtaaaatacttcatgacgatgtagccgaagaatggatggtcgagatgctaaggacatatgactttaaacgaaagcagccagtatttgaaattaataaaatttggtatagagataatcccatatattatgatattttgcccggatacacggaacataggttattaatgggattgccgatcgaagccaaaatttttagttacgtcaagaataccgttccttctactacgatggtacatttgtccgatggaggaagtagctggttaactgcagtggtacaaatcaagaagagactagagggtgagccaaaaaatgcaatcctaacggcatttgcagcacatccatctcttaaaacagcaattatcgttgacgaagatattaatcccttgaatcctgtagaagtagaatatgccgtttctactagaacccaggccgataaagattttttaataataacaaatgcaaagggttctagtctagatccctctagtgatcaaaccaatctattaaccacgaaattagggatagatgctacaatttctctcctcaaggataaagaaagatttgagattgcaaaaatacctggttcagataatatcgatatcaaaaagtacgtctaaaaggaaaaagatagcaaaagtaaatcatcaagttctaaagatgtgtgttagtagacaggattctttggacaggaactaagtcaaaaagattagaaatactctagaatagtcagaataaataaaaaaataagaagcaactataaaggataaaaagattttaaaaaattgacatcataagaacagagagaaggacaccgtacagtaaatgcccaatcatgcttgtgatggctggaccaagtcctaagggatgtttaaatggatctatcccagttattggcttgtgaatcggtagcagtgtaagaacccataaaactaagccataaagaatacctacgaaaaataccatagtacttaaaaagggaactaaattcaataataaataaaaaccaatcccccccaatccaccatttacaaaatgaagaaaaaaaataccaggaaaattaatctgcgttctatcagttttaaaaaatttgctatacaacacctgattttcatgccattcaagtactccctctagaccccactttctccaaaagggaaattcgaataaagacatcatcagtgtagaaaataatcctcccaatatacttaaaaacacagaataataatccaccatgcaattatacccgggttttatgcaatataacatattatattgattacaaattaattagctttagatagaaaataaaatagacatgcaagcaccgttcattgttattttggataagtatgtaccatctaaacaatatatttgaaaattgcaatggcaaatttggaccacgagatagttttttttgaaaagttttgttataaaatgcagagctgcggatagaaacatacacccatataataataatctagcaaaaaacaaaccggagaaatgtattatctcattaaagtcaactgtatcaatagtaagtacacgctttgtttgataacgagtctttggatatatcaataatcacagtatttacaacagaaatactcagaatcagaattttaatactcttatagtcttttaaaaacaatcaattgtagtgtcttgtggacatcctacagactagacgagtaaataaaataaataacttgcttccaaatcaagttttgacaataattaaatatcaacataaactaaagtcaaaaccaatagtagaagtaaaaaatagtgcgtcgtaattgaaaaaatattggagtaatatagaagaataaatactaggaaattaatagtttagtatgaaccgcctgatagtcgaatcctataccaactcaacaataaacacaattttagatgacatatctaaaaagtataaaattgatacatccaaagagcagctggatgaggatatcccaattagtgaaattaaattcaaatataggacatattctgaagtggttaagatgctctacaagagtgcaggcgtagtcaacgcaatttaggttcgaactttcattagttttatatgaccagtagtacaggcttctgagccttcttcgtgttcatgcaaaagcttttttgctttttcttcaggcaatttttctgttgaaatataaccacacttttcacaaataacaatatagctccagccaaccaaatagatttcattgtagttattaaccctcgatatttatctatatatgcagattaacatataaaaacaagaatttgaatctccagtcacatatataatttgaaaaggaaaatgcagctgaaattaattacaaaattgaattactaattgtaggctagtttatttaggcatcctagtgtgtaaaaatatactatgtgggaaattttttgcaatcaagatttcattttttttatgaactctaataatgaatgaatgattcttcttaattgaaactagaagatggaagtaaaacaacatagagatactaggtgcaatttgagcataaattcgaatcgatagattataaaatcttaaatagatatttgagtctgctatttgtaatgaattacaaagacggttttaatcgatatccctcctccctacttatcgttgtaataattataggaacaggaatagcattggtttttcaaaattcaatggtaattgaagcaggtgcaacaactttaacacaagataattcaaacacgacttcttcttcagctactatggccactacatctactttgaatggtacatactatcatgattctgatcgtgaaattaatacactaacttcagcatttggattaccattttatgaactaacggattcgaaagatactggtaatgaggtattaagtatcgatccagaacaaaccaagaactcctacatagctcagggcaatatgaataaaataggtaatgttactgaatatggtacatatatatcaacttattcatcgcctgaagttagcagcactggtaaaggaatgatagttcaaaatgataatgtagcaacatttactgctgaagataccggaaaatatgataatgcaggtaatctgctattgaaaggaactatgttcttccaatcggatgataagaagatggaaagtattgatggaaaggtaggactttatctttactggaaggatagtaacggtactgactggacaaaaacatggttgtggaaatagccaaaactactaacaagttatttggaatgtaaataaataggatatgattggttaaggtgaaccaataaatttttacttctagttcataaagcagtcgatttcttttacaatatcttcatttagtaggccagtgatctaaatatttaagaaacaatctagcaaacctaatattcaaagaaaggaataatcagtatttagaattgctcttaatttcttcataacatcagtagatttgataaagtaatcacatgttgagcacgaagcaataaatataaacttctaataatttgatctattcaatgatttcgaattattataatatgattatgtaactaaggcctaatattataatattctatctaattcttaatgaacaaaatactaacatatacattcttaatattagtaataggaacctcatattcgatcacaaacggattgatgaatcaaaaagcatttgcagatttatgtgtcggaataattgcatgctcagcgattgcaggcaatggtggcgatggaggtgaagcgattgctggagatgttggcgatggtggatcgtgttatgctataactatagggaatcactgtggtggtagcacaggcagtaatgagccacgtggtggtgctggtggtgctggtggagatgcggtgataggtgatagtcaccatgagggcggcagcagctctgcagatgaaactacgaccattaccaatcctaattcaaattaagtgtctaatggtaatgagaaaatagaacaattttttctatttttttctttgaccttaaggaacacttggattctatgttattatttgattatgacatcgaaaaaaaaataaaatggcatatttgttcttaagaaatttgagtgaggaaccatttatctaattaagatacgggcataattcactttagatattcatagtgacagataggatcctaggtgcaactaatattctaaaagactagaataatcaattatatttaatgcaaaatattgcaatttattcacttattgcgatcgacttaaaagaagttagagggcaaaaaaaggaatatcattttcatacaagtaataaagtatgaaaggcacctaccctttgaaataaatagcgaataaatatgataaagtaaagcgattcatcatattcaagacgatgggaaaaatttggctgaatgacaaaggattactaaagtattactaaaataatcatagaaaaaaagtaggttgatcatctttttgcgataagaaagatagttaactatttgaggcaagtggtaaatatcataacttttgaattgaaaatatgggtaaattaattactggaattatttcagtatttatagtagtaggtatattgggtgtttatatccctaacgctttggcaacattgggcacaccattagaaatttgtaatggaaatagcgcagtagcccaagatggaggtagtgcggcagaacaagaaactaatcaagaactaataggagatacaggcgctcaatctgtttcaccagaattcaatgctttgaatgggaataaccttggttttgaatcacaaaaaaatggcgattgtttaccaattatagaacaaccacctgttggtgattcaacggcaccaaatcctcgaaattagacaaatagtgtaaaagacaaatccaccggttcaacaaaaaaatctgaacctctttttttgatatcagatcataaaaacaattctaaaaaataatttttgacatttacaactgaccaacaatgatgtaggtcgattaaaggtctcaattaatgtaagacgacatcttttaaattgtacgaacagcgtattcatacaatgatcagtattggaaaaaagatatttgatgaagtagatgttccaaccaatagtagaataatttctgaggatgaagataaattaataattaagagagaaagtagttggacagacaagattaaaggaatagattcgtttccaaatggtacggtagaaggtcatggaaattcaggtatttttgcaaatggtatctctatttctaattggcagggtattttttgactatcgaaatggacaggaaattttatttattggaaaggatactagtaagaatggcaaatattatgtaataataactattttactcactataatgagttgagtgatcttaacggcatgatctgttttttagatggtctatttgattctaaaaataaatcatatacttctagcggatatagattaatctagcatataactgaaagtagtttcgtccctctgactgtagctgctattttttattgtaaacgaaaatcaagataagtaataaggtaaagaggtatttgactatcgtgtatgtaaatttgtagataatataatatatttttttaccattttcatgacttgcatcatctttggtaccagagattaaaaaacgatcgacaggttggcaattatatgccgatctagatcagctcaaaacgtaaaactaggacaattacatccatcaactttgcagaagggaggcgcattccccatgcccatagcaacatgaactgatttcggatggttacatgctttgcaagttacaaaatcttcaggtctactaatgctcatatatatgattagtcattattttataaaaagcataactatttcaggcatagtctaccttgaatgtatttctcagaaattataaaattgttcccgtaagtatcaatgacacaggtttatactaatgggaccagaccccaccagtttactttcgatcaaatagtaggtagagcagaacatctaagattcatatataatttagcttttgttgaacattagatatatttattatctccttgtaccttcataagaaaagcagaatgatttttgtaaagcaattcagatcagttgcaataagacaaagatatttccatttatataacatagtaaggagaggccattttgtatgagtaatgagaagtcacccacttggttacgggcggtccaaataggtctaggtattataatattaatcctatcaatcttggtactgatcaatcctatttttggtacgatatcggtcatcattttcctggccttcctgttgttatttgctggaattgagaaggtgataagtggtttaatcagatcagggaggtcccggtttgctaacataggtttaggcattatagtaataattatttcattgatcgctttggcataccctgtcgaggcaagcgtatttgtggtcctattgctaggtatcgcattacttgttgatggtatatctagaatcatccatggaattagagataagcacggtaagagctggtcaaaattctttagtatcggcgtaggaatactttctataatattcgcaatagctgtgatcgttttccctgaaattggtcttgtagttgcaggcatattaataggaatagcattgcttattactagcttccaaatcatatcggaaggaatatcaggacatcgcggggtaagacaaaacgacgtaggtatatagtcgaaagaaactaattccttctacatacaaaatttagacaaacataaccatacatatgaaaaagcttggagcctatgtcaaaatgatgtccgtccgtccggcagcatagatagaataatgtagaggcagtcaaattgagcgacataaataatgatttatcagtatataaaaataaaaaaaaagaattagatctctaaactatttctgatctaattattatacggaggaagtggatactgggtgttgactatcaaaaaagagagcagaagaagaagacaaacattccctctcagttgcagtactttctactgcatttactatttgaattgtagaagaaacatcgattactcccggagttactgccactattgaaaacaatgtcacaactgccaacaggccaacccccaaaaattttggacgattcattatataaataacaacattgccaatatttaaaattgatggcaacccataaggtatctgttttcctataaaaggtataaatatcttattaaaatgaaattttacgtttatctgtgtatattcatgtacattgttattagttcaaaattgatatcaaaatatttctgccttaataattggagctaaaagtaaacagtttattttaaataatagttaagatggattagcagactaagatagttctcttagaaagtctcttaaatcaattatatagatatattttccaaaatgcgtggatgaggtaattcatatatttattctatctgatttatagtatgtgaattttgattctattggaacattcttgtgtagataatatccaccacaaattaggatacaagatatatacgaaatctagtgactaatgttaatattttaatttggaaatgaaagaagctagcctaaatggcatggttagaatatcccccttatcaagattgacagcctctaggatattttttggtaaatattccatcggagttgtggtaatcaggattattcgttgagtagggcttataccacgtatcatttttgctagatcaagacaacctaaacctggcaaatgggtatccaaaacgacgacatcatatggttttccattattttccttctctagaaaaatattaagggcttccgcaccatcaacaactgtagcaggttttattcccaaggtttctaaaaacgccttaaataaggatagtatatcaggctcaggctctgcaatcaagattcgcacttgttttagttcgttggatgatgatttatcggtcttactatttgcaattttgtttggtattgtcttataataacgaggaaagttggaatctgcaacagttactgctgaactgcatgtgttttccttaacaccaccaattacaatgtactctttttctacagttttccctcaggctgttcaaagttgtgattctgttggaaagtacattctataaagttcttaaccacttcattcacctaagagataaacaaataattaacatggtttaaatatatcactttaagctagatagtcgtaatttttctaataacaattagctaaggcgaggagatattatggtcgcagtagatgcacatcctccaaaatttttgacatgattaatgattcttagtcatccgccggtatatactaggtagtatcaatttcaaaattgacaaagagaaatgaataaggattttgacaccccctcttgaataacatcagcaaactaaaggggcggacctcagggtaaggaatagctgtatcatataaaacacaaacaaagtttacacaaacctatcggccttgtatcaactaaaagcatattcttatttgcgatagtatcttccagacgactatcattacaaatactttaaatttagatttcatttttattctacatagacaaaaatattcgttttcatttcaagctccaacaagcattataaaattgatcaaatatatcaattgaactaacctaaggatattttcattctagatagaattccatagatggatggagaaataacttcctaataatataaataattatttgaagattactaaattaatctatgtctggggacaaagaattagaaataataaaaagcataatgactcatattcatctaattttaggaaacacacgtgagaaaaatcacacttttgactccatacaagagttgtatgataaaatagatgccagacttgaactctccgatgagaacgaagatgtaagttatcatagaaaggaaatattaaattcatttgccaagaacatggagtggatgaaagttaggaaaataatcatttccgttcatgataagaaaagtgatacttcatatattaaagtagataaagaaaagttagtgaaatacattgtagatcctgagttgcctttaatagaaacaaatgaagataattatggatgaatactctaaaataaaaccaaaagttattacaaactcggtcattattgctatatatggatacaccctgatagttcctgaagaaacggcacagtctcagttttttttacttgttctgcattggtcgacaattcctttcaattctcagtccgacttagattaatcacaaaacgatatcatgatcatttttattcataataagaatctaaaacatcattgactggtcatctaatcgttatgagcttcgacgacaaggtcattctcaattagaagatcaatcaaaaaagaataggatatccataattaagattgtaaagacgctgttgatcgatggtttaaaaacaagactatggttttgttgaaacagttaatcctttataagtacaagattaaaaaactcaaaattttctaataaatagtaaaaacaaaaaaaagatttattgttgacctaatgccaagtcgcctaattgttcttgcaattgtattcctatattattacatgatgcgaatgtgatttcaccagatacacattgtgcattctgttcactatcttgttcttgttcaattccttgctctgcttcgttatgtttacctgttgcaaatgccatgttgtcgccaaatgtaactactgaaccgattaaggctgctgcaataaacatgattgcaaatattccgatcttactagtttttgttatgttactcattataatcataatgtataggtcgaatttattatatcatagtttggatacttgttactactatatttctacataatgcttaagcagtaaaatattctgacatataatttcatgaaaatattaggatgatagcttaactctcgatatcaaatattcattttaccaaaccttgttgacaaggtagcgaaagattttaaagttaagagggccagttgctggcttggacccttaatctggcctaacctatattttagttgtctcaataagctaaagtgtctttgatttctattgatgatgttgtagtaatttgctaaaaatagaattttatttgcgtggtatcttaaaaaggaagcaaagtatgcaaatgtaaaagacgtgagagaagtgctgatctcgactatttccatcattttgaatgtagaagaatttgtaatgattactagagtataaaatactctattgatatcactcagaaaaattgtaatcaaattggtctatggttttctgaatattaagaattacaaagcgaatataatgaacatattgattagttcatcctatcaaatcattctctcaagaaaggtaaaacagtagaaccaatttaggtttcactatcactaatttgaggccgccttatgctacttttataaattatgatcgtaatacaatataatataatggaattaacgaaagtcgagagagagaataaagtgtatgtgaatgataaggcaattgttctggataagaataccatcaccgcatctgaattattggaattagctgggttttcatctcttgcctacaatgtctacatgattttagatagaaagaggaacaagagtaaattgttaggcgaaaataagaaaattaagattgaaacaggaatgcgctttgatgcaattctaaaacagggctagttattggtaatataatagaatagtatactttagtttcagtacttttctaatcaacttttacaatgaaaaaataatataattatttggttgtaatcatatttttgttgctattgttaggagatagcctaatcggatcatattgccatgaatgtacggttccaaggttttaagataatcttgtctgatcgcttctattttttccactttgttctcattctcaagtgtccgaataagttgaatcattgaacccgattttttggtcatctcttgccaataatggtttggactaaggattggatattcaatggtatctctttcaaaaaatatttcctttacgtcgtccaatagttctcgaattttgcttggaattccccactgcataggagacagacgcataggcagaggcatcgtttggttgtcttgtacatgggatgcatactttgagatcattgcatacattcttcccaaagcaagttccggaggccaagtcgcaaatcctatgaccccatctttttttagcaccctttgcatctcgtttgccgtagtcttttgatttaatgcaaacatgtgaccaaaagttgacaagacaatatcaaatgattcatcctcaaagggaaggttttcagcgttaccttctctccagtctatcccactgacttctgcaatatactcctcctcttttgcttgtgctgagttcaggtgtaatgtctatgcctgtcacctttgcgcctaatctgcgtgctgttattgcagtgttaccaaatccacaggctacatccaatacagaatccattggtttcacattcacaagtcttactagtttatcagagacaggagtaattactcggccaatacttctataatcacctaaggaccatctttccctgatgctttgattcgaattattcaatctgaaactatatctcatttttgtttgataaactttaattttgttttcatgatgatatacattaggaaaatctatactacaaattaatgaattaatttcctattgctgtctacaattgtatcatgattatgaaaagccttggaagaaataaattgaatacataacagtatgaaaagcgtaatgcgacccgtttatctctaagtaggactaattttcaatatctgcaatatcatacgcctttgtaagagatggactattcaaaagattccattgatctatgttttgccttgcatttccaataactcaagttatattagcaatccgtgcttgattctttaggatgatgtcaacaaccttgtctcaatttcattcttagtaatctagaggcttaaaaaaaagcaaattcttaattatgacagattaatccttgaatacgagtcagtattttccggtatacaccagtacactagacagaaatttattgagagatccaatatattcatctttattcacatgtttaaactctttcttagtgtttatgattgttttaatgttattgacaccagttgttttatccaacacaaggtttatggttcaaactatgagtattattcaaaagatcaagattgattctcggatttttatcaacaatattcattttatcaatgtaattgtagtttttaggtaccaaggttgtagagatagtatacacaattaattaacaatatttaatggaatatcccctttcatagatattataggcatatcaaagactaacccaaagttgctatgaatgaaaatacttatttacctagggcttggataatccctgatgaacaaaattagtgatttaagcatcttaattgtagcattttctatactaatgatcggcacatcagccgtattcaatatgggtttcattagtccagcacttgccagcaccgacgaatctaacaccgacgaatctaacaccgacgaatctaacacaaatcagacaaataatgaacaaccaacattagaaactgtagacactcatctagaagaatgtattcagcaactacagaacgataacactaatgaagccttagacgaatgtcaatctgctgatgatgagttagacagaatattggttaattccactggataatgattataaagttcgaaatacagcaatttcgttacaactaaatcaatcatcctctagatattttttaatatttttaattatcaatccgaatttacgaccattaagatttataaaatgaatatatgccatccaaatgcgaaactagtaaccggttaggaggttatttggaaaaaaataatatgattatgaaagaatcagcagccttcgttattgaataaatccatatttctcaccacccggatatagaaaacacataggaaagatttgcagaactggagtagtattctaaatcccaacccaagtttagtcttatgaaccagcatcaccaattaatttactgcgtcggaatatcttataagagaatgatttgctatatagtcgttcaatttttttgaatatatcttaccagtaatagaaaaagcttatttcaagacgcagagattatctaactattatgttaataaaaataccatcatgtgtttggctatggacccttggatttacggtggcaatgctattttttcccaatttatctacaaatacattaaatgcaactataaatgcaaatgaaaggacaataaactatattgatggtcaaatccaacaaatatttatttcaaaactgacaggtagtcaagaaataccatttgtaaatacagatgcaatgggaattgcattatttaaagaaagtttattaaaaaatgacactctggaatatgaattagttttaaatgatataaaagatattactcgtatttatatcgactttaataacactattccactaaaagagatttacagtaatccaataattcccgacatctgttgtctatcatcagaagcatctgaacctgacaacttttatttaaatggaatattagaagatgatattaatataacaccattagatttgatcaaaaacggtattccattgcaagtgaacaatgatattcccagtaatactttcgacagtaatcaacctacgatcgaaaccttgatgtataataataaatctaacaacttgacaggattatttgaatctggattggttttcataactgtggagactaagttccagcctacaggagaaattcggggtcaaataattgatgaggtgcaaatattagaatgaatgctgatgaacttttttaacaagattcatacatagtagtaaaacataattctacggaaaatccgtctcctataacagattgctgatccgtaaaaacacacatgtgaacagaatcgttttctaattatgtttgaaaacattcaaaatttataatcgacaataagtataaatagaaagatattcaacatactttcgattagtcataacctatagtaacactaagaatagcacaacagagatcatacaagggcaagagcaaatcatttagaaaattaatgcatttattcaaagcacccaggcaaaaatagatataacttttgactaccatggcccatcaatactaatcacaactacttcctatcgaagtagttttaaagaaattcgagagtcaggttgagaaaaagataggttttcaattgtatggtttagacaggaagaacatggtaaatggcgacaagcagcaaatttctcaggttattttcagcataatagacaatgctacaaatttcattttaaacgaaggtttgatatccatacttgtcgaacagaaagtagaggatgagtatagaaatatggttattgtccatataaaagataacggagaaggtatacatcccgaaatgaactcaaggttatttaccaagttcagctccaagtcatcccatggatcaggattaggactatatatttccaaagaaattattcaaaggcataatggtacaatttggggcaaaaacaatcaagatggtaaaggcgcaacattctcatttaaattgccagtaatatgatatgcggatttattgctatatattacatctgtagtattctgaggaattcccatcattactcttttataatttctagaaacagaaaatcggctaacaatctttcagtttcccctaacaatatcttcaagagatatttgtgattcagaaaaggcagacaaaatgcttgataaaagttcttaaaagcatcgtttctagttgaactgctagaagtttatacatcaattctcggaccctacaataatcgatacccgttaagaccttgagtattccatctttcaattgattttcttaaaacatcctcacatcagtcgatgtgattagttgcaagtattattaatcaaatattatgaaagatactattcaaagaatgtcaaaatcattagatgatacaaaaacataccataaaaaaacagtaaagtgctagatatgatcttgacttttatataactataaaataatttttatttaatgtaattggtgtatttaaccaccgataatgagatcgtataatacgcatccagaagatgacatacaaaggtcaaatttactaatgtaaggagcttgtagacatttatcaatcaaataattgaaaaaagtaagaaaaataatgaattggttatctacatacattcatttaaaactatatctatcttatcctttatttgaaaaaggttttttctattgacggtaatactatgagattctttgaggttttcaccatcatatactttacggactattgaatactgattctcataattggtatctcctttatgttgtttataaagatcattaacttctatgatccactggattttatttttatcttctatactattttctgtagaggcggtcaataattaaaatgtggcaaaacttcatttatatgtatactgacaacgatagctagtttcatgaccagagaaactaattctaccaattttccttgcctatttttctcatctcttcctttatcgaagagtatgtatttgatttggacttactaagctcgatgtgctacttgtttagaattttttaattctaaacaggtcacatctgcatatatattgaaaaaaaactctaattatcaagtttttcaaaaaactaaataatattgttatttgatacataacattaccataatataatactacatgatagcataaatctatgtattatcaaattcctatttttactttatgtgatttatgagataaatttaaataaatattcgttataacctacaaaatggtaaactattgtctggttgtacccttattaccaggtaaaatagaactttcgaagaagtttgaagaagaaaatggtagtaataataaagaacatgatgaattttataaaactgcaggtataactcgcgaacaggtttggattcaacgtagtccagcgggtagtggtgctcctgatcttgaaattgttagtttagaaacagaagaccctgccaagaccttaaaagaatttagtacatctggccacccttgggccataaggtttcgtaaattcgcaaaagaagcatttgggatagactttgaaacaggacctccaccacctctaaacgaattgttagttgactggcatgaaaagaaatagttgaaaattaatctgaatcagttttgatcctaatacttgacaattttaattcataacctgcattaatgactcggatgtccttttctttttgaataaatttatctttcctcgagttcaaatatgaatcccgatatttgaacccatgaattctaaatattattttttcaagacatatagattatttgacgatgctgattagttgaaaattactttaatattctatcactactattcttaagtcattatgggtaatcaatatgagcatggagaaaataccggcagttaaatcagaagtttttcaattgtacctacatgacccaaaatgacattaattcaaaatttgtggaatttgtaaacgaagcatatgcagctgaaaacgcagctgtggacagaataaatacaagaattgaagaaactccttttcccgaactacaacaaagactaaagcaacatttgcaagagacaataaaccaacagaacagactaagccaaataatatttaaacttgagggagaaccaactgatgctaaagcccatcttccagagctaaagccaccatgggtatgatgttaaagaaaacaattaaagacacagtcaaaactattacagatgataagaaggaaaaccccctaccagaagaattggagctactcagaataaatcaagatataggtattgaaagttctgaaattgttacttataaaactctaattgaaatggctcagagaattccgggtcttgatactgctctattcgttccattattaaagcataatttagacgaagaaattagtatgcaaaaatggtgtatggacaatttaccaatggtaatggataaattgttaccaactattatatctgcaattaacaaatagggtacacaagtaatgatctcgcacattagttttaatttatttagaaggcttataattaatggcgaactagtttgatatctattattcatctccaatataatatttctttattaattgatatcctgtttatttatctttaatatcttctaggtattgttatggtgtataagtaattgtctacataaaatattgactattgattctcaacaaacttctgagcttcttcctcatgtacctgtaaattagcttcatccaccttgatcgaagaagttggacaaactgttacacatgccatacaccaaatacatgagctctccctgattggatcaggtttatcagtataatcttttcgaccttctctattttggtcatctcctgttccttcactaacagcgtttaccatttcaattgctggaacgtcttgctctgacctataccattgatatacttgaactggacacgcttctacgcatgcgccgtctgaaatacaagagtcccagtctacagccacataggttccatgaatacctaaaggaacatattcttctcctcttgctttgtatgcttcttgaacttccttatttgttgacgattctgcgtcctttcttcctggcccccatacaaaatgagaataagcaccatcggacgttgaatgctttccaactacattatgattcttgggaaactctgggtctatagtcataacattatatccttttcataatactatttaagacgagagcatttaacaatgaaatctcttgatctttacgtgttgaatttaattgctcatactataatacactaacatgctaactagctgaattcgtaattcaaaaaataaaattaaaagtaagatttgaaaataggatgtactattttatgcctttccgccttctcgggctactcttttacgggtttcttcatctgctgcttgtagtcctctttcatcatgtggtgcttccccacctgctctagctactctttctcttgtctcttcatctgctgaggctaatcccctgttactattgttgttgttattgtttttgttgttattatttgccattgtattaattttgataaaacattatatttaatgaataggtgatattatctagcatattactatccataggattaatactaaaatgcgagcgtgagtagagagcgtgcaaacgacattcgttcttttttttaatgcttatttcctaaatacgtttttgagatggtccctgttaaatattatgttttaatctaataagagatatctgataatagtgaaagcaataagtgtaagaattggaattacaatggcctttcggttttaaatatgaatttatggatttaaggaaagttcctaagcttattttacccacacgtgcacttaacaatcaattgtattattatttaatccatcaaagaaaaatatttttctaacgttatggtaccttatgcaagatcaaatttcactttattttcttgcaatattgtattaataaaacttcgatgaatagaagcatccataaactagaatgctggatgaagtataatttaaccgattggttagttcttggattaattaagattggattaattgtatagttaatcctttgccataattgaaaatgtagattaggattaagtacctctgctagtaaattttaatagaaaaatgtcagaattaaaaaacattgtcatataagaatttaataaaaatacttttactatttaatctttgttagttaataaataatgttataattgattaacaagagatcaaaaattcttttttttggttatcccgccaaggctatggattatacgggaggatttctgtggatgaaaaaagttgcagatcatattgagaatagtaaccgttattctgtgttaaagtcatatgcttatggcgacagtaaaaatgctatccacagacttttcaataaattctatgatttagcaagaattattattcattcacctgatatcgcaataatagacgcttggggtgagtcaagtattttgctctggtttattcttagaacatttcaaaaaaatgcaaaaatctttgttgtatttcaccattacgagcaaagaataccaacccgcaaaaattcaatggagatcttttacaattttcttatagaaaggattacatccatcatgctgaagaattcagatattattttgaccgttagcaaatcctcaatgcgtgaactagaatttttttatgatattagaaatggtaagaatagggatgaaaacctcaaaataaatggaactagaggaattttacataaaaatatcaatagaaacagaaatgaaattgcgattgttggagcaggaatagatatcgatattcttgatgttgttgttagtagtaagaataaaatagataagaagaaagatatagattttctttgcatgggaagaatggaaaaattcattcatttagaaaaaatatggataaaaattaaaacagttaggcccaattctaatctagtaatgattggacgtgcaagtcctgacatgattgaaaaattactatctattggaatagatcacagaggttttgtttctgaagaggagaagatagatctttcttcaagaacaaaagtttttatttttccatcatcaagagaaggctttggaatagccgtagcggaggcattgtttctaggaattccgatcatagcatggaagattcctgtttttgacgatctatactctaagaatgaggaaacaataataaaactgatagaattgggaaattggcacctctttgcagatgaatgtatcaaagcaatagaaagatataattttaatcaatcggataaaaaatacaaaaaagcaagcaatgtctttccaacatggaagaatgttgctcagaatgtgatatcagtaattgaatataccaaataactattaatgatattaggtaagaagaaattatcataatggtataaatgaaactcagataacctaacttgtcaaatgtccttatcttgttactaaaataactaattaatctgggacttgaacggatcttcaattatctagtagataaaatgtcgagataattattttgtcaaataaaatcaaaagattcgaaatgtggaattggaaccgaagatattataattgaaaactaaaatctagttctaataatactaacaaagtataaaattgcattagtaattctatttcttatggtggtgacaagaccttatcaccatctaacgtacaagcccttcatcttctgttggaatacatagactactgttctctccaatgtaggtatcatctttcacttctactccagaaatggaaggtatgctaggagttgtatcatcattgtctgaacacttccttaattcctctttttgatgtgcagttgcttggtggattagtatcagcacgaacagtacagatttccttgatcaccatctttatctataagaatatcacaacatttgacggtatatccataagttattggaacgcatcagtagaggacgacttcattggttttgccattacgcagataggtgacacggcaataaatatcacaacgagcgatatcataccaagataattatgatattgttcacacacaatcaccattattttgataaatttaaatgcattttccagtaaataaagaaaacattacaaatatagaaagaattagcatttattgaaacatttatacactaaccatcatattctatctgaaccccgcagaatggacaatgcgttatatcataattatgaagttttggatctgttcccaactccatggtgccgtcatgttctattatctttatccaacccttttcacttatgctagatatcgtaaatgtattttctgaaagcatagtattcatcccttcacaacattcttgtatcttcatatctacactatatattcaacaaatacaaatttaacaattttctttaattatttaaatgccagatattttttgttgataccttttcatgtcatagaatcatcgaaacatcttacgtagtaaattttagaagtaggaagaacgaccatcatcaaacctattaataaaaagggcttttaacacgatacagtagatgattcggcttttaaacagttgaggagtctaaattttttcatcctaaactaactggagtcaatgtttgatttagaaatgatgcttgcaatatctttagatatcataaatttgtcatcatcttagtcgagctattggatttgaatatttactcaataaataattcatccgcataacaccatttccaagattcgccgggttcgtacgactttataattggatgtgatgtgctcttaaaatgctttgtaccgtgcttattctttgaattatcacaacatccaacatgtccacaagtaagacacagtcttaaatgaacccaatctgaaccaatctgttcgcattcttcacaaccttttgtgtttcctttcttgtcgatatcaactacatctaggtgcttacattgcttgttttcattattatccaccataactttactatatgatcatggtaaataaattgaatagcacttttgaaattattacaatctattaactggccgctgatttctgtaacttggttctccaaataaggatgccttttaacacattctaaaaataatgggtactaatactaataaagtaactaaagaattcgaagacataaacggtgggcgcattatcacagacgtattattagaagtcagcgacactattagaaacactctgcaagttatctatactctgggacatactctaggtcatatttctctgtatgacatggagcgttagactctcattggtagagatattgtttttaattctattttaaatatcgatggcctatctgttcccccttctacagtaacaaaggattagaacgcctccattgtatctgcaacaagactgttgtgtctgaaaattgaaaaactattattactacatcaggcaaatccgatacttgagaatgcttggataatagaaactgtgtgattattgccattacgcataagaacatgacagcagaataaagaattgttttcatttcttgttactaataaatcataatctcttcctgagctatgcctccaatagatttgtttgttatagcccaacctttgaggagcggaatacaccagtttgcaatatcattaaatgactgcactctatctttaccaatagcaatatctcgcaggttatagtagaactggggtttatcctgcttatatttaaataatattataaactaacaagttattaacaatctactaaagttgatttcatagtatgtagtaactgcaatcactcaaaaccaatacatactttctatgatggaataactgtccacaatattatcaactaatagtcgattttcattcttaaaaggtgcgaagtggggaatttgaacctgtttgttgccttggaaagctcaagtcttcagaatggtaacctagtgtgattcaagaaagtttaagaatcatattactaattatctcctcttgtcaaagaaaattcatccggatgactgtacgactcttagtgtgttactcgataaattacatataggattaaaagatgaccacggcgtcacacgattgcatccaatccaaataacttaaaatcagataaggaaatatggttggtcattcctggcgataaagatttggatgtgaattctgagtcggattcatacctaatgttttacacgattgattgtggtaagccgcttggtaagtaagaggattgcatatcgatctttccgcggatccaatgatggatcgctttatttgaaccgcgattgtgaatcggtattattaacgattaaacttacttgccatcgaataccgagcattgttgcatgtctggctggaatgggaatgcaatctccttcataaattaagaggaagggctttttagagagtatatccgtattttgttattactttatctatatgactaagttgtatgggtttaggtagaacttcctttacacctacttcataatagtcatcaaaatcgtttatcttaagatctgttgctgttattaccactatatttttattgagtataccttgcttttttaattgatttaaaacatcaaatcccgtataattaggcatctcaatatccaaaaggattagatcgtattcgttctcctgaattttggataacccttcaagcccatcactggttacttcacagtctatacgttgtaaatagcagtagtcagataaagcttccaagatatcgatattgttatccactgccagtatgttcaattaattctctatggttcaaagatagttataagtattgtatatttcttattatattcaatattgttttgaacatacaaatataatttattccctgaatttggtatggactatgaagaaattcaaatcattctctaatcttaagaatttggtaatcttaacatattaaataatttctcaatcaagggatttttatgaaattcgttgaaaattttaaaaatcatcacaaagcaatttttaccattgtcatttacggaattgtcctttccatggtttttaccatatcgatatctaacgtataagcggcgtctaagaacgtcaactgggattcttctggaaagtgcatgcaagtccgtgatagcgttggatgttgctggagggaaaaagtcccgggtcaaatatcaggaaaagaagtatgtcaaatatgtgatggtaagggcaaaattgtggagacgtagaaactcaagtggaggatttggaaagaaatgactgttcaataagacaaccaacctgtcctgaaggagacatacttcgaatcgaactggattcaccattaaccgaaccttcagatgtgaaagatttagatgaaatacaggcaacaaatactgatctcagttccaatggaggaaatgggggatcagaacaatttacaagtcaagaaagcaacgatgatttcgcagattcaaccagtcaaagacaacaatgatgatacagagcaaactgcaaatgagggactccaaaaccaatcatcgcaagattatgaaataaaagttcttaaatcttaataatctactactcacacactcgcactcaaagtgcgaagtgcgggatttgaacccgctcaccgctttgtaattaagttcaaatcccgttgtcactaaaacgaacctccgatccctttcgtttataataaatgacatagttaatttgcggcataaaattgatacaacataatcaacaacaataaattttttaataaaatggctaaataaacactactggaagtttgttagattattcctttttatctgtaaaaactacatcatacaaatgaccatctgctttggccatagacaatactttattcatgcggattattgcctccggattatcaagtctcttatcaaatgcttctttacccctatactggacataatttactaccctcttcatatcttggctcttatgaatacttgctgatacgtatccatcctgcagacgccatacttgcttagtggtttcaacaagagcatctactagttgttgttgttttgatggatcaactgtgaatacattaattaaagtgataatatccttgtctatctttattgtagtcatattcttcgatattgtcaattatgaccattagaataaaaacttaaacttaataacagataattctagatatacatcataagcctaaactgagtaatctaataacaagaaggttagtggaaaaatggctattgttaacttgtgaatattgagattatagatgattcatctaatcgcactcagaggtgcaaagttcgggatttgaacccactataggcgacattcagaattcacaagatctttatcggatattgtttagaaagactattaattcaattcatatagtacccaatttattttggatgggactaatactactataacttttgaggtttacgaagcattgggaatagaggtggaaactcatctacctcaatggtccccagtagttcaaatccatgacgttgataaaaaggaatattttttggatttgatgattcaagatatgccaacgagttatcttcatccaagaatttagatgcatatttcatgagaatagatccaaatcctttgttgtagtaaagtggatcaactccaagaagaggtaaataccaatgaggttcgtttggatgaaatgaacccattttctcaaataccctcggaagaatattctgtgcctcttctgatgtggtactatgtaaaagtcttagcatggtattaatgtcaggttctatattaggacgtaaccaaagagcagcacctgaataatttccaacatagtgagcagacttatgagaaaatgctcttcccccaaaagccagggcaaacgtagtaaaatgtaatagatatttctgcggatctggccacacccaacgtgtagcaggatcagacccaaaagccaattttaaagtatcaataacagcattttgttctgattcagttgcaatcttgacttgatggtcggacattgtagtatccatgaatgcccatagttataacttttaacaatttatgtattgcacaaaactcaaaaattaaagaataatgaattgatcgaatcagacccttgaaaatatctaacagtcagtcaatgtcccgatctatatgagactatgaaatgaattactgactcacccaaatactcatcgattccttgttttacttcaacaaataatgtttgataaataatagaatgaagtagggtttcgaagttgtaaatggtaattaaatctaataatattgaataaattgatctttgctcggaatcaaggatgaaacgctctatttgaacccgcgatccctttccattattcttatactaactatctctcggattgtagtagcaaattaattattcaaacgattatcaggacctagataaaatcaatttcaacttaaatctgtaggaagattaattccaaatttgttcaatctttactagtcttgtacctccataactagtaagataaatgaaaaggaagtgaagaaatggatatacaaaaatattacaagataaagtaagaaattcaactctaatggcttctgttgctgcattattgttagtctctagctttggtgtttcaaacctatcgttatcttctaacactcaagcatttgctacaatagacgataataacaacaagatagccgattcaatcaaaaaggcctgtccaaattatgaaggcgatggtgatatcaaaggtttagcaactgatatcttgaaggcctgttttcatcacggtaatcaatctcctcctacaaatccaaatccagaaacaaccaccttccccgaaaatattttggaatttgaagcttcagtcacattacctcctattgcaagccagggaattgaggcaaattttacaattagcgatccaacaaacgattatttaaatacttatagtctaatggcaggccctgttaacttaagcatttgaaaaagagtgaatttgagttgtcactggactaaacagaacaatatcgacaagattccctatattttgagcacgatttatgaccttttgttctgaaataattcctcttaatctatatgaaatactgggaagcatttgaaaaattaccttaaattaacagggccgcgcccaatcatgcaacctgtaaataatatgctttaggagaaccatctgttaaatgcaaaaagataatggaattgcaagtgaagaggtaaatcaagctaacatatggttttaccgtgcttttgaaaacctatctatcgaatcaatggacaaaatatggaaacatgatgaaaatgttgtttgcatacatccagggtgggatttatttactggttggttggcaataagagaaagctggacaacaatatttagcaacacagagatgataaggtttacaatcacaaacacaaaaattaagatctttgataataaaattgcagtagttgtatgtatagaaaacatagaaacaaaagatccatatagcggtcgagtggttaggacgggtgtgattgctaccaatgcatttgaaagaatggaaccaaattgcgaatggtcacttattcatcaccatgggtctcctataacaaactacattccaccaaatacatcttctcactgctgattgtggttaaagaatttctccttaacgaaagcctcataaatatgattattaatttacaattctcttgaacataacgggcaggttgttactggagacagtagtattttgcaaggaaatagcttgctgtgtcaaaaaatgaaggcctctactactagagacattgataaatcatgtcttcaaaataaagatggcaatacgatctaaacattaccttaattctaatttttgttttcccgttagagcagcccgatatgccccctctcttattttattttctgcttgacctcctgtcaagaagttggaaatctttccaatagttgttaatttatagtttatagtatgattgacattcgtagaattatttccattgctctggaattcttgagtgctttcccattcttgaaatggcccttctgtttgttttgtaactagccttctattctgttcctttttaactacttctaagatcatttcatcttctttacccatatattcgcctgtcactatcatttctgaaccctcttcgctttttttggtagattcattttctgattcttttacaatgtcacttggccatgactctttaatagtgtctggatttgtataatattcaaaaacagtgttaacaggtgcatctattttaatttgagtttgtattctagtcataaatattattacacagtatgttatataaggtagttgtatttttttgacatagattgtcaaaaaaactaaaaatcacctcaatcatgaataaaacatcacgcctgccaaataattcactgagtatacaaaaaggtgcgaagtgcgggatttgaacccgcgatcccgagcttgggaagctcgtaccttaaccaggctgggccaacctcgcctgacataaaattaatcatacggtattaataacttaatgctgtggtgctacttaccactattccatattttcccctttctaaaagcaatttttctagcagagctaatatcacggatcccaccacgatttttttccgcaccttgccttatagaagttccatattcgtctacaatttcaataattacctcgtctttaaaatatgatttcagaattccggcaatttgatgagaaagagccaaactcccatcaccaattctaactattttagttggagattcaattgatgataaaacaaaactgattttttcaattgtggaattaaccgaagacagaactattcgatctagttcaaaataacagtataatatagaaataccaatcctttttccaggatctatcccaactatcaattgttctttagaagaaccaaagtagcccatacagttttgcaaaatttttgcttttatggatagaggaaatttttctaattgagtatccaaatacatattatccctatttacgattttggactcatcaaccgttgtaattataacttttccggtggacagtgacgcttcttctggtgataacgacaaataatgtaaatccagagattttaatacacttgttattttataataggaacggcctgaaactgtcgcaacaataactggtggacaacttgttaagttgaacatttctattgctaccttaaattgttatcacaaccctattaaagattacgtttaattttctaacagtcaaaaatgcaaaaattacgcaaacttcaagattgttcaaatccatctctaatcacatagcgatcttacctatcgtattaaagtacatatcacctgtttcataataatcattacaagacaatatttttacataattaactgaaaaattaattatataatgcaataattaatagtaattctaaataattataggtatttcgttaaaattataatatgattaaatatttttctgggtctcttgatatcttaactagatgataaaaaagagcgtttttaaactgtcaaattaagtattgcctgtgcaatatcgcccttagtatctgttaaagcaacgaccgctttttcttttgacacatttgcctgctgcataactaatacaatatcttcttccttaaaagaaggaacatctctattagtttcttcgatatcggtagcaataacctgataaattgtactatctttgcctttcatttccacaacttggggttttttaagaaatatttctttcacatcggttcttataataacttcctctaccgaacctagatctttcatgtctaaacccatccggtcaagcattcttcgcatatctctgttgcccgatcgcatcatacaaaccctaggtacttctgctttttattccttctctaatttttattcctataccacggataagagatatcccatcatgaccagcaatatcatctatggactgtaaataatatgaaaatggtaacaaggatcgacccacagctagaacagattcatttttgtctattactgcaacgtctgatccgcttttaacgttctcaccacatcttagcacatgctttacaaatagggatctgccttctgatacgaatggtacagcgtcttcaataggtataacacagttggatagataccccttttgttttaaaaaaagattggcaccattaatcgttaatgcaattcccccatcagttcgaaaggtgcccattaattttccatcaatgctaaaactcttgatcttcccggtttttctagaatattcaagttctaaatcttttggaagaattgagctgatatcccttccaaagagaaagtccacatgagaacatattttctgatacggatctagaaatagcttttgcaattagacatcctaactagcgatgcccacaataaaaaccatatgaatgactaactcgtaagtagttcgaagggcgagaggatataggccaatccacattcattgccaagtagattgaaagtcggtaagtttttatcattagtaagcaattttacaaaatttagattagtttatgtaaattctgttaataatatatcttttagaaaatcccacaggttctaatggaaagggcctttcataagtaaaatagaactaaataatgcgttatctaactccactaaatgaatagattcgattatctaatgctttttaagtaattctttatattcatatacagatatttatggatgattcattataagttggtgtctcctagtgtcgctttttgttaaatatagcaaaaagaatttggacaggtccaaatagataatatattaaaactatttataaatgtctacacggtggacaggttcgggtatggtaccttgcttccatctcataccatatttccatacagttagagaatttgacaattatatgaaagatgggtctaatggagtaaacgtgtacaagattcttatagtgaagtgcaaagcatctaaagttattgttacagcctgaaataagagaataaagcagttattaattccatctactattatgccatacagtgtaggctgttgcatccttggacgataatactccttaattctacgaaaagcggtttggacaaatcagactagaagaaattatgtaaatgatcgatgttatttcggcaagccatgagtagccagtcgattgaatgaaatattattaaagtcaaaatatgctatgaatcacggttgcggacaattctcgtcaattgcaatacgtctagatacgaacaaaagagaaaagttggacgacacacggacgacacacggacgacacacggacgacacacggacgacacacggacgacacacggacgacacacggacgacaaatcctaataaattagattcaattaattacctacatggtttctttttgtgaattatgcggaaaacataccgagataagcaagaaagtaataattgaaaaatcaattatgagtgtctgtttgtcctgttcaaaaagaggcaaaccagttgaatctactagtgtttcaaagaacttaggttcaccgaaagggacagaccctataggatatttatcccccaaaccagcatttgcccctcaacaaggttcaaggaacctttatgccagaaaaataagagcagctccaaggattaaaccaccccccttgaagaaaatcaactgggttgatgaaatgattctggatcaagagtttccgtcgcttataagaaatgccaggagtaaaaaggggctaacccacgaacaacttggacaaaaaattaacgaaaaggtaacgctgataaagaaaattgaaacgggatcaataagacctgatgaaatcttagcaaagaagcttgagaggtttttgggaataacgttatttatcaaccccaatgaagagaacgtagaagaataaaatagaatggaatatcagaagcaacaaaagtaatctcatcttttaattcctaaatttctccattcttgagtgaaaagaaaatagaagggtggtgatggagatatatctaatgacaatgccatcatctgtagcggtgcttagaataggtcacagactggtaagagacgaccgaacaactactcatgctgtgttggtatcaagggccatgggaagtaaagtgatctacatgaccgacgtggatgatgaaataaaaaaaactctagataaagtcaataaaagatggggaggagaaaatgaatttagactcgaaatcattgataattggaaaaagttagtgaaatcatggaaagaaaatggcggtatagtcgttcatcttacaatgtatggatctctaatcaatgataaaataaaagaggttaaagaattaaatcaaaaaatattggtcataataggagcagaaaaggttccaaaagaggtttatttacttgctgattataatattgcaataggtaatcagcctcactcagaaattgcagcattagcaatttttctagatagaatatttgaaggtaacgaatttaacaagagttttttggatgaaagaatgaaaatcataccatcagataagggcaaaaatgtaattatgaggaagcagaataagtcaaaaaacagctacaacaacgcaagtccaaaatgaaaaaataaaaataaaaaaagtaagaaagaaagatagggattcatactgctattacagatagggactatattataatcacagaaccacatggacacatgtagatggtattcataaggaggaaagagacaattgattattatataattaagttatgataaacaacaccgcaagaaataaaaaaaaacaccactatatgatagagttaatgggtgatacacaacttagggcaaaaagaaccaggatcaaaatattgagagctattgtaaaaaagaatggatccgcatgtttttctgaaatcagaaccataacaggtctgtctacaggatctatttactatcaccttgaaaggatgaaaaattatgtattaaaaaattcaaagtattatgtaataactaaagaaggaatggatttgttggttgaagtagataagagaaaagattttgcattatcaacaaagctaatttgatttgatgtgatcaaacttctttttcccatctatcgtgactacatgagccaaaaatcaagttgtaattaaaccaattttcgacgatcgggtagccctttttatttctaaagaaattctcctgcccatgctcatgggagtgtcaaataataaatctgaataaggtgaacccgaaacgtacaagtttgttccagctacaattcgtgctgaaaattcaaatgctatgaaattagcattattgtcataaacaccttcaatgcaaaatggtccaggcattcccggaggaacgagtttttctgatgcttcaacaaatcgttcacccatagagtaaacttcaggcagtaaagattctcttagtactattggtatattccctacaacagtataagaaggctcaatattagaggatatttgatacttcgatggtattcgtcctattgcatcaatatccgtttcataacgtctatctatccccaataactcaagttcatcggtgataggtgaaaaaaaatattgtaaataaacagggactccattagcatatttctgtataaacaaattgtcctcagattctattacacgtgatttaatgagtttttgtgcttgttcttcgaatccctttttatcagtaaccaagaaatatcctttccctccagcagctccatgcaatttcactatgcacaagccatcgatatcatttttggatgatatttgagttggagatggcaactttgattcgtccattagctgttgttttagcattctatctgattcccatctaaggatccatttattaccaaatatcggtatcttgatactctccagttcgtccatatttaatgtagaaatcaacgttccatgaggaaccatgattggactaaacttttcaatcaattcgtcttgaaaatttctatttacaatttctttgaagtttttgatcgatacaatattgtcaataaatttgaaccgtttgtacatgttaattcgtttttcttcacatactaacaaagtattgaaaccctcatctttggcaccttttaatacctgtaacgagcaatgtgaacccaaagtcataacagtttgtttgtcaacgtcttgattgaaattttttatagaaaaattttggtcattcatatttcataacccgtttattaattggaattatatcggagattaatttttttgtttacttatcaaatcgtacggtatgtagctgcttgataattgccttcaagggaaaaacaatatgatgctgcctaatgacgtcattgagatacaattagtaaatattagtcaaaaattacttttactgagttaatgtctaaagagaggtacagtgtcataagcaaaaatgtggtccatgatggtccagtaaggttaaggatagatacattcagctataatggaaaagtttttagaaaagaggtagttgagcatagtccttctgtcggaatacttcccgccattaataaaaaagagattttgttaattaaacaattcagacatgcagtaaacaaatatttagttgaaatacccgcaggcaagattgaaaataatgagtcaccttatgaagcagcaaaaagagagttagcagaagaaacaggatatacaggagtgctaaaaccgttgacccgatgttttttggcaccaagttatgataccgaattaatgcattttttcgttgctgaaaatgtgaccaaactgcatgccccagaaagaatggatgaggacgaaaatatcactaactttgttgttaatttaaatgacgctatcaaatactgttatgatggaacaataatagactgtaaaacagtgacagcaatatttctctattattttgcccattataatgataatgaatttaaggataactagatttaatataatcaataatttcggatagtgaaggattgtcaccaaataaattccctacatgcagtgaggataataaatttgcaaaacaaattttctctatcgtcgtgaatccaaataagtgaccataaatgaaaccagcatcccatgaatctccggctccacttacaatatcgattttggatggaacaattgagtctacaaataacgactcatgaccgttagatattacggatcccttagttgtatgtatacatactgttaaattaacaaaattagaaagcaattttgccgattcgcaaaaggcgttaatattattaggatataaattactatcaaaagttaaaagagtgttttcgttaaattcaatgacgctctttaatgcttcaattatcagattatattcattttcattaatacttaggaagtctattaaattggaacgattttttatgacattaatgaattcaaaacatcttttctcaatgtcggcgggatcgagaaaatgaacggaagtaggtgaatttgcaaagacataatccaatagctcggttcctcttaggtttgatgaccaatttgtcattatcacggcgtcagatgatcgcaaaattgtctgtactttttgtgattgaattagttctggaccgaaattatcgttgtcacccacatcacttaccatcacatttgagggggagctggaggaattcaaaaactcaaatactgttgataatccatgttttcccttcgtgatattaagatttacgtttgctttgaagggcaaaaaaacagtgtgtaaaatagcagagccaatttcatctgctatagtaaatagctctacgcgaacatcaagttttgctagactgtatgccatattgactgcgttaccacctttgatatctacactagaatatcctcgcatacttccgcctcccgcaataatcttttttggtatatcattaatgaaaactggatagtctgatacttcaataattctatctacaaaaaaatcaggcaaaatggtaacctgtggttggtccctagtttctcttatatctacaagtttgatcaatagatttcggaatatatcataagtgtgggagttggagttcccagaaaactgagttatcaaattctctctattttctgttttagccattttatcagactgacttgtgttttgattgcgatagtgatatggaaaagatgcatcgccgtttgaaaaaaaatttctcaaaggattttgacgtataaggtatttggtgaggtgatgaaattgataaggtaatgggagaatgagttgaagaagaggagtgaatagaaggacaaggattcaaggtataaattttggatttggataaatataatagtatcagcatcagaaaggtttgaaaaataaatagaataaaacggttgtcctgatatataaaattaatctcttttttgcaggataagcgtgtatggactaatccatatccatgccgcccatgccgcccatgccgcccatgccgcccatgccgcccatgccgcccatgccaccaggtggaccagcgggcattcgcgactttgtggctgcaattacgtcatcaattcttaacagcatacaagcagtttcagtagctgactttatgatttgttctttaattacagttggctcgagtatattgttcttataaatatctgaaacagatgttgtttttacattaatgccaatccatttagttccctttgattgtttggccttcaattcagccatggtatcaatgggatccatacctgcattctctgccagggttaagggtattacttctaatgcttcagcaaacttctgtgcagccaattgtgatcgtccttcaagactgctagaccactgtcttaattcattggctatgtatgcttctggagaaccaccacctgcaacgatagatggtttttccaacacatccttcataaccatcaatgcatcatgtaaagatctatcagcttcatcaactactctttgtgatccaccacgtacaagaatggtcacagcttttggattcttgcatccttctatgaacacccatttgtcagtttcaacttttctttcttcaaccaaattagcaatacctagatcactttcactcaagtcatctagattgtttaccaatcttgcaccggtagcctttgaaagtttgaacatgtcgctttcttttactctccttactgccaatacatttgctttagccaaataatgttgtgcaatatcatcaattcccttttgacatagtacgacgttagcaccaactgattttatcttgtcaaccatatccttgagcatcctattttcttcttctaagaacatttgcatttgttggggttcactgattcgaatttctgcactcatttctgttttttcaatttcaagagcagaatttatgagagcaatctttgcgttttcgactctctttggcataccagcatgaactatttccttatctaaaacaattccttgtatgaacgttgtatcacgaatagaaccacctgctttcttctcaaccttaatattgtctaaatctattcgcagaccgtcacctgaggtacttttttcggcaatctgtttagctgcacttaccacaatttcactcaatatcggactatcatcagataccaatttagattccatactggtttttgcaattttgataaggagatccttatcattgacattaacttttattgcgattttatttaagataaccaatgcttgctcagaagctgcagtgtatccgtctacaatcgcggatggatgaacatctttgcttatcagttgttctgctttttctaaaagcgcgccagtaaaaattacagaggaggtagttccatctccaacctcgttatcgacagattttgcaacctccaccattattttggcggcaggatgttgaacatcaatttctttcaaaatagttgcaccgtcattagtaatagtgacatcacctaaagaatccactagcattttatccatgccacgaggtcctaaactggatctaacaatttctgctactaattttgctgcagaaatattatttttttgtgcctctctgcctttattttctttagttccttcttttaaaattaatactggcataccaccagctgtttgttgaattgaagccatactttctcatatcaccttaatagaatggtacaattcttcggtaagccccttttataggtttcacaagtaaaatattacaataataaggatcaagttgaacaaataatttatcaaagcaaactgaataattcatatggattttgacatcaaattaggaaccaaaagtgaaaggagaataaaagtgagccacaatcagtctaccagttttctttgggaaggcgaaaatgttttctcgacaccttcaatgatatcagaaatggaagaaacctgtagactgctattaaaagagcaatttctgaaggttgattcagaatgggattcggtaggtaccgttgttgacattaatcatactgctgcaactccggtaggcgcagatataattctaaaagctgaaatcacaaatgtagatggaagaagagttcaatttaaagtatctacagaagacaatctagaacaaataggagagggaactcatgaaaggttcattatcaatattcctaagttcaaagaaaaattctacttgaaagtaaaaaaactagatgaaggtcaaaaaggattagaaagaaactagagttgatcagtcatgagtataaaaaatgaggaagtaatctagtgaaagaatgcatctaccataaaagcaataaataatgcagccagatatggactgctaaatttgaataccaaccaagaagttttttcacttggttttagtaataaccacacagacaaaaatatcattacaattccaaatacggtagcagtcaaaagatatatcaaaccaaattgattaaagaaaaatggtaatatactaaatacaaccatcatcaaagttgttagtgctattattctcacagatttagattcacttgatacaacaggaagcataggaacattggccttttggtaatcttcttttacgtgtaaggctaaactccagatgtgtgtgggaatccagaaaaacaccagtccggccattgcaatacctatttccacatgttgaaatgttactgctatatagccaattagtgctggggcgccaccagaaaatccgcccaatataatattagattgactagttctttttagccatttgctgtatactatgatgttatcaaacaagccaaatgccattagcccaaaagcccatatgtttatgaaccacgcacaaactagagaaattcctgttaagataagcccaaaaattaaagcgttacgtggtgaaatccttcctgatggaatcggacggcctttagttctttccattatcgcgtcaatatctctatcattatatcctgtaagagtatccgcagctgcagagcctgcagcgattgcaaagaacaataaagtccaagtcatcaaactgacctgaacatcgaataaccaggatgctgaaaccgcagcacctattgctgtgaaaacaagtagataccaaatttttggttttgtaagttcataataatttttaacttggttaccaactgtcttcatctctaaaaccaaatagtctattaacctaccaccatattataaataaaatagttatttatatcttgagagaatttttttatttagacactgaatttgatattatttctcgtgaagtcttcctcatctcgataaatgtttcagttttctgtatccttcgatccttcccactttttcagatatgatttgatgcatttcatctagagagcgcgcagtcatagttacaagcacatcaaatcttcctgtaacttcagctacttctctgactgagggaatcttaaaaagttccccaagtacattatccctcaatttagaatccatggtaattccagtcagtgctttaacattaaaacctaaagcttcatcatttattacaatagtaaatttcttaattaaacctctcttgacaagtcgcttgatcctgctatacactacagaggaattgatgttgattttttttgaaagcctgggaaccgatatacttgcatcttttgacaactcgcttaatattttgagatcaagatcgtcaattcttcccataattttcaaaatatactattttttcgtggttaataaatgtataatttttatttttgttataaagtttgtttatttttaaaaaaaattatataattttttttgttttgaataattcagctagcaatactgcacctttagcggaacccattttttcattatgagttagtagaacgtactttatgccattgtcaaatacggtatcctttctcaatctaccaactactgtggtcataccatcgttgatttctctatctactcgtggttgaggtctcgtaggatcatcatttacaacaatataatcccgtggagcagtaggaagattctttatggacacatgttcggaaaattccatcattttctttttaactgacaaggggtcggtattttcaatagtctccacaaagaccacctccgtatgaccatctgacactggtaccctggtacatgtgcaactgacctttacatcattaacagaaatttctttagactgtttatcatattttcccaatattttcttggtttctatttgaactttttcttcttctttaggaatgtatggaatgacattgtctaatatgtccaaagcaataaccccaggagacctacctgctcccgataatgcttgcattgaggtcataaagacactttttactccaaaactatcaatcaatggttttagagtaatagcaagcccagtagtagtacaattgggcaatggtgctataaagccgctccattgacgctctttctgctgcttttgcaaaagatcagtatggtcatcattaattccaggtatcaaaattggaacatcactttcatatctgaaagcagcagctgtactaataacaggaacatgggcagctaactttggttcaattatttgtgcatcatcagattctaatgcagtaaaaatcaagtcaaaattctttggatttatatcgtcaaatttagatatagtcttatctctaatatattccgggacttgttcgcgattatgccacttaagtatacccgactgcggatctctaattgcatcgatgtactttttaccagcagatctttcagaagagacaatatgagttaaattaaaccaaggatgtttgtcaagtgcaattacaaattcctgaccaacagcgccagttgaaccgattaacgctacttttaacatattgaaagggttagacataaaacaattaataatcctttttaaagcgtaaaaaaaactaaaattattatacaataggcgaaaagatcttgttatactaaaaaaaaagataagaaataatctgattgagacgactttggactattgtcatcatggtggaatctattctgcaaatggtcaaaagaatataagaatagacttcagttctaacataaatcctcttggaatttccaagaaagttttggaaaaattaagatccaatattaaactagcctatacctatcctgatccaaaatgcaatgaattaaaaaaaaagataatagagtacatagattgtgaacttgaacttgacactaatgagaatttaattacgggaaatggcgccacagaattaatacattatttcgcctcggcttttacgcgaaaaaaaacgctgatcccaatccccacgttttgtgaatatgaacttgctgcaaaacgcagaaaatcgcaattagtacatgtatcccctaacaataactttcaaattgattcagattctattacaaggctaacaaataatccagacaacgaaataggatcattatttttatgcaatccaaataatcctactggaaagtttttcaaaaaggaaatattagaagtaatagaaaaaatcgacaaaaagatcccaatactcctagatgagtcttacattgaatttaccgatatcagaaatgaaaaggacaataattattttgttaatataataaaagattccaataatttggtgatattacgatcacttacaaaaacattcggcttagcaggtttgagagtaggttatgcgctatcgagcaaagagaatattcgaaaactaaacaacaatctgattagctggaacgtaaacgggttagcccagatagccgccatagaagcgctaaaagacaaatctcacattaaagccgcaagaaaaaacaacatttctgaaaaaaaaagaatattcaagttactaaaaaaaaataggaaaataaaggcgatttctagcgatgttaattttttcttgattgagatactaaatgagaaaacatcatcagacctgaccagcgaattattaataaagaacagaatcctcgtaagagactgtaagagtttcacaggtatgaatgacaaatttattagagtagctatcaagattcccaaagagaataatgtccttttagaatcattggaagaagtgctttgaaatcaaaactgttaatgattcaggggacatcttctggagctgggaaaagtatgctcgtaactgcactatgcagaattttgaccaataaaggattcaaagttgccccatttaagtcccaaaacatgtcttcattcacatataaaataaaaaacacagataaaataatagcaaatgcccaagcgattcaggcaatggcaagtagagtaattcctgactccagtatgaatccaatattattaaagcccataggtaacaacaaaagcagaatttatacgaacggtaagtttttgtcggtcatggaagccaaagacttctatttagattttgttctcaataaaggtttgagaatagctctgggcgctttcatggaattaagaaggaaatatgaaataataattttggaaggagcaggctcgcctgctgagataaatatacaaaaatatgatatcgccaacatgatttttgcagccaaagtaaatgcaccagtaatcctcgtttcagacattgaacggggaggatgcttcgccagcattttaggtacaatgatgttattaaaaccatcacatcaacgattagtaaaaggaattttaattaacaaatttcgtggagataatgcaatactattcccagcaataaaaaaaatcgagtcaaaaataaaaaaaccaactttaggtattattcctaaaattgatcacaatattccagaagaggactctttggacggagataaaagtgactatgaaataaaacgaagtttgaaggaaaataagaaaaaggacgtgatagacaattatcaaaaatcgacaggtcagtcaactttagactcagaaattagtatgtttgcagaaaaagtggaatcatcaatcaatatggattatatcataaaaaaaataattggatgaaaatattaaaacatgtcacttgaattcgtaacagaaatcatatcaatcttatttattgcaactctaattgacataaccataggtgaaccaccaaataagatgcaccctgtagtactgattggcagaattataaaattctttactaaaataataaaaaagaattctttccgatatataaaagaaaaagagaaagaaaattttgaaaaggtgatgggatcgatattagcattaggactaacagtcttggtgagtgcagtagtttattgtattattatacaatccttttatttgttaggcacaattttttttgtaatagtatcctcagcaatgttaaaaacaaccttttcaataagtgctatggataagcatatcaaggaaatactggcggaattggacaaaaatgatctgattaaagcccggacaaatttatccaaaattgtcagcagagacacacgaaatctatcagaatccggaattctatcagcttgtattgaatgtgtagcagaaagttttgtcgatggtatactctcgccactgttctattatgggcttttaaatacactaggttctatgatgtatagaaccataaatacactagattccatgatagcgtacaaggatgagtactataataaattgggatggatgtcagctaaactagataccattgtaaatgccctacctgcaagactgtcattagtatttttgattgcctccatcatggtttgtggacgagattggaaaaatgcggtaggaatatttaaaagagactacaaaaagacggaaagcttcaatgcagggataccaatgtcaattatggctggaggattaaatattcagttagagaaaattggtcattatcaattgggagacatgaaagaacaactcaccatccaaaaatgcaaaacatccttaaaaataaccaaaatagcgacattgatatttataatcagttttctaattcctgtcattgtaattttgaaccattttagttggtgggcaatactatttggtatttaggagcatcttagaaattatatcatttttaacaataataccgatcggaaaattaagtaagaacgatggtttagaaaatatttcaaaaagaatgttcttattcccttttattggattattaataggactgttaactatacctgtagtattattatccttttatttctttaatcagtttgtagcttccttaatagtagcaatttttttgatactattaacagggatacatcatactgacgctctagcagattttgctgatggtattatggtgagaggtaacaaagacaagaaatacaaggtaatgcatgacccgggaattggagcagcaggaactgtcgcggtttcggcatatcttgttggaatggtaatagcaatttcttcaatcacaagtttggagagattaatgattggaataattctttctgaaataatatcgaaatattcaatggtattgcaatcgcattattgtgagtcagcttgggatgggtatagctcattgtttacaaaaaatatgaaatcaaaaaagaaaatggccattgcaacaatcattactataatattgataatcttaatttcaaatatgaatatgctcggattacagatatttattgtaggaattttttgttattttgtagtcacatatgtttcaaagaagaactttggaggaattacaggagatgtgatgggggcaacaaacgaaatagtaagactgtgttcactcttatctctaacataagaaattcaaacttttctataaaacaaattacatgtaaaacaagaaaaatagaatgaggaaactagccaatttatatttaatcaagtctaaccaaccataatccattgaatctgagcatatatgaaggggaaacttaatttaatgaaacttaatgcagttaattaattggtaattaaattgtcgatttgaacaaatagtaaatatgctaataatagtaaaactacctagaaaattaagtaaagattgtataattgaggagctaatttaattagttgccaaattcctaaatcagattgacaagaaaagagaaatgattaattgtgttctaatgtgtggaggaaaaggaagtagactgaatgcaaattccatatcaaaagtagaaaaacccctattagaattgaagaacaaatcacttatcgagtatatgatagaggcgatacaaaattcaaaaaagaactttaagatatatgctgcggtgagtaagaatacagtaaaaaccaaagagttcctaagaagcagatactttaatgttgtaacactggtagagacaactggtagtggattttccattgattacctaaatgtactccgattcttcaaaagtaaggaaatcaaagagaaaaatagaactcaagattttgtaaacaataaaatattgtttttacccgccgatctacctttgatatcatctaaaacactagatgaaattacagatttaaaacagatttatcccagtatagccatagttgtagacaaaaaaatatttattcaaaacaatttcgttccctcaacttttgtaacagaaattagtaaaatagatcattgctatactgggatttcgttacttgattttcatactgttgccggattggagcatgtagaccaaatcatagaagtgccaatgattatgaataatctggaattagtttataatataaacacgatcggcgacttgaaaaaagcagaaaaattattgaattgtagaatttgaaataagtaaaaaataattaatccaaggtttccaagatttttcccaataatttggcctggccaccggtattcaccaaaagttcagcattacaagacggacataatacaggttttgtactgtaagtgtacaagaccttaatatttttacatgaattacattcaacttttacaaaatggctacgaggttttgggatcataatgttatcttttttcataatcattcactcctactaagcttggatctccaatttcctaattcgcatcccttgtttcatcgtcttcctttggcaagttttgcaagtatatttcagggttacttttttagtagttttagcagtcctttttaattcagggaatttttgaccaccatagccttttttatcttctgcgtggcgcctagcaccctgagcaccctttctatctttaccctttttataagtagaaacagcttgagtagtatgagttttacactttggacaaaattttcgcagctctttctgcatcttcatatataaaatcagttcgatagggtaatttaaagtaaatatacatagtccttaaaacttcaagatttcagaagaatataaaaagtattgtattaattacaacgtaaaatattatagtacaacaattgtttttttaaataatattgttttaaagacaaaaataatacgatacaaaccttatatacatccatgatctataaccctcaatgttgtcattcttacaaattgtgatagcgcctgaagcttttggagtttggataccgttagcagttggtttaggaattgggttaatttacgcattagcatcaatggccagaagggcaagataagcccattaatttttttagactagaatatttttttcaaactcatataacaatcgagagataattatttgggattctaatcccatatctgagatagagaactttttgttaaaataagaatcaatattttttgagaaatatccctttggaaagccacctataacaacacatccatttgtatatgaagctaagtcagagcctattgattcaaggcttttaaaagtacctgttgttgaaaagccccatactatttcaggtttaacaaactcctttagaagatctccaaaattagtattaggtcgtagatccaataataattgcccatcttctgagattattctcttatctctaaaaaggtttaatattagaccttcgaatcgagagtaagacttgggaagcctaacattattccctattaaaataacgttattatcaatcgtatgaataaacaccctaagatgatttcttttgtatagaggagtagctaatgcattcagcaatgcaatgtgaaggatatcaggtctccccctcttataatcctcgtccaatttagcggacatcatagcaaaatgatgaagagatcggtccaacaagatttctccaggttttttaccactattacgaatttttttaagagaatgatgcttgaaaacattgataggtatagtttcaagagaagtatccgctattatcaaatttaacaaatgaaactgatttaaagagaaataattattatttaaagatatatgatgcgaaaagcctatcagtcacaataaggtttgtcatgaagaagagcgttataaaacaaatagcaatgcaaagagtgaaggttttgattaatagagcactatattctaaggatgaattctctgaccaccacattgtcattgctaaaaaaatcatattaaagtataaactaaaaattccttttgagtacaagcttctcttttgcaagaattgtaagaactttatcatcccgggtcgggattcaagtattagggtaggaaggtcaaccacaaaggctttgagaataacctgtaaattatgtggccacacttatagaaaaattattgaaaaacccaatcaatcctgaaattttatatttttggggcaaacaggtagcaagataaagaataaggattataagggaaaattgatcaaaggaatttgtaatattaaatggcaaaggtatttgatgttccagcagacgacttgatattaagattatcagatcaacttaaaaaggataagaaaataaatcctccagaatgggctagttacgtgaaaacagggccacatgtggaaaaaattccccaaaacagagactggtggtatacaagatgtgcatctctagtaagaaaagtatatttacacggtccaatcggaatatctgatttaaaaagctattatggaggaagaaaaagaattggctataacttagatcatcataaagatgcaggtggtgcgatcatcagaaatgcattgcaacagttggaagcatcaggatatgtagaaaaaaagggcaaaggccgatcaatatcaagtgaaggtatgaaaagagttgacagactagccaccgagatttttaaagatatatctaaattaaataaaaatttagaaagatacgcatagaggatctagtatgtctggctccccacaatctcatcagccttctgacgatgaaattagaaggcagcaggctgaagctgaggcaatgaagcaaaaagccctggcgatgttattagatgccgaggcaagacaaagacttacaaacgtaaagatggtaaagccagagcttgcttcagctgttgaaaattatctattcaacgcagctactactggaagattaaatagagcaataacagacaatgaattaaaacaaatactttctacaattcaacaaccaaaaagggattttaaaatcaatagaagataaaatttgaaacaagttcttaatttttttgcatatgttttaaaggttattatttagtaacctttgattttgagttaactatattaagcttttaaaatatcttctccccatgaaggcagctgtttttagagaatataacaaggatcccactaaagtagtaaaaattgaagacatcgatgtaccaaaaattaaagcaaatgaagttttgataaaggttgagtcggcatcatataattataatgatttatgggcaatatggggagacccagttaaaacaccacttccccatatttctggaagtgatgtagctggaacagtagttgagataggagaagatgtaacaaagttcaaggcgggcgacagagtcgtgtctcattctaatatgagttgcagaatatgtgagcaatgtacagcaggaagagagtatgattgtaaagagagaactatatggggattccaaacaggtcccctgtggggaggttttgctcaatatacacatttgccggaagtaaatgtggcaaaactgccagaaaatgtgtcctttgaggatgctgcagctatgtcaatggtgggaatgacagcttggcatatgcttgttggacgagcaagaataattcctggtcaaaccgtattgataatgggtggaacaagtggtgtaggaatggtaggcattcaaatcgcaaagttgtataattgcaatgttatcgccacagcaggaaaccaacaaaaaatggataaatgtcaggaacttggcgcagataacgttgtaaatcacagagaggcagattggtataaaaaagtaagagaaatcaccaagaaggaaggagtagatatagtgtttgagcacattggaaagaacgtttttcctcaagaagttgggctgttaaaaatgggaggcacactcgttgctacaggagctacaacaggttatgattctactttagatttaagatacttattcttcaagggtaccaacttacttggttccactcaggggactaaggcagaattagaacaggtcatttattggacaagcaagaataaattaaagccactgattcatacgacattgcctttttcaaatatggtagaaggtcatgttatgatggcaggggccgaacaaataggaaagatcatgaccaatccccaaaaactttaatttttttatatccaattgtaaatacaagtatattgtgggaagatcaagaagtctaatttttattcctggaaataatcaaagatttttagaaaagtctagaacaataaattcagacattgtctgttatgatttagaagattcggtacctcaagaagaaaaagaaattgcgagagaaaccgtaagaagcacaattcaagagtttaataagattaatgatataaataaggagcgaatactggcggtaagaatcaattcaccaacatctaatcaggtggccgcggatttgaaaaaagtcatcactccgggaattgatgcaattgtaattccaaaggtcgatgatgacaaacaaatagcagaaatttcaaaaacaatagataaagaagagaaagaaaaaaacatccaaagcgggataatcaaaataatcccgtcgattgaatctgctttgggagtagttaacgcgtataatatagctaaatcagaccaaagaataaccgcgttggtatttggtatttttgatttcttacacgatatgaaaattgataatcaggatatagagacgatcaccggttttatgtatgccagggcaaaagtaccggtagatgccagagcagcaggcattgactctattgattctatctggcaagacattcatgatcatagcggcttgagaagagatcttgagcagggcaaaaagatgggttataatggaaaatgtattattcatccgtctcaaattgagcatgtacatgcagtatttagcgcttcatctcaggacattgaatgggcagaaaaaaatggtacaagcattagacagcgcaaaaaacactagcgcaggtgcagtaaagttagatggaaagatgatagatgccgtgcattacaaacaagctaaaagaattttagatttgagatatgaaaaataaatcatcatcatcatcatcatcatttaatggattgtaacaatcttcaaattatattttcagttactatcaagtgtgtttaccggaattacagaatatttatgtgaaatagaaaatataagtagaagcaaaagtaaaaagaataaaaaaaagagcgatagtaaatcaaatcaccatatcgaaattactataattttaccagaatcaaaagatatcaaaattggagatagtgtatcactaaatggagtatgtttgactgtttcaaagattaacgattccagagccacttttcaggttattgatgaaaccatcaatagaactaattttattgatttaaaaataggagacagagtaaatgttgaaaggagcctcagagttggagacagactagaaggacactttgtgctaggtcacatagatggtacaggcataattaaaaaattagttcgaggactcttgggaagtaggattaaaatagaaatattaaataaagatttattgcctcttattgctcaaaagggttcaatagcaatagacggaataagtctcactgtcgtaaacgttagagatagtattgttgaaatagcattgattccacatacgctggggaacacaacactaggaatcaaggaagctggcgatacagtaaacatagaagtagatattttatcaaggtatatagcaaacgtctaccagctttctggtaataacaagaaaaatagtaagatatattaatattaatatgtaaaaaaatatgattgacaaagatatcagaagccataacttcgttaatgaatggaaattttgttttaattcatgacgatgatggtcgtgaagacgaggttgacatggtcgtatcttctaacaacataacgccagaacatattgctacgatgagaaaggatgctggcgggttgatttgcactgcaatatcaaaagaaatagctacgaaattgggattaccatttatttttgatgtactaaatatttttgggacgacgaatcaaaccatttcttctattaatagtaacagctcaccatatggtgataaaccttctttttccgttactctaaaccatatcagcacttatactggaataactgattgtgacagagccttaaccatttcatcactagcagatatttgtaatgatttaagtgattatcagaaaaatcagaattcaaccattgaaaagtttcgtagtaactttagaacaccgggacacaatcctattctaattgcttcaaaaggattactcaatgaaagaaaaggacacacagaaatgtcaatctttcttaccaagattgcaaatatgacgaacatcacaaccatttgtgagatgttagatccatataattacaaagccttatcatacgatgatgcagtcaaatatgcaagtgataacaatctagtaatcatagaggcaaaagatttgataacatatgcagaatcatttgaaaaacagagatgaaaataagaattggaattgttgtttcagaatttaataatgaaataacctttgccatgctaagtgaagctaagagatatgcaaaggaactttcctcaaaaataacatacgtttgctttgttccgggagtatttgatatgcctatggtagtacaagagattttaaaaaaaaatgatgtcgatgcaatagtaaccctgggagccataataaaaggtgataccagtcatgacagagtaatagctaacagcacaatcaagttacttagcgaactttctttaaaatataataaaccaatatccttagggatcactggaccagatatgacctttgatcaggccgaggcaaggataatttcctcatctcatcatgcagtttataccgcgattacaatggtgaagagactaaaaagaatgagagattataaaatgaaaagcaacgatacaaaaatagtagattagattggtttgtcaaataacagtaataaaattagagggttacggtgcgtggactctaaccttaggtagtgacagggaatatgcactacaaattctgcagtcaaaaatgtatgcagatctccaaaaatatttttctgctaaaaacggattagtattttctaaccgatttgatgagtttattgcagtgacaaatcaaataagcttattagatcataaagaaatctacgatagactttcgataaaaaatgaaaatataaagatatcaatgacgatagggactggaaaaactccactagaagctgacaagaaaatacacgatataaggaaagatgcaaaaaacacgatttttccgaatatttatggtataaaagaaaattaccagatacatagaggtcaacaaaccaacgaaatacaaaatcataagagtcttgataacttgaaaatactacacattgacgtcaatagctccactttgatagctgaaaatcattcaagctatgaaattacaaatttaataatgagactatatttagcaatatcagattcattcctcaaggaagaaagtttgactttcttcttgggtggagataattttatgattgtcgcaaaaaacgatattcatattaaaaaaataacagaaatagtaaattttttaataagctcaacgagaataaagctgaattgcggcataggaaatggcattaacgcgagaagagctgcagagagagcaacaaagtcgcttgatacaataagagagtacagaagaagcggaaaaataataaacgtttttgaatcgatttgaaaaagacattaataaaaaatgcatatattttagttggcaaggagctgcaaatagttcagaatggatcaatagtaattaacgaacatggaataattgaagacgtatcctcatccaaaagaaatccagaaaaaagaggcaaccctataactaattcagttaataaagataataaaattgaagttattgatgcagaaggttttattctcctgcctggattaataaattcgcatgttcatataggagacgccataggaaaagacatctccgctgattctgatttaaatcaaagaatacatccactgtatggtattaaaaggactatactggaaagaactccgagatcccagttaactcaaatgataagtaacgcagcaatgtcaatgttacataatggaataactacttttgtggatttcagagaaggaggactagaaggaatattcctcgtacaagatgctgtaggaggtttacccataaagaaaattattttgggaaggatcgattttaatcctaattacaaggatacaaagaccgtcaatagatttccagaaaatggtaaagatgattggtcgagtaaaactttaaggtattctaacctaacagatgaaaatgataattttagtcaaggtagtgagataattaagaattgcgatggctttggcatcagtggtgcaaacgaaaatactgatgagatgttacggttgtataataaaatagttataaagcataaacaaaaacaagctgaattcaaaaatcataatagagaccccttgattgcaatacatgctgcggaggcccagacagcagtaatggaatccacaaaaaactataaaaaaacagaaattgaaagaacacttaatacattaaaccccgacatatatattcacgttaccaatccatcgagctcggatctgcaattattatatcagaatagaaagaaaatagtcgtttgtccaagagcaaatggagtgcttggaacaggttttgtaccaataagaaaaatgttagaatataaatttgaattaggtattggaacagataacgttatgcttaattctccagatatgttcagagaaatggattttctgataaagagtcagagagctgttgaaaaggataccagatttctcgatgcaaagaaggtactaaaaatggctacagtaaatggtggtaaaatttttaacttaaataccggaagtattgaaaaaggatttcaagcagatttactttttattgataaatatgatttagatctatatccgattcatgatccccatatgtcaattgtacacagatgcacagagagacaattaaaagcggtgatgattaatggtaatttcgtaatggaaaaaacagtaataagataaaggtatcagagagaaatgaaaataatactaaatgcagctactagtattgacggaaagatcgctactgttaatagagatacaaaaatttcatcgatattggatctcaaacgtcttcataggttaagacgcaaatctgatgtaattttggtgggtatttcgactgtcataaatgacgacccgttattgacaatccgatatggcatgaataaaaaaggcactaaaaaccctattcgtattataatagatagtaaagctagaattccccttcattccaagattgtaaaaacggcaaatcagattgaaactagattggtggtaacctctaaagcctcatctacaaatttgaaaaaattggagaagagaggtctaaaaataattatgttggaacaaagaagagaagacaaagagaagggagaagaaaacagcgcagaaaaagtggatttgaaaaaactatttaatcaattagaggaggagggtgtatcaaatgtcttagttgaaggtggaggagaaattaattggtctataataaaaaataacttgtttaatgagataataatcacgatatctcctatgataatcggtgggaaaaacgcgatatccttagttggtggagaaggctacaagacaataaatgaaagtttaaaagtaaagttgtcaagaatacataaaaagagtaatggtgaaataattctacattacaaaaatattaaaaaataagaaacttattttacagtatctgaactaagttgttctattttgtaccttagagcatctttcaatttgctattgtccaccatattcaatggttctttacaattaggacatttaaagaataactctattgcataatcaaattttattctatcacaagcagaattaccgcaatggtaaaattcagatgattcttcatattcaagtctattttgcaatctttctaatattttcttcttctgattatcaatgaaattgtctacattgtctctctttgctctccacctatacacaaaccacccctttttctcatctttaacgcgtatacccgttatcaatgcctttccaaaaagatcatagagaactttccgtataatatttattcgaagacctgttgcaatagctatttcttcgtcagttgaatcttcagtttttaataacgctttggcaacatgatgatattcttcccctccaataagagatgcaatttttacaaaaggatcttcactactgtcaacacttcgcataaagatatactataatagcgtgactaaatgatatatagttttcctatgactgtgagaaattagggttatccatagaataccttagaatttgatcgggttttgacgtattattataattataataattacataattattataatcatactatattcatcaccaattcatgttaatgactgtatactcaaaatatgcaataaatctatggaaaacgtaaatttcagctagtacccataatacagtactttcttcatctagatgtctgttgaattttttgtccagtcgatttgcatctgcgacttgtgttattcaatataccagataaattattccaataataaatagaaggagtatagggatggaggggcagaaagttgggatctatactatttcgtagtatcaaattgtcattaattacaggtactgtatcctgattggaatatagaccaaaaaattggtttttacccacgcctatagtaaaaatcaagaaaacaattaacagtgaataaattagccaacccaattgcaaaaaaccaacaccctactcctcactttgccgatatacatgtgacctataccgttaaagaggactaatccaaagaaaaaagccagaataaattcgatgccaccgcttttaaagggcataactgcccgaaccacatttgataaaaaaaagaaaatataaaaatatagttatggtaatactaattcaatatttattcatcgatcacattagactgttcatttgggatttagatcttccaaaaactggtaaattaccgagtaatctttatttcctctatcttcattgttgttagctgccctaaaaagctgttgtgataaggacgtcattggtagaaaaagtcgcaaattttgtgaagcatccatcattaaatctatatcttttaacatgttttttaggaagaacgaaggagaataatcattccttatcatcatttgacccttcctttcactaattccagttttaagtttagtaagattaagaatttgtaaataaagattaggatctattccactgtgtttggctaaaatcaatccctccgacaaggccaaagtaattatagcaatatttagattaagtgccaatttcatagaatttgaaactccattgacttggccaacatacaatacatgtttagaaattttttctaaaacattacaaattttttgaaaagaatctttatttcccgaaacgagagaaataagttcaccatttctggcatcatttggtccacccatcactggggtgctcagcaacgtaaatccatttcgcttgcttacaagatttgaacaatacaaagattgatcagaattcactgttgtacaatccgcaatgattagttccttgttactacattgcattataccatcagtgtgaaatagaatttcctttaatgattcaaaattagtaacacatgttattattaaatcactatgttcagccacggttcgggcatcgccaaatgtttgtgcacccttatcttggaagtattggagtttggatttattcctgctgtaaacattaaccttagtatttaggtctattaatcgttctattattccagtccctaacataccaaccccgattacaccaatcgccatatcgctatttagtgacacgatctttgagcatattagaacagttttaaatgtatgtgcaattgtcaaataagaagaataaaatagatacgaacttgatcacacatagtatatgacttttacattattggttggtaataactttatatcaaatagtccaagaagcgtaatgtataacgaaaaaactttattcaaactagaacaaatttcagacttacacaatccttctatttctattaatatagtcgatgctaacaataaatcaataattaaagtcgaagagaacgcatgcaagtattgttctccagatttgataataaaaagatcccagcacgaacatattttgattgtggataaaactggtgagatagtatttgaatcaagaatactagataaaaaaacaattctagttagtggaattttttacgttgatgatctaaaactcacaattacacaaaactatattattcttccaacccaaaagtggataatgcatgataaggtcgatgcaaataataaagatataaacattacaaatgaagggataagaatatcctcctgacgatattaatagattggtcataccatatgaaaataagaaccgatcattagctatccacgcttctctttgtccacaatccaattacccgacttttttttaagaattatggttccaataaattttccactgctataaactttgcaatattcttggcttattccaaaaaaggcctcaacaatattaccttttttgtgatatccagcctcaattactttgatatttaattttgaacttgatttttttatgatgtttctagctatactccaatcaccattccattccaccaaatcgaaatctccaaaatttaaggtatgcaattggttgttcgtaattgaaattttaaatgatttattatttttcatgataaattcgtttatccattttattgctgcatcgccctttcccttttctattccaaaattattcgcactagccaaaaaatatcaagatataataatatggttctctataaatatataaaaaaataaaaaacaggtaatttgttaaatatcaagtaagtttgcttagacatcttgtaatttgtcaaagggactattttcactgtattaaaggaagagacaccggaattaatgcagagctgttcaatatcatgagcagtgttggcctcaaccataataatcaattcatgttgaagcatggacatatagaatcctttaatgctcttcacaccatatttttcggtgtttgactgcaatctatcgtagatccctttaaagacctctttatttatggtattatttaatggacaagattcgggactatggatagcaagttttccaaaaaagattgtaagtaatcatagttttaacaaagtacctatatttatagaaattgaaaaattcattcgactccgtcgattaataatacaatattaaagggcattttattttcaccgattacaccatatcttttgacttgtggtacacatctagaacatttacatcaataattactaaccatggttatgaatgaagatgacttcataaaatatattatttaaacgagagctagtgcaattgttaaaggtacttattgggagaagtgatttatacgatagagcagattcgattttaacaatctaatgtacttttcaaaaaaatatgaaattacaaatagcagtgatcgataaaaaccataagagaggactaaacagcccacaaatttcgattatgcaaaaaaagtgactgctaatagataaatagaccttcaattaaggtaattatgaagggcattcacgtaagataaattggcaagcgaaacaaattataagaaaacattaaagtacctaataattctgataatttcgagtataatagttgtcgatttattcataatattaattcctgacggacattctcagcatgttattgcaataattagtcttaatattacaggtgctactgcaacgggtttgggcgtaatcgcagtttttagacatggaatttctggaagccatggaaaatcttacttgtttttaacagttggtattgcattgtggtttgcagcagacttgggaataatgtactcttattttgtcttaaatgtggatgaatttaagcaaataactctattggatatattttggttaagcgggtacgtgtttcttatttttcatttgatatctattattagaacaataaggattagaaacttgtctataactattacaattatttccgcggttattataggatttgttataatcaattttgttagctttctacctataccagaatcgctctttaataacgaggaaataaatattgctgaaaaaggttatggattgtcggatcttgtaattacaatactctatccaattttagatttatgtttaattgttccatcaataacaatattattgaatgtatacaaagagtttcaccattctgtaccttgggtacttgcttcgatttcgttattggtaaatgcggtagcagataacggttatacaaatgatttcatcaacggttcagcttctgctttaccgtgggatttattttacattgctgattttataattatgtcgggagctctattttggtataacagatatcatatcacagaccacctttcaaaagagaacaaaaagaaggaatacatcaattagctgattattgtttcttcttttaacaacttaataatgggtatatcattcagttggccttatcaggatctggatcaatgttttcctctttatcctcagcttcatcatcttcatcaccttcaaagtcgatatcgtcttcctcttcttctatatcgttatcatcgtcttgtagttcatgggtttcgtctttgatttcatccctttcggcatcttgattactcatatgtcgaaacctactatacatacatgatataaaaattttgaataatttatagatttaatatattaaggattatgaattattgtaactatttatagacacagtgtttcaggtatacttatagcgcatgtgttgtttgaaatcaaattattgatatcgtcaaattttcctccatttcctatgtttatatctacaccaaaacttcttgtaaactgatttgaattcaaggtagcatttgtacttttagtatcaacaaatattccgtttaagctgctggatatatgattaccatttattgtattatcatgagaaccaaatagggaaatagaagatatatcattggaatcaaacctattatctgaaatgatagaatcatcaattgagtagaattttattccggcagtattagtatagaactcattattgtcgattaaaattcccgaagaattggttgcataaatggaaatttcgttcccggtgaaatttactatagatacattaacatttttggagttatttatatagactccaatttgaaaatgaccaactattccattacctttcagggtaacattctctttatttgatatcaaaatacccgtataaggattcaagtaacccgaacctaaaattgaagagttatttaaataaatgacagtattattggtacttattgctatgccattcttaaaatcacaatccagggacgtgtttagggtataaatcttgccaacatacgaatcacatgtaaatagactcggatctggattcacattttggccattagcaagctcgacatacagtagaataaaaaatagtgcaaagataactacacacgtggaaggaataagaatctctagcaatagcacacaattgattgaaagatctgttttatttatttagcgtttaacatgacaagtaatttacagttaaggctctgatttttttagaaaagttatggataaatgaaatcgaggcaccattccagacatattcactaaaaactttgctataccactcccgccccgatcctcgaataaacagatatggaaaaataaattccttttggcataaaataccgctaggaccgtaacaatgatttatgtctaatctaataaagcaatgacaagctaaccaaaaaaacacagaaatggattatttgatctttaaagaagtctctatatgagataagggccgttgactttgagccaccttattttgcttttataatcattcatattgtctgatactatttgccagaatcgcttagaatgatttctctcaatgagatgacttaattcatgtaatacgacgtattcaattacatggagtggagcctttaaaagatgaatattaagatttatcatatcatggtgagtcgcactgccccacctgcttttcaatttctttagtaatattttcttaggtgacacatttagaagtttagaatactttacaattaaaggagtaataatcgaataagccatgctaaataaccattgttcataaattcgcttgacgtttcttttattcgtgtaaataatgaattcatcattagagaaactcaattgattcgaattatatccaataatccttaatcgacagttccttccaagatatggtaatgtagaattattttggtaattgggtacttttattactgcatcggggttatcttgttctttgattttttgaattatccactttgcctttttacttactagtgactcgatttctttaatggatgttgatgttgaagttcgtacatacacagtaccatattcaatcaagatttcattagtttttcttcttcttcgtgtcctaattatttgaaattctaaaatatcgttgtcataaataattttatgtttgaggtttaaggaagatgttacgatcataaaatattggctattaacaaatagaatcttgtttttataagtttaaggatcatagaacatgtcaatgtcaatcatcaaggtaaaaaatacattattcttactgcgtatttatttataaaatatcctaaatatctataataatcaaaatttaagtaaaaagtactataaacgtcaaatgaaatccattattgatttttgagaattttttttatctctatctatctttgacagattggacaatttaattccaagttttctcacataaatggaatttacatcataattattagtaccttgaatatttccctcggtattctcttcagtgctgtcatcatccttgaatttgaatcggttcaacaatgttcccataacagatcttatactttctttattcatctgatatgacggaaaggtaatttctctagtttcaatagaaaaattagacctaactaacttaattccaacagttttaaactcgtatcctttccttcttgctcgttcataaatattatcagtcatatcattaacaagaatattcaaaatatcacttttattaattaggggttttaacaatgtctcctccgtacttaaagacaagttgttttctctaggtataacaagttcattttctttgccatttgctatctgccacatccacaatgcttgttttttaccaaatttatcaaccagtttctggatattcgaatcggctaattgtcctatagtctcaattcctatgtctttaagtatctgtgtagtttttattccaacgcccgatatgctatctactgtcagtgtagataaaaatgcgacagtattttgcggataaacaatagtaagaccatcgggtttctgaaaatcagatgcaattttggcaactgacttgtttgacgctacaccaattgagcaaatcagtccattgcattgtctcctgatagaatctttaatatttaatgcaaattcccggattgaaagctctttttgtatgtcatgtttaacggtgtaattatgaggcatattttccacttctttctcatcgacaagatcatctattgaaatattctgttcttgatactgcataatttgtttagtacaatcaatatatgcctcatctatactagtttgttccaatacatcggcatattcctccaatagccgcattacctcttgagagaccaagttgtaatattctttgtctacaggtttcagtataagagtaggacacaattccttggcttttgataaagacattgcagatctaacaccgtattttcgtgcctcatacgaacaagaagcgacggctcctctagttatcaatttgccttctctttcaggagtcattattacggcatgtgccttatctttgagagaaggatctctcatttcttcacatgctgggaaaaaagcattcatatcgatgtgcatgataatttttcccggccagatttgagtagtagaagaagttttttgtaaattttctgaagagttagcactgccaggtttgaaagatatcaaatcttgaataagatgagccgcagaaggattacggagcacaataattgaataatcaatagcctcattggtatgctttggatgacctgtttccctttccttttgctttatcaaattgatccatctcgaagctttgtcattatttatagtgacattatcaaggttaagaaaaataaaattagaagtaacagcgggataataatattgatgtccagaatttgaccaagcaaaagacgaattatatcttcttaaaatattgtaagttaattcttggtaccacgtattattgatcccaaaatcaactgctgtagaaaatccgtgatcggtagcgtaatgtaatattccctccaaccacgtacgtccagtattttgtaacgatacttgtggaggcggtgataataaaattacaagaattttttcttctaacacatttaaatctcctaaaaaccttccaacgggttcaaactggccagatgttgcagttttgttaataagattttgaggaatttttactgtgaatcgaaaatcttccaaagtttcatttgcccatttttttaaggcaacagagcctggagggaacaagctcttgctaaggtcaagatgtacaagattgaattgtttagaataatacgaaagataatgcgtggaatccaatccagaaggataaaaattcttggcccattcctggcccttccatccacaacaacctatatagtatttcaatttacctttctctttttattttctattctaccaagattaatcttactttctctaatcaggttttccctgtctatattcttgagagaaattatgaagtagagaaggagtagagtaaatagcaagagtcagatagaaattggcaaaataaaaaacattcaaagtcaaattattttgaaatgagttcaagcttttaaagactaattaaaaggaatctgacagaccataacaatagcaaaaaatggttagttgactatatgatgataatcaaagattattataccatttttcctaaagtgtaatagatcaaattcattttgttaaataataaaaattaatagaattatttagcattattatgatatataaataagttatatacaaatctttaaaaatagtaatattatatattattgtttaaaaatatacgggtaaaagtttgcagattaaacatcgattaacattatctgtaatgatactaacgattttactatttactgtaacacctccttctttctttgccatcattggatatagtgtatatggagaaaaggattttgatcaatctcaaagaaataaacaaaactcaaactgcgaggcaggagaggataacaacaattcatgtaacaacataagcataaccagacaaggcagtggtgacagtgatagcgcaggcgacagtagtaatggaggaggaaatcaggttcaagtatctaaacaaaactcaaactgcgaggcaggagaggataacaacaattcatgtaacaacataagcataaccagacaaggcagtggtgacagtgatagcgcaggcgacagtagtaatggaggaggaaatcaggttcaagtatctaaacaaaactcaaactgcgaggcaggagaggataacaacaattcatgtaacaacataagcataaccagacaaggcagtggtgacagtgatagcgcaggcgacagtagtaatggaggaggaaatcaggttcaagtatctaaacaaaactcaaactgcgaggcaggagaggataacaacaattcatgtaataactttgatattaaagaaatgattagcgatagactcaaaatgctaagacaaacttaagcaagtatttactcttttgatatatcatgctgaaatatttttgaatactatttttgatagttttcagatctccaaagatattcgtaaccatgagtatagatatctatgatatttccaaacggatcctcacatgatactaccttgaaaggcttgccagttgttaattcccatatttgagttctttgtttgccaccactattaacaatcctttttgtagtttcctctatattgggatctgttatgcatatatgaaagaacccggtcttccaaaactcaaaattttcctctcttttttcttctttaggctcaacgaattcgaaaacttcaaacccaatttgattaccaaagcttaaatgagcaatctttaatttcttaaagtcctggccgaatacatcttgaaagatcttgcctatatgagtgtcgtctgcaacggcttcgaaaggtggtttcactaaattaaaacctaaaactttggtgtaccactctactacttcttcaatattaatcacacttacagctatgtggtttaaattactaggatatggatacaattttgatttattggtaggtatttcatttgaatgcaaagtcattagtatagcaaatattttttcctcatagtttaaattcgtttctggaattaaaattacaattaatgactaaacccaaactaaagatggtgatatctatacttccagtgattctgaatcaactattggaattacataaaattttactgatatatgtgcatcatataatgcatccatccgttatatctatctgataagaatcataccattaatagggcacgttaattcaattaagaaacaactcaattttttgaaattacttctttagttgtttataatagaaacggtcaaggtactttcttatccttgatgctacattctttcctttattatgtatgaaattagaaacatcttatgctttaggacaatcacatgtcataaactttctcgagagtaaaatatgaattttgacattgtattttaattctattaaacttaataacaaaaggtccacacatttcattgctcagatctgaggcgaccttataaatattaaaaaaaatattgctacctgtgaagggtaacactatttatgttggattgtatctttacggagtagacattatttgttctcttcgttaattagttcagtagatatagttatcttgccatctactctccacttagcacctcctagttgttttccatcagggccataagcttttgggatctcaacttccaaattttcaaaggagtaagtaacttgcaaatctttgccggtcaatttgtctatgattcctgaaattaattcagaccattgtgaagtgtgctctttagacgagttctttgactggtcagaattactatttttattttcgttttcaccgttattagaaagttcgctcatgactattcatatttattaagctttaaatagatatcacctctatgaaatacatctaatctagtgagttctcctgatcgttttgaaatgaaagaattgtgatctctctttttatgtttaaaaatgataatctatgaatatgtagttcaaagcaatcgcttcacaggatcgtcataaattattggatgtaaatgaagtcaaggaccagctaatttaactaaatgtactatatgtactcatcatttgttcgcgtgttagtcttactggtaatattctacctggtttcgatcggtatgatggaattccgactccaatagcaatcaatgtttccttctgtttagcatgaggagagaaaaattcaatcacttcattatcataaaaagtagaacctgatgctcctaggccattggcataggataaaagataaatttttcctgcggtaattcctgcttccatctgtgcggctctataccccctattacccaaaacatcaagtacatgtttaagatccgtcattatgaatatcacagcgcttgcatctgcaaaaagagattgatccaagcaaagatgtccggaaatattacgactcagtcgattctttagcaagtcaatggaattacttcttgtattaaaaaaatatcctcccttttcaagcccatcaacagcattaactataagatataaatcgattaaactatttgaatcatttttgtaatccattggagttcctctagttgaattcaaaaggatatgagctagagtcaaaaaggagatcgatagtcttgaaaattgcctagttgaacctctcttcaaaatggtgtctccaataccacagccattgtcatgcatggaaggcttgggcaaagcatactgtctcaaagtaccaagaccaggattacctttttgattcatttcgtctacttctgctttcctctgctgattaatccagtcggatacctgagcattgtctaataatttagagctgtcgtaagctttccaaatttcaggataatcaatttcttctaatgaaagaggataaacttttggagcaagtttatcaagaatcttttgacgaagtgattgctctgggttgactttgtcattcaaagagtttgcatcaatggctgcaatcaatatggaggcctctttttgttcttctagtcccagaaatttgtttaactggtcatccagaaatcccataattaatcttgtataaagtttcatagagccagtaacggctagcaggttagaaactataacccctgcatcccaaaaccaatgtcgataagatcgagattgatacttccatgcatttctccatgcataagaagtaaagatcaaggaaagaggagatgttgtaatatcagtattattaccagcaatagatcctagaaggtttctataatcacctttatgaatcgcagtcagactgaactcacctggattaaaatgatacactcctgcatccaattcagcacctagacctttagtaaccacgtagatttctatcggataaagagctcctgtggcagaagcagcacgcatataataatcaacagaattaaaccgcatcacgcgagttataccataggaataaaataacagggatgataaatcagataaagtaataattttagaattatccttagaagaagctaattgagaagggacttgttttttgtcaccaaatgatttatcgttactatataaattactaaccgccatagcagcattcaatgtgggatgagaaaaatcagtcggaagaggcaaagaagttaagtcttcatacactttgaagggtttaggccgattattccaattcaaaaagtaatttgaattcataacactaaattcagaatgttttgtcatttcatgatagttaatcgaatatgagatatcataattcatgtgataaaaagttataacaattccaacgtatttaaattagaaaattcatcataaattctacgtcatcaatattatcttgtttgttctactattactatatcatttacaatagtaacagaactcaaggcactcataacattaaatccattgtaagatcaagaaggaacatacaggttaatctataaatcacaaattataggcgcatcttatctacatgtcgcatatttacagatcataatggttcttttatcttttgtacattgagcagattgaattctgttaaaatttgattccaaccttgttttccttaagatctgataaaatttatttgatatgagattcgacaggtttcttcattaacaacatacttaccttttctactatagtagttggactgattggttttaccgcaaactcatctgcaccataatctaaaactctagtcttactattttcgttttcagcaagtgcaaaaatctttacctcaagtgttaatttccgtatatttacaattaacattgggcctctatcggcggcaatcgtgccgttaatcaaaattgcatccaccttattattcaattccttcaacttatcaagaccctctatagcactagtagttttgtacaccttaaacttggctaaagtgaaatgacctgccagtatactagcgacatcaatatcatcctctactaatataatagaatgtttattatctagagtggattcggttagcaactatattgacaaaccacatctcggataaattaatctttctagaatcacgaaactagacatgtatataattggttggttggttttattcgcaggtaattcaaatttaaaaataataaaggttgaacgggtttctactcagaatctatatcaaatgcaggggcgggaacaattaccaccggtttcccaatcgattttattaaagtattttgaatttgaactaggttttcctgtatggcagtttcattgtcgtcgtttaatgccaaaatagcatcatttgtataatttaataatctttcattcatcaatgaatctgaagactctattatagaatcagtttgatttgcctgtgacggtatttgttgttctgctaaggtaatttcctcctgtgggggttgactcatattttggttgatttgattattagagtcatcagtagcagcagtggtatcagtaatattagtggtattggtggtggtggtggtatttgccaccatttgaccataaccgctatatgttgttatacttaaaatcatcatcaagcttatggacattataattggagcaactattttcataaacaatttcactacgatatgtatgtcaacaatattcatataaatgattggactaacaattgtaacggcacaaaacctaacaagtatgattcggagtaacgttatttgttaaggtccatcatcaagaagctttcaaacaggatgtgcatatatcggttgttagtttaactgggaatgtcaactcataatttactcaaatttcatatataagagtaatcaagtttagaggttcccgaatagactatagaactctaatttaagtcgagtggcactgttaaaatattgatttgtaatgaatataaaccaaagcaaggttgaatctattatcaagtcctagagtcatcaaaattaaaacatccaatcaacgtaaataattgttattttaaaattttttagttactactaagtaaatgtttagtgacaactttactgaatatttttattttataaatagaaaaattgaacctaaaaatggatctaattctagtttactggagagaatggaaaactctcactgtgtaccgtttgcagctgatagagcattactctgattttcaggctctacatactgttcctgttccattccttgtccaaatgaagaattatcacctgctatggaagtgttattagccaagagttcttgatttccagcagtcaaattctgtaattcttgaatggatccaataccggaagatgtttcgttagatgaaccgccgctggaaccagtgcttgaagtttcgttagatgaaccgccgctggaaccagtgcttgaagtttcgttagatgaaccgccgctggaaccagtgcttgaagtttcgttagatgaaccgccgctggaaccagtgcttgaagtttcgttagatgaaccgccgctggaaccagtgcttgaagtttcgttagtttggttaccacccatcattcctgaagtcaaattactaaaggctgaacctatttgatctataatattttgtgcatatgccacctgaactatcggtataaacaatactgaaagcagcaataaagatagatatttcatgattatccttgtatatcatgatttaaatagttgtacttaattataaaatttgaaaataccgataaggtagtttagtattggacttgtttttcttttgtttctaccattgaaactaaatatcattttcaagattaatctaacctttacgacaaaattctcaatgattaaacaataataaaggtaaaatgccaaggttaatggaaaataatattacaccttactattgggaaacctccttctgagcaattattttagtgggttttatttttacaatgcattctcctttaacggcgtttctcttaccatatgtttcagcattctcttttcccatatatcgctcagctatacggctagtaagccttaaaagttcgtcataactagggttttgatctatttctgccattccattgattataacaaaagaaaaaggaggtttttgatcatctacacagaggctgactttagggttagaaatcaaatgttttgccttcactgaattataaaatgttgtgaaaaaaattgtaaaatccttattatcattgctactaggatcatagttgataaaaaaccaaactggagcaacatgaggtataccatctaaagttgctgtggatactttagcggtcatcgtaccaaggtttaagaagtttataacttcttctggattcatttgtgtcaaatcacttcacaaagagtattatagttctcatttaaaaacgtgaaattcagtttaaatgataaaaagactcactaaaacaatcaaaaactgtcaacttgaagaaaaaagattgctaaaatctaatatcaatatccgaattaacaaatgtgtcgcatttgaatgagtgtttgtgccagcattcaaatattgtttgttttatttgtacagtatttttatacttaattatttataatagtaacaatattatagacaatattgaaatcatcttctattatgatttaagagcaaatgtatacataaaaataatacagtaatgagtatcaaaactatgatatattaaaatttaggtatacatttagataataatgagtaacataacaaaaaaccataaagtcggaatatttgtaatgatgtctattgcagcagccttaatcggttcagtagtcacatttggcgacaacatggcatttgcaaccaaaaaacacaatgatgctgaacaggaaattgaacaagaacaaaaaaacgagcaaaatgcacaatgtgtatctggagaattcacattagcatcatgtaacaatgtaggtttattattccagaataatgaaggcaacttagccttaagtcaacaataagcctctttcttttttttaattttgctttatacataatattctacaaattaataatattttaaaaaaattagttgttacgagttttttcttgaatatcaagttatatcaaaaaaatatatattcatgatagaaaaggcatgagatttgaactaaagttttagaaaaagcaattgataaaatcaaaatgaatgatagtaatggtatcagcacttcagactacacacattcaaaaactaagttgagattcttgattccaaatcttcaattttcttccttatttcctttatttcaaataatatttcctgctgagtaacaggattagctatatccatttccagatgtttgtacgcttcctcagattttcttacgattacggctacgaaaatattaattactataaacgttcctattactatgaaactaataaagaaaatcccatataggggatttacaagagtagctggcgacataacttctatccatccctccagagttagtatttcaaataaggtcaacacagatttgggtaaggatccccaatgaactggatctatgtcactaaataaatgatatccagctataccatacatgaaaaagagtagggctaaaagtaaaaatatatttaccatacttgggattgatttcataattgtcatgatgacagcagacatttccttagatctgtttgttagtcgcgttactctcagaagtcttattaaacgagcgatagttgtgtatcctccgagaggcagcagagagagtactattattgaaaaatccaaaatattccaaccattcttgaaataagttgagaagtgtggataggaggaagatatttttaaagcggcttcgacaatgtaaacaaccaatactatagaactaataaattcaaaaattgaataatagtcattaaaagctggaattgtttctaatactaaaactgcggcttgcaataatattactaaagttatgaaattatcaaaggcaggataattaattatttttcttatcgaagtaagcatactatgtcaatagttctatttgagaatatttttaattttggatttgtggtagcagattataatatatgtctatgaatattactcttacttcttattcgactcctgcatggtctttatggtatagaagatacgcatcaatttgtaatattttatggtccactactatctaatagaatattcccgttcaacttaggctatgaagattttatatgtaaaatttatgtgaaaagtagagcatattggaacatatgaatatgattcaattccttcgccgaggttttgaatgaatcataactcaagataaaagactagaacggatcaatcatggtaatttttttcacaccgacatcaaataccatgtaaaaatcttcagcgatctggataatatcccccatagttatcttggaatgatgacgtttgtattttagcggaactccaaacggatttacctcttctaagaattttatccatactctccctggattaagaatattcttaaattctacttcccatactagttcataaattgtaaagagtgcttgtcgacttaatttacttgaaccaagtatgattgcaggattagtttctttataaaaataaactctgactatcataaaaggtaactatatactttgtatgagctatggggtattaatactgctacgatttaggatgaatctatactaaaatatcaaaaggaaattattgtgatgaggaaaaataatgtatctagaattccctcttcaatcaattatcctttattcttttattttgtttcccccagttcactaggtcgtgaggatcaaatattcatcctttggaagttgaagcaactatttatcataattcataaatatgttaaagttatataggtatcaagttctctcatgggtgcttatctagcaaacatgattagagccccttaagggctccaaataataaatcatcttaattctgcaatgtcagaaagaaaaagatgcctatccctgtgctaatgcgttatttcctgtgtttttctgattttggacattgatgttgtttccagaacccattgtgtcaccacctgatacaacaaagctgttttgacttgaagattgtgattggctgatactttgttctgcagagttgccaccctgttcaccttgtagtgctagtgcgttgtttccagtgttcttttggttttggaagcttacatcattgcatgataagaaggtagttgcaccagaagcacataaagcgttttggactgatgcttgtgattgagggattgactgtgtagatgtatttccatttttctttttagttgcaaaggcgtcatccatggccactatagggcttgcgattagtgctaatgcgaccactattacaatcgatactgttagaaggagttttttgttttgaatattttttgctttattcacaccttgactacactaaaaaatatattgggtttactaactgattgtaatactctaatattctagcagttttggaattacaaatcgtttgtaagaatagaaattttaaggcttctccagagccgctactttatagaactgtgaagacattgtatcgaaatataaaagaacattaaactaataaatagtctaaaaagctaaattattatttatttatgaacaaattcagatttcaaacagacaaaccaaatatttcatttgaaagtcatttggtaaatttaagtaaagatacagaaacattactggtcaatttaagggactttgttttatctctaggagacaatgtgattgaagaagttagacctcataggatagtctatgcaaagtcattgacatttagatattttctagatatttgtcccaggaataaagatctaataatttcgataaggaggagcaggaaagaacctgcaaaagaatatgttgttaataatagccaggagattcaaagtattgaaacagaaattatagaagcttatagtgcaatttgaagattgtttcattgtcaaatactgatttatatttctcaactaaatgcatttgacatatctccattataaagaaaccttaaatataatgcaactttatacttttcctttcaattaaaaaattatgccgttattaatattggggattagaaatagagacactgatcgcaatcagggtatactattgcagataatgtcacaatagcaacttagataaggatttcaaaaggacaaagattaggtacaccatcaccctattgcttaagaagagaataataaaatactagagaaacctagattaaatatttggatgcatacttagaagaagaattgattgatttgttcacacactacttgcaaaaccccaacacggcggatttagaaacaaagaaacaacgcatgaaggaaatcggaacagaattgtataatgatggtggaaatgatgcaatggaaaatatgttctattcggtagagatgagaataaaagaggaaattggaaaagatattaaagaatatagaccttggtggaatggtgtttcagaagactggaaatattaaatacatataaattttcaggggatcagattttgaaagaatctcctataataaatagaattttatccaattaattaataataatatgaaattggacgagttaaaacagcactactatagtttttattcattctaaatacacctgttgctcccccttctccactttccactttccaccttcttctttccggtggttctttcttttcaaatcatcttaccataggagcgaatacagatttagaatatttgtaaatttgaatgatggttatgaaagatagttttagtaaatagaataaaaataagaaaatcgatttgatttcgtaagatatcacctttatatctaatgaataaaattgaatgatatattggtgaataaattgcctgaagctacaaatcaaaaaaatactatactcaatttatataattcaggaatcgaaccagaaataatttcacttgaattagatatcagtgaagacataataaaagatattattagtaatgagaataagggagatcgtggacgtactaacaataatctatcaaattatctattgaataagttctatcttgatgcaattatagatgtcaattcagtcataaaagaagcccaattcagagcatggaatgcactcaaagcaaaacccgaactaaatatcatattaaaagaaacgcagaatattttggaacagaacgcagaatctaaattgagactagtgatgttacatattgatttggttggctctacgaaaatggcgttaactttaccaatagatcgattgaccaccataataagatcatttgcacaggaaatgacaaatataatctcattgtacggcggttatgtcttaaaatatattggagatgcagttttggctttttttgttatagaagatactactcgtaatggacaatacacagacaaagtgattaatgagggaaatgattctgaaaacaataatggtttcgccgcccttcaattcagtaatggaattggttgtgcattgaccatgatcaaagtaattaaagaaggaatcaatccgatcttgaatcaatatgactatcctgagctgaaagtaagggtaggaattgattatggtgaagttgctgtcgttcaatatggaattgacatttacgaattggagaaaacaatactaaaaacgccgcatttagaccttataggatacaccataagtgtggcagtcaagatgacgtcccttgcagaggccgaccacattgttattggtcaaaaattatatgatcaattagataccaattataaagattcctttagacaattgaaaactaatactgaaatatggaactactccaatcatactgacggcgagctttataatatctttaccaataattagtcaaactaatgcttatcttattggcaatcctaactgtggtccaaccgatttcgattattatctgatgagacgtactttcttttgcctacatctactagattaggataatattttctcgaatattagtagtttcaaataacctattaaatcacttttagattctaaactaaaatgataaaatggtatgaacacagatattatttgaataaaatgtaataaagagaattttgacacatactattagaaatgctttaaaattatttttaaaattacttacaggaaaatcaaatgtaaaaaaaagaggcttattgttgacctaatgcgttatttccactatttacctggttttgaaagttttcattgtcacatgatacaatagcatctttaccagaaacacattgtgcgttttggttagaggattgggattgacctatgccttggttagcactgttaccgtcacctttaccactaccaccaccttgttgaccggctgcattatttccgctgtttgcttggttttgagtgttcgtgttgctacatgaattgcttagagagccgcctgctacacattgtgcgttttggttagaggattgggattggcctatgccttggttagcactgttaccgtcacctttaccactaccaccaccttgttgaccggctgcattatttccgctgtttgcttggttttgagtactggtgttattacatgaatcagctacgcttcctccagaaacacattgtgcgttttggttagaggattgggattggcctatgccttggttagcactgttaccgccacctttaccactaccaccaccttgtgctgctgcattacttccgctgtttgtttgactttgagtactggtgttattacatgaatcagcggtatttcctccagaaacacattgtgcgttttggttagaggattgggattggcctatgccttggttagcactgttaccgccacctttaccactaccaccaccttgttgaccggctgcattacttccagtgtttgcttggttttgagtgtttgcgttatttcctgaaccagaagtgctgccaccagatactacaccgctgttttggttagaggattgggattggcctatgccttggttagcactgttaccgccacctttaccactaccaccactttgtgctgctgcattatttccgctgtttgcttggttttggtcatttacattgtttcctgaaccagttgtgttgccaccagatactacaccgctgttttggttagaggattgggattggcctatgccttggttagcttgattgccaccgccgctgccactaccgctactactaccaccttgttgggctaatgcattgtttccgctgtttgcttgattttgtgcattcaaattattacaagaaacaaaagtaccagtccctgatacacaaagagcattttggttagaggattgggcttgaccaattgcttggttagcggcgttaccaccgctaccactaccaccttgttgggctaatgcattgtttccagtgttagtttgattttgtgcattcacattattacaagaaaaaagggtaccagtccctgatacacaaacacctagctggtttgaactttgtgattggcctatgccttggttagctgtgttggttgtagcaaatgtattcattgacatcgaagttggccctatcaggagtaatacggataatgctattactgctgtgaatggcgctaagatattttttttattgttcattttatattgaataatagatttgttcacacccttataaatataaaataagtatatgtggtttcctaacaagttgcaatattctaatactctaggatttctagaattttgaacactaacaagaagtattattgataaagtcatgcaatagatttagatcgtatttataaaaaattaatatggaaaaaaaatcaaaatgagaataatgataaaaattgatctagtccaatttgttttaccccgtattacctttctataattcatgaggggccaaatccataacatgtgacagtataagaatatatgatatcatgctatcagacttgaatatatttaaataatatctaaagttattacatatatgaagcgagttgaccacaatcaggacaaaaatattagcgaaataccctcagctaagccaataaccagtgaagatgtctataacatgctattaaccattcctaaaggcaaagtttctacctatggagatcttgctaaagcccttggatacccgaccgcttcaaggtatataggaagaattttaggcaagaatccaaatccgattaaagtaccttgccaccgggtagttatgtccaatggtaaaataggtggatatgctttagggatacagaaaaagaaagaactattacataatgaaggagtcatttttgccgagaagaataagataaacgaatttaaaaatgtacgtttttatccaaaggtcggttaatgcaattagattaactgcaagctctcctgccaatatacctatcattaacataaactacttactatttgtaggcggttagaaaatataaagttactaaaatatggcaaaaaaacataaaaatatagattaaaaaagttatgatgcctctaactctttaatcctttctgatactcctttgacttctctctctaaatcaattctatattccttcaataaatctactttttcctcacgtgttaagaaacttcttgacttttgtactccaactgtgtttataccgctgtaattacaaccacaacccattatttcaccccctcatccattccatcggacatacgatacataggatagagggtgtatttatatatatcggatacccaatatctatgttatcaatgcgcggagagagaggagactcaggtagagaagatgaaggggaaggagactgctgcgacatgaggggaatgttaggctttctgatccttttcttactttcgaaaaaaccaatgcacggtcaagagctagcggcagaaattgcaattagaaaaggcgaaaagaaactaagtcccggaacaatatatccggcactaaaaggtttaaaagaactgggtttcatcgttgaggaaagagacggaaaaacaatagtttatagtttaactgataaaggtgagaaggctttgaaattagcaaaaagaaaatttataaagactttttttggtatcttcccagaataatatgctatacaataaaatcttcatagaatattgaatccattataaaaaaaataagactatttcacaaacaaaatttgtcaaaaaaagattatcaaattgtcttgtgatccctaggtaactatagtttttcaatcaattagaaggaataaacaactgtacgttgttattggttgtatctgcgacatatacacgtccattggaatcaattgttatactctcaggttttgaaaattctccaagaccctctcccatttgtccaaattctgtgacataagtaccattgttggaaaatacctggattctctggttgtcagaatctgtcacatacagatttttggcattgtcaaatgcgattactgccggatgattaaattctccagcactccttccttctgttccccattccttaagatacgtaccgttattagagaatacttgaattctattattcccataatcaggtacaaaaacattattttccttgtcaaccgctatgtcccaaggcatatcaaattcaccattccctgcacccctgctaccccatgatgtaatgaatgtaccgttattggagaacttttgaatgatattaagatctctatcggaaacaaagacgttatctagggaatccacggcaatgccatgtggatgcagaaaatgtacacccttatcttcatcttccccccacgatgtaatgaatgtaccgttattggagaactttacaacccgtttattattttgatcggtaatgtaaacattaccacctttatctatctcactgctatgaggatgatttaatggaattccatttacagatcgattctcccattttaaaataaaatttccattaatatcatatttctttatttcatttgactgaatatcgtttacgtataagttatcattactatcaactattattccttcaggctgaaaaatttgggaagaatttgagttttctgtttgtgaagacacttctctttcaaaattaaattttgtatcaggggataccagggccaataaagagacttcattattttgagcaaaaacaataatagccgagtaaaatgacgacatcaaaacaataaatacagtgcaacacagaattaacatgtattcagttgacataagaattcacatattgatattgtgatcgatatataatatttaacttaaatccatattcatgcagaaatatataaagaatgttcacgatagctcaactttgatagacaacaactgaatgattcaataacatatagaaaaatcaagtgtcgagcatgataaaagccaaaaaagtatattagttctcaattaattcaacaaatgaaagcacagttttgtgagtttatggaaaattagagaaataacaatttattcatgtcatctgtataggtatctattatgaaacgtgtcagattcgataatttaaaggaatcaattttaaagttttttacagtcaataattcaatctatactgctgcaattttcatagtcataattccccttgttttattcttccacttacaacaggagacagaatacagtataagaaacagcatatttgaacaacaaaaacaagttcaaatagattccacccgtgcgatagcacaacacctacagtcggatgtggaattgattttatcaagactgcaagggttagcaatgtctggcagtattcaagatggagattatacgtctaatctgaccaaaagtttattggtagattattacaacaaaataaattccactaccccagtggacagattgttccttctaaataaaaatggcatcgcagttgtcgatatatctgctagtgaaaattcctcttatgcaggaatggatttttcctctagaagctgggttaatgagacaaaaaacgtaatgtcttctgtagtttctgacatgtatgtaggaatagatggcaaaaatagaattgcaatggctcaaccgatcattacgacaaattctagtggctcttattataatggcttggtaggagcaagaattccaataaatgaattttttaactattatggaaatatctacgatatacagtcacagtatttggcagttttagataacaaaggtacgcagttagtccatcctgtagattcattagtaggaaaacctttttttggaaattttacccagaatttaactgggtataatgacaggctaaacaatctagtaaaaacagtcatctcaggaatcccgtcttctgaagtataccagttcataaacagtgaaagatttaatgcaggatacccggttatcattgagggctctcccaagttctctgtatttgtaataacaccaacctccattatttattcaaaaattaacgaaataatagataaggaaaggctccaaatgctcactttgataataggtataattgcgatagtattattattgatcttgttcctcaatagagcaaacagcaccttggataaatcagttaaaaaaaggactaaggaattggaagatacaaacaggaggctcgaaatagcaaatagaaatgtccagattcacgataatatgcagaaagaatttataaatatagctgctcatgaattaagaaacccagtacaatctttgctaggcttctcagatattttaacgaaattgattggtaacattgagatgtataaacatcctatggaagcaataagtagaaatacaaaacggcttaagaggttggtggacatagtcttagatatatcgcaattagataaagatctattgatactaaacaaagagcctattaacctcaaggaattgataacagagataatgattaattaccgagatcggataaagggtgatcgcaagtttaatactgtatttgaagattcatctgctccaaatgatagtaagatattaaatgctgacaaatctcgattgacacaagttattataagcttaatagataacgcccttgagtttacaaaagacgaagatgaaataataataaatatgaaaaaaataaacaaggaaaaggaaatagaggttactataagtgatccgggacatggcattcatccagatgatctacctctgttatttactagatttataaaaaaatcaagcagaggaacaggacttggtttgtatatttctaaaaaaataatcgaggcccatggtggaaggatttgggctaaaaacaatcaagatggaaacggcgtaacctttggatttggtttgccggtacaagaccaatagtctaatccagataactttaaacatcgataattaattataattattaatttgcaaacaaaattatttaacaaatactattttcaaagggatcaagttttaagataaatagacgatgaatataaggagattcaaagacataaatcaatagcattattagctataaccataaacatttgattagttagtatctagctcttccgcaaccgggctattttttgaccaaagtaaattctccagtgctcgggtaaaaattctaattttgttgccttttgcattttggataaattttctccatcataatgatcatttatatacaaattaacaatatcatttatagaaacattatttttatccctgtataacaattctatgctgtctccggcgcctaattcaccttcttctaataccctgtaataaattccgggacgttgactattgacaaatttctctaggatatccatgcgaccaaatttgatcccgagtttgtagcaaggcattcgaggctgtgtgacaactaaccgtgatgaaccaatttgatattgatcacctatgtttaccatgtcctcatataatccttgagtagtaaggttttctccaaacattcctaaaggcatatcaatcataggatatgcttctttccaataattgtaatgttcctcagaatatgaataaactgccttgtcaactccaccatgaaccgacaagtctgcctgtgcatccccattcaaattaagtgtggttacttttacccttccctccacaggctctttgaatatgctcgtaacaacctgtcgcttctcgtatgaaacttgtctgggtaatcctacgttaactgaaatcaccttcatcataggtcttgtttacttaacctagaagttatttttaactttaattccagacttgatttcaatcagcctgttttcagggtctaaattagttcaaattatattttgaaattcgcaaatctacctgaattgctattattccgataacatacaaaagcatcaatggtcctactacgaaccacatagttattccactcccatccggagttatgattgcacccagaatgaccaaaaaaataatcacatatctcaaattatccttccagaaatttgtgttaactattagtcctttggtaagggcccacatgactattggaagctgaaaggaaaatccaaatattaacaacatatttacaacaaaaagaataaaagaagtgatttcaaaaaaagatagtatattcatagcctgtccgtattggtacaagaattcaagtgtatacggaattgcaacatagtaagaaaatatacaacccattacaaataatgatatagtcggtacaacgatactcttgatgattcttttttcagaataatggagcactggatttaagaaggcaaatagttccccaagcatgactggcaaagaccctacaattccgattattatagccacgtacatctgggctgtaaaggcttgtcccggagtagtttgtaccaagctaatgttattagacaataagtcgttctttatgtgggaaattacttgaatagataaactgttaaaagtatcaggatagagaacaaataaactatatccgtctaatttgacgatggtcacaccaagagtcatacacacagaaatgaatatgatcattataacacatattctggttactcttactctgagttcgtataatagctttacgaaaggtttatcctcagatatctttatcacccttgtctaatccacccaacctaataaactgttatggcaatattgatttcttaaattttgttgtaatggttaattagcaatgatatctactaaaggcctatatacagcaaatgggttttacgagactatatcaagttagaggagatgaaattgagtaataaccttgcagacagttttggaaggatagcaaagaaactaagaatttcaataactgataggtgtaacatgcagtgtgtttactgtatgccgtcaaacaatactaagtggttagaacaagataaccttctgagctacgaacaaataactcgtctcgccaagatatttgtttctttaggaattgaaaagataaaaattacaggaggagagcctacagttcgtggtaacgtagagaatctaatcaaatctttgtcatctattgaaggattaagatcgattagtatgacaacaaatggaattctgttaaaagataaagtaaagattctcaaagaatctggactagaaagtttaaacattagtctggatacatttaaacctgacagatttaaatccatgagtggaattgatggctttcacaaagtaaggaacgcaataaatactgcaatagacgaaaatttgccagtaaaaatcaacactgtaatcatgagaggatggaatgatgatgaaatttcacattttgtaagattttcccgagacactggatgtattgttaaatttattgaatttatgccgttggatggaaccggtatttggtctgaagatctagttgtaagtaagaaaaaaatgatagagacaataaataaagattttgataaattatctcctcttcataatgataaatctgaccctgctagattgtacacttttgaggatggaaaaggaatcataggatttattccttctatcacagagcctttttgtcaaaactgtgatagagttcggattactgcggatggtaaactttacagttgtttatttgacaagtcaagtaatgatttaaagagtttacttgaagatggaaaatcagacatagatataattaaatgcatcaacaagtcagtgcaggaaaaacctgaaggaattatcaaaattataaaaacgcattcattaagaccaacattgaatgttatgcatactattggtggataaattcctaaatgaaaaccaaatgagtaaaaagaaatgaggaagaggaaaagagaaagtaggttacaactatccagaggattccaatggagaggaataatcaatctttgagactattgatagtccggatctggtatgttttatttggtttagagttttagatcaatacataaatactaattaaattataaactcaaattcaaaatttgtctttgatatcaaaatacccattctaaactgaaatatctaattgattgtagcccccagcaccgtttggaaatggatcttttaattctgaagtttgaatctggccggttttgtctgttgctctcacgataattttataattccctttatctacagcggtaaatccactcgtccatagaacccaggtatattgtgacaatggatctttgactatcgcagttttccaagtagttcctccatctacacttacctcaactttggaaatccctctatcacctgcaaatgcaattcctgcaacaggaatatttttaccattcaggaagctgctatttggcactaaattcgggaaattatcatttatgggttgattgccaggaatgactatagatgaataaatatttttgataccattgttagtccaaccttttctttgccaaaagccttcgtaagttttatctactaattctatttccgtaatccattttggattcatcattccatagaacccaggcactattgctctaacaggatatccatgttcgcttgtcaatggcgaattgttcatgtcataggctaaaatggtactatccatcattccattctctaatggaatccctacatcatatccatctgaacatctaaacacaatatatttaacgctagactgaattccagctttagaaaggatgtctctaagtctcactcccttccacaaggcggtgcctacaagatttccacctattttattgctgatacatgtcaaggttgcaaattcttcaactgaattcatatccctaaactctgcatagttaattacaacaggattatccactagtcctttgatagtaagattccaatcatcagcattgacagtgggtactactgtgtttatatctatcctataaaagataaaagttggagtaacctcagcatctactagtggagtaagaataggattttcaaaaccagggggttttgattttgattgtaaaaattgctttatggaagcatcaagtgcacggggttgttgttgctgttgctgttgctgtcctgacccagatgttaaacggttaaatccaaaatataccaatggaatggcgataactgaaattattaaagcacggatcatttctcttttattataatcaatatcggtagttttactacttttgttgataacattaccaacctcagaatgagtttcaaccggatcaattttcttatttttattaccaaacaagaatgcaaagatcaaaccataaacggcacttggtaataaaaataatgcaaatgatattacaggaatagatatcgattgtccgggcgtggtactaagcaccataaaaataattgtgatggcaatcaagatcatataagagataaatgtagaaagcatggatctaacggcatatcgtggtaaattcattttcaaaaacaattttcctaagactgtaccaatgataccataaattatgacgttaaccaccattgcgcctataaatgtagaatatttagctaacgggcctaatgttaggtactgcttgcgattcgatttctcctgaagaaattgagatcaatccctgagatgcaatttcaggaatgaacaatccattaatagttaattttaagaaaagtgataaggataaactcgctactccggcagcaaggccaaaaataaaaaatacaatataattattgccccttaatcctaggaccactatataaccaaactacacaagagatttaaggatttttccaaattcaatggacagatattcccaacatactaaagtgcaattcatttaaattgctacccctcatgaacattaagcctcctgacacttgtcatatatgcatgaatcttaattttatatagataacttattctaagtgtaaataatgggtatgatcgatgtcggcggcaaaccagaatcgcttagaactgctgttgctcaagcacttttatcatttgatattaacatcatgaacacaataaaggatggaaattccccaaagggaaatatttttgaaatagcaaaagtggctggtacactgggagctaaaaagacctcagatctgattccatactgtcatcctattcccattgatgatatcaaggtagaggtagctatcgagacaggtctggtcaggataatcgtcaaagtaaaaagcgtttggaaaactggggtcgagatggaagctttaactggagcgactattgctgccttatccgtctatgacatactaaagcctttggatatatctctatcaattgataatatcaaactattagaaaaacacggcgggatcggagattttagagaaaaacatactagtaaacttgaggccactgttattacaattagtgactctagaaagaaagatcaagatgaatctggtaaactaatagtcaatgcccttaccaagaacggatttagtatcgttgcctacaaggtaatacctgacgacattaaaataattgagaaagaattaatatattattctgacgaactcaaagtaaatattattattaccactggaggaacaggtgtgggtccacatgatgtcaccccagaggcaacaaaagggatcttagaaaaggaagtattaggtatatcagaaaatcttcgagactatggacaaagtaggactcctctatccatgctctcacgcggggtttcaggaattagaggaaatacattaattgtgaacatgccaggcagtatcaatgcagtttctcagtctataaatgcgttatttccaggtgtaatgcatatctttagcatgattgcagggcaaggccatcacaaataacaacatagtgaaatttacatagataatttattccataaattcgatgtcattaacatacgagtaaccgggtagaacatttacttctaccacgtctcctctaaagagatttgtcacattctcaggaacagtcatataaccattagtattgactaacaatgagatactttgtgtttcacctattaccggtttggcatagatcttgtctttcaattttattaggttgacgtacactatttttctaaaatcatgaaatttcttacgacaagtccaatcttcaaccattatggcagaaatagtaaagacattaaaagtagttcgtcccgaaaatagggaaatcaatggtcttgcaaatacaaaaaaggcattcaaggtgccttgaattggtccgggcataattagtatcggttttttattgacggctgcaagtcctgttactctaccccgatccagttttattttatgagctatgatctcagatgatgtcatcgaattaatggttgacttcacaatatcctgcttaccagccgatgttccaccgatagttataactaaatcagaagtttttaaggcgtaaataatttttctttcgaggatatccacatcatccggagtaacacccatatctactggtatgccgcctaattcacctactaaagcagaaataatatgactattagtattgactactttatttcctttattttctttgttttctttaatatcttcagtaagctcgttacccgtcggtataatagtaactagaggttttttaaaaactgaaattttacttatccgtaaagaagccagaagacccatgtcttggactcgtattgcttgttctttacataacaccttttttcctttttcaatatccgatccagcgaaatatacgaaactttttttttctatgggttcaacaatctccacaagatcgttattgactatttttatgttttctatgggtactaccgcgtcggattttaatggcaggtacccaccagtttgaattctatatgcttctttttttttcagaatatagagtggtaagttccctatggttgattcagagagtgaaatctttaaaagaatgggatttttctttgatgcactagtaacatcggtagatcggattgcatatccatccatgtgggatgagttgtaaataggtaggttttctggcgcaataacgtcatcttttaggatccttcccagggattcaaaaacaggaacaagttctgtgttcttaggaaccgttatgttttctaagagaattttgaatgccttatctacagtaaaatatggatcagagttttttttcatactttaattcattcatttaaaattgagagcgatattaaatttgtttaatattatacaggacatatatttcaaattttacttcaacatttaaaccaaatatttgattttttaatttgtcttgattgatttcccatccacccatttttcattgccttttgatagaatttcttttttccaaattggcacctcttgtttaatctttgctagaatgtatttgcaggccctaaaggcatctttgctatgaggagtcgaaagtgctatgattatactattggttcctaaagacaattcacctattctgtgaactattctgattttattaataccatacttttctattgcaagcttttcaatatgttttatcttattgtcggccatttttgtataagattcataaaacattttttgtactcttccatttaatccaaagtttctcactgaacctataaaaattaccgtggctcccgaatgtccatcaatgtctgttatcgaatttataacatcattaacatcgatttctgattccgttattatttgtgatgatgatgatggtttgagtttgtcgttgtttttcttagatttatggagttcattactagaatcagtttccaatttgatggtctcttcttgaaaatctctactactcaagcaaactatcctccagaaattggtggtagaagtgctacttcatcattgttttttagaatagggtttgagtttgaattgacaatatggtaattgacggaaatttttacgttttttatattttttatatttggataccgggttaatatgattgatataagatcctttattgaagtatctgtagacaactctattatttcctgtttttttctagttgtttcgtgtatttgagcaaaataaaggacggtgacacgaatcttgggcatcatgtgggatgtcatataaacatctactatttaaaatgataagaactacacaaattagttgtggtatctgtgatcttgatgttgtaaacaatgtattactagtataaatagaataacccaagtaaatttaaagaggtagataaataaaattcaaattaaaagattatcaacttccttttcgatctcttttaagataaaatccaagtctttttttagattatttagttcttctatagttagattacttacttctacacctttgtaataaaacctctgtgatccaattatagaatcaggtaaatctattctgaaaagaggtttttcttttgtcttattgtttcggtttactcccctttcactactcattttttttatattttcagaatcgactctaaattcagtactaggatcggatgaatgagaatgaatctcgatcactgaagaataagtagaaatcttgttaaaatcaatatcaaggctttgctttatttcggctaggattttttgtctgtggttatagttcttgttaatttttttatttattctattccgtaaatctttcaacgacaaggaaaacaatattatcatttttttataaatctttaaaggagaaaattccttttttgcaatagtttttagattttgctctactgacttgtttgttttactattttcaaatctaaattatcttctagcgataaataagtgacttaacaatttcaattatgaaattctatttctttttttcttgacgcacaacatgcggtgcagtagccttgaatatggcatatacataagcacccttcgtaattttcaaatattctttagattccgttgtaatcctcgatatcaaactgatactgttaataattaaatgtatattcaatatgcctgttttgatgttagcatcatcaatggcagctactttcgttttaattatatttcttgcgctggtacggacaaaatctacagccaagataatatcttcaggttttattggtactcctacagttgaatctattggataatcgcctatgatttcaaatttatgttctcctatcttaaaagtagtaatcccatttgttgattttgtaacacaaccttctaggtaattatagtccttttgaaaaaactctgatattgatgaggtggacttggattgattattcgggaaagttagcattgtttttagtgtatcagtctttttgatgatgcctttttctattaccgaaacagaatcagcaagtgcgtatatatcatcttcaaaatgtgttacatatattcccaatattccctcttctttaagaattcgcctaagatcctttctcaactgaactcgagttttagtatcaagatgaacaagaggttcatccatgagcattatttttggtttcgtcacaagcattcgtgctaaagatattttctgcatctctcctccgcttaatcccactacattccggtcaagaagatgagacaccccaatggattcaacgagtctcttaattcgtaatttcctattgtctatatcacgtttcctaacaccaaatacaatattctcatagacattcaaatgtggaaagaggctggggttttgaaaacaatatccgattcttcttgaagcaataggtgtattggttaaatcgattccattgatgtgaatagagcctctgtcaggtttggccaatcccataattaggtttagaagagtagacttgccacttccagtgggtccaattaataccataatggtattatcctgcaatttcagattaattggtcctaatgtaaatccgggaaatgacttggttacattaattatttctatggtcaactggatctctttcttatgattctccaaaactaaagattttattgttttttctggtatcagtattagattttttcataattatggaatatacaattattagagctactgaaagtaaaatagacaagattatgcccggaatagcttgtgacaaacctcctatagcattatcttcatatatctgaattgaaatggtatggggattatatgctaacatcaatgtcgctcccaattctccaattgctcttatccacgccatcacaattccaaccaaaattcccttttttgcaagaggaacagatattcttaaataaacttcccaatgattctttcctagaacccgggccacattttccaatgatttgtcaactgaatcgaaggcagccatacttgcaaggatcatgaatggagaggcaacatatgtttgcgctattatgatccctattattgattgggtaaactcgatattgggaaatagtccatctaaaaatgactgaggattaaacacccccaaaagaagagcaccgcttgcaagtggtggcagtactaaaggaataacaatgataatttgtacaacagatctgcctgggaatttgtatcttgataagcaatatgccagtggtataccaaataatgctatcaataacgtggatattgacgcagtgcatatgcttagaacaaaagcgtcaatgactgttggtcttatcaatgagtctagtaagttgtgaggttcaacaaaaataaagatgctgaagagtggataaataatatatactaaggcaattccggataaaatacatattacaagtttaaagttgatcaatccagtgtttctcatagatttattctttgaaaaaactacttatcttgattgcatttattattatcgtatattttaatcattgtcatagtaagatttgttatcataatctttcatcaatattccatccaatgataataatttgtatccacttaggacacgtccaaaggttttaaggctgctgattctggatattatcaggttcaaattgcaaagggctttgacaattatgggttttttaattgctaaggaatatggtatgattgctacgtcattatgatttccgttatgaatgcttattggcttcatctccctttttttaatcgattcaacaaaaagatggattcattgagaaagaaattcaattttcttatacatattttcatgagtctgactagagtaaactaacacgttgaggaattgtaatgacaaataatttagacggttacagattttaatagagttcttcaatttcattcttttttttgcatttaaaatagagatatctgtacttaaatgattacgaagaaaaattagtttctcaatttctgaatcaaggctctttatgcttcttaatttatcaatgaataatttccaacatttattcttgtcagttttgttggaattattgctacttcttgtatcacttattgtacttcccattttagcccctgtctcagcagcaagaaagttgctatcttgtaatataactaccaggtggttcatgtttacaatatcttgaattgttatgccagtgtttaaaagatacgataataggccagaaatatgacattggatttgaaaatttaatttgtaattgggaatctcttcatttaatttatccatggtcgctttcaattcttttattttggtttcaaatcctagtttactgtcatattgatcctcaatatcatttagaaactttgtaacggcatccagtggcggcaaatgattggctaatgagatttcaataatagtacaatagagttgtttaagctttttaagatcaaaccccattgcgttgagttccccgtattttcatagtctgcctagatacatcaagtttagaatttagtaagtcgacctctttgagcaagctttgttgtaatggagcatttagatttatatcattttgaatatgatctctttcttttcttaatgattgaatttgtttgtattctttcagtatgtcgagaatattgtagttgtatgtcttaaagtcattaattattgatgaaaaaaatatgatctcttcatctaaaatcatgttgcaattatcggacaaatgttgttttaagaaatcataccactccaaatgagctagaatgttattgtctttttcaattgtttctttaagattgttttctagagttaattttttattctccataatagatatttcatcataaagtgattttctgtgcttttcgagatccttatactctagtttgatttgctcgatataataagaaacttgcgaagtaaataagatgtctattgatatattcttttcattgtttttgttttattgacgtatcatcgtttacgtcaaattttttttgaatatcatcatgttgccgatgtggagcttttcgcaaatatattgagttagctgattcattttctgtatttgtggataaatacagatcaggttcattgttattatcagacagcaattcacattgaagagcgggataaaaattaaacaaatctttgagccatcttataatatctgatggtttaatatcatattttttacagttgttgtatatgtcttcgataaaaaagtaaagttcattttttgttacaggatccttatttttttttcgttaatccaatgtctagagattttacgaaaaagtcattttttcttggaacccaacaatttgtttcgtttctaatcactgctaaaagatcttgttcgggtgcagaatcattcctttcctcaaattcgtcattgataccaaattcctttagaatttgaacgattctaaatccctgagcacattcacgaattgtcatttctgatttgttcacaatgcttgcaaattcccgtatttcttcaattccactgtttcctaagttgtccttccagcgcttgaccagattatatactgtgcctttggatagattagtttcttgggttattttagcaagggttttaccgtcacaatatttttggataacgatggaattgctaaaagatgaaattactggtgtcatattaattatgaaatcctagcctaataaagtagtcatttttttggtcattttggtcattattctggtcaatatggtcaacaaaagagtcaatttggtagtggctaaactacgctctagataatatcaacgaataagtcattagtcaagatgttttcaaatatttatttaattacaatataagagtctgcatggtttcatctaaataatctaaataacatggatccgaaaatacggataaaaaagattctaatcccaaagtcataatttttattgtaggtagggtttagcaagtatttttttccttaatatcatagacatgcctatagcagctattgaaaacaccagagcgctaagaaatattaggtcaaaagagaatgaggaaggcaatgattcagttattccttttatgttaactagtgattgatttgtttgcatatacattgcagccaaagccggtccaatagatgatcctataattctcaacattgtactaatccccatagttacacccgtaaattctataggggtagccagtatagtgacgtttactgcccctacggaagcaagggagaggccagcggataatatcgccaagcctatggagattgagagctctgttgaatgaaacaataacaacactgagaatccggccgctgtaagaacagcacctaaaattataggctttatcgagcccagttttgaaatgataaatccagaagtgggtccaaatattaaaaggactaacgcgaaaggcaattggattttacctgtattgatggcattttccccgaaccctattggttctggactttgtactagtattggtacagtctgaaaaaccataaacatggacaatcctactatcattatgatcatatttgaaagcaagattggcggcttcaagaaaattctaaaatcaatcaagggatatttgactctcctctccaaccaaacaaagaagaataaagacgtggctccaattaccaaaaatggggttacttgttccagagaagagtaaggactagaactagcatcactggaaagatttgatatagtttcatctggagatgtttgcaagtatgttaaagagagcagaaaagaaataattgtaattgctagtaaaattgatcccttaatgtctatttgagaagaaattgtttgctttttctttggaatattctctgtagaattatttcgcaactttgtatgttgattttgtttttcagtcgtctcttcaagattgttactatctgaaatatgaatatattttcgtatcattagtagtaacattatagaaataggaattattgtaaaaaatgtcatcttccatccaaattcatgaataatcaaagctcccacagataatccaatgaccgaacctgcagcaaacatcgaagtaatgattccggtcgtgatggaaattctttcccttggaaattgatctcgaataatactaaatgctatagggaacattcctaggccaatgccctgaattgttcttgctataatcattgtaagaaaatcactcgcaaatcctcctaaagaaactccgacggtgtaaatagccataataattagcaaaattttctttcttccataaatgtcagacagtttgcctgctataggggtcatgacagcccctgctatcaaataagaagtcagaatccacgatgataatccataagagacgtcaaaatcacttattagagtaggaattgcgggtatcaacattgtttctgcatacatagccatcgtggcaagacaactaagaatgattagcactttccagggttgtgatattttgagtagatttttgaaattaaaagaggatcccttaattcttttagatgtcagtttctttaaacacccccccaatttttatttttaaaccttttaccaatcttacatattagttgttgtggaagtatgtcgtttctcaataatgatgtttgatgcaggttggtcgattaattctcgcttttgcttgatttcctctgagcaatttaaattaaatttatcgtataaattaagccacatttgttccaaagttttttttgttgtggaaatatcttcttcaggtatttgattaaggcatattttttttattttagatacatcttctattgtatcatcaagtgatccgtgtgccttttcggtcaagaaaatccgattaattcttcgatcccttgggtcgatttttctaattacgaatgcatccttttctaatttgtcgattattggaataatggtcggtccttccaaagctaatttatcagcaatttccttctgagttaatcccgtagcattatttgcaagtattattaatactttccactgtccaaaggtaataccaaatttctgacgcaattcttgatctattacataaattaacgatttactgatcctgttaataataaaacctatgctattctgaaaatcatacttgatcatattatacactaataagtagtatactaataaatagtatttaaataattagataagacgggtataggtaaccagtaattaaacgcggttctcccactcggtgcaaaaaattaatgtaaagataatatgagtgaccacatcgtgtatctataaccatcgttgccagtaaataatctgcaatattgctaaatgaaaacatgtgatcaatcatgagggggtgagttttgagtgttcatcctttaatttggacctttttgaagctatcaagttcctaagtttatgaatcccaaatcctgtttttgatgaaatggcaattttatcgattgaatcatccatgtatttcattatttcttgcagttgatctgatttggtagtctccactttagttaacactatgtgtaattttgacttgtcgattttgagttctttgagaaccttccaactgctagaatactttttaccaatatcttctaaattctctgaacaatctatcaaaaagaaaatcaaatcggcttcaagtgattcttctaatgtagatttgaaagcgtcgatcatgtaatgcggcagccggctgataaaacctactgtatccacaaccaagacttctacatcatctttattgccaatattactagaattatcaagcgatcttgtggttgttgaaagtgttgtgaacaaattagcggaagtttccttattttccttagtaagtagattaaaaagagtcgtttttcctgaacttgtatatccaacaagggaaactataaacattccttttcttagtctttgcttgcgatactcatgacgtttaagacttgcatcttttaatttgtctttgacgaacgacatctgtcgttttaggtcacgaaactgaacatctacgatgtactcacccattcctccttttcccaccctctcgttgcttttactcatgagttttgcgttttctcttacacgaggcatcttgtattgaatctcagctaattggatttgcagcttggattcattggttgttgcccgagaatagaaaatatcaagaatcaatctttctctatcaattatcggaatttttataagttcttctaaattaaatatctgttttgcacctaaatgttcatcaacaattattttatctatattacctgtttgtgaaacaaattgttttatctcttcagctttgccgagtcccataccatatttagctcggtttaagtacctttgagtaaaaaccctaactactttataatccgggattgattcaactaaacttttggcctcttctatggcaaaatcttcaggataagaaactaggataatattggcttgatgcaaattaatgacttttccatatgaatagacgattcatatttgttatacatgtttattgaataaatatatttggaaagtatatcttttgcgttattgaacagatgagaacattgtgaggatttattgttactttctatggccagtaataactctatgcggttatttcattttgtcaatatttttgatcacaatttatcaggatctaactcgaaatagaaaaacgactagaatcaagtgagttgtataggggattagtctgaaagtcaaccctataacttatttccgaacaaaagacatgtaagtggtttatgtaaaagtaaatgtaaaagtaaatgtaaaagtaaatgtaaaagtaaaaatattataattataatttgaactcaaattaagagggtccgaggtattgattatatattagacacctatttctgctgctaatttcaacatcttcttaccttctcttgttaacttattgtaggttcgattcttgacgatttttctttctaccaatttcctatctgcggctttaagcagtaacttatgtccatacccgtaggcgccaagttttttcaacaagtctctagttgaatattcgttctcaccaatagatttgatcaattttaccaaagcacgttcttctatcattattttgattaggtttgcatctcgcatatcagtaatgacacacattggctatttattagttaccttttcgtggcaacaaatacctcttttggagctgatttcgggaccgtcaatagatagtattctcaatataacaccaatctcattaaaaggaaacccacaaacttagatattttgtatcgtattttcaatatatagaaaggcgaataaataacttgtttttaattgcaagtacgtttcatatcagatagtaaatgaaataaaacgaaaatcaaattaaagatttaacagttataatgaaaagacacgctactaacagcttataatgtcccggtcccgtaaatggttattctctgaataattaaaatccttttatctcgttaattatgagtgaaatgaatcttgatagtcactttctcttttattgcaatactaagtgcatttattctattaagatacgatttactaggacccgatcaaacctcagctatcttattgaacggacaaaggggatttccgaagttggttttagtttgtatatcagccacagtcgacaagactcaaacagttcaacgtcagctaattttactcatatatcagaatacctcaaagaatttgcaatcccttcaaaggttgcttagagtaggaaatatgaggtggtctttatttggttacagacggagtttatgatgtcacgtttcttgtaaacaatgatgatgatccctattgatgcaccaccttccctaaggaaaaattatgtctaggtataagagaagtaacagacaaaccaagaagatttgtactttattgtcattctcctacaaaccatttaagagctcttgaaacatatatccaaacagagtcaaaattgtagcttaagaggaaattgccaaattatcaaaaaagcaaatgattcaaactgaccaattcctactatcacaactaaggtcaattatgatttgattcgttaatcaaaccctagaacttgactataagggatgttaatcatgaacctggtaatgcatttacatttattctccagtcaaaagacgttaatgctcgtagatgataaaattttccaaccgggttctattcaaggatggctatagccacaaatgttcctagttttgtgcaggatcatgatagtatcaagttaattttgaactatctattaaaatatcgactcacaaaatcaatgttggtaatttttgaataagctgatacagtaaccgaagaatgtaccaacgcaataataaataaataaatgaaaagctaaattgggaatagctgcggaatttgcataaacactattagacaacgactaaaagtctgagagtcaattgattagtatattattgtttattaattcatgttagaatgagatttgaacatgttgtatctgtagtctatttcttaatccattcatcaccctttttctcatagtccttcttcacagcagcccaagctaccttgtgagctacctcttctacatcctcctttgaaccccctctcctcttcttcgggtcttcatattccttcagagcactggcatgagccttcttaaaaatatgctgagcatgttccggcagttgatctatccttttctctgtttcgtcagataattcaatatcgttgtcgtctttatttctcttgtttctttcaggcatttcaattattccttaaccagagtgataatcctgcgtgtcgaatttcatggtgattaaattttgttatatttagcactgactctccatccctcttttgtcgatacctacatcgcaatttttcatacaaaattttaagcatcatatattaaatatatattaatttttgaagtgaatattacaataaatatactaaaaccaaaatttgtaataagtatcctcaatacggataaaataatataccatagcaataagcaaaattatgacaactcggtctctccaacctccctttacaatagtaacgccatgccatcttaatcggatcagctaatataaaagagataagaaagagattaatctacttccaattcttttattctttcttctactccctgaacttctctttttaagtcctgatgatactctctcaataactgtattttctcttctctagttagaaaatttctaccagtataacctgatccacaacaaccgtaacccattatttcaccccctcatccattccatcggacatacgatatataggatcaaggatgtatttatacatatcgtatacccaatatcattttaaaggaatacaattagacggaggtagccgggaagaaccgaaggccgataatgctctctacctctttctcttactaataagaaataagccaatcgacagagatattgacataatagtaaagaagtaaaaactacgattgaacgtataatcttactacaattacaatgttcttggatttcctcatactaaagggataagcgacaaaacataatgtcaactatctgttctatgtaacttttcataaatattactagaatattgatctaaattgctacgtgtaatgttaaataggtttaaataggaactccattcagtaacgcggaactgaaaatctgactcccagatcaattagaaaagcggctcccaatatgttcataaagttatatcggaagtggacgcacttagttgaatcatataatagtgattaaaatagcaatttaatgtcattcttctgattaccatgttttgttaggtcattaatccgtggtaccatcaacaaaattatttgagaataaattataaatgttgtaaggatttcgaatagccaaactaatattcgtatgattctaatggtaaatcacacattcttactagtttatgatatgtttaatacgagccatttatctatataaccatgaattatgatcaaatctgtaaaagtattttagacagcgatccaaaagttcgttttgcaggcatttgtgatgagtccggtgaaacaaagtatggcggcatgagagagggcaaatccagtttgctttcgcctcaagaatcacaaaaatctaatttacaagcagtgggcagatggggactgagaaaatcgcttacgggtaaaaccggaaaggggatatatgcgatgacagaatatgaaaaattgaaacgtataactattcctttagatgatgatcatcttcttgtggtaactaccgaagttgatgcagatcacggaaatatcattagcaatactctcaggttaattaaccagtaacaaaaaagaataatctactttttaaatactggggataattttgatggtagtaaaatagatccgagtcaatgttgttataaagacattattatcatgataatcgtatcataccatcagttaaagtataactattctttgatagtataaagaaatagttatgatctctacttacttaatctgactttattttgattttgtacggatctatcatactaaaagtggccagacgtttacatactacttacttaaattagaatgtccttttgaggaacctaacttctttaattaatcgatccagtgtgtaagtaaattaagcagtttttagttgttaccagagctgtatttttttgtgtttttttaattaatattagtcgtatcatctatgaatcaactttatgtatattttaatagtcacctcttttgaaaatacaattcacattttggataagatccgaattataagaactttggctagaacatattaagaggcattgcgacaacccttcagcgtaattgctatatgagtcgacatagacttctgtatcaaatgttcagtattagaaaccggtatggaaagcaagaaattctataaatatttttaaagcataatccttaaaattaactctttggaggaagagaatacggacaaggataaccaagtaaacaaggacaaactagatgaagaagatagaagggtgttagaagacattatctataaaaagaacaatcaaactgagaaggaaacagaaatttttgatttaaagacattagtcaatttgagacaagatcgattatggggggcaataaaagaaaggtatcgatacaacacatctataaaaagaggacaagactatttgataagacatgtagattcgaaagcatcactagttataatgtatgcagacttggttggctccaccaagatgagcatgaccttaccaatagaaaaattagtcacgattataagggcattttctcatgaaatgtcgtcagctatagaaagtcttaatggatatgttctaaaatatgcgggtgatgcagttattgcattttttccttcagggttcaacaagtatctaacgtgtgataacacattcagatgcgccaaatccatgattaacattattaaagatggcataaatcccatcttaagtaaacacgattatccgagtcttgccgtcaaaattgggatcgacgaaggcgaaaatattgtctttcaatacggttatgataagagttcccaaatagatattttgggatacccaatgaatgtaacttcgaaaattacggctattacatcacccaatgtaatatctgtgggagaaaatgtctataaattattacatccacagattcaaactaattttaaacaagtcaattttgagaataatgagtggaaatatattgatattagaacaggtaatccttataaggtttataccttaaagtaaattggtatcaaagtattaccaactccatttgatttaattcatacaactcatattgataatgttttttcccgttttaatcatgtacttacaagagaacaccccacatgatctttagtgagctacgtataattactaaagtagtctaatctttgattgaaatactcagagatcatccgatgcttttggtagtgacagagaaaatgagattatttggcagttattctagttgtttcatgaggtttaaatttatgccatataatcccaaatatagcgcctagaactaaatagaacataaccattgtaccaaaagttatggccctaaatgcgttcactaaatccattggagcatttatatcatccggatttgatggaaataccgcataaatggaagcaactagaccaagatagaatataggaattatataattaatgtaactaattctttgtaacttatatatgagaatactgacacccaaagctattattccagatgccagttgatagcctgagtataagctatctcttaagccaatggtttcaggatctcctacagcaggtggatttgcaggatatttgataaatggtataatatatagcgataaacacattacggctgctaaaataagtgctttttttctttcatcagatgatggtaagtactttctcgataatacataaacaattcctaaaatcgccccataggttagccccaaaattgcacctgcagcaaaagttccttctttttgccaaaccctgtaagaacttaattcgtcaaaatcgattacttcgccagatgcaatgctattatcaacctcaatttcaattgctcgatctatgaacggctcgacaataaagtaattaactcctgctaaaattaatcccgctataacaccagataaaagagatataagaataaatgttaaagatttcatcttttaagatctacaataaatatcaatataaaaagaactgattaatggcacgggaatccggccgcatgtcttatatcatgagtaaattcatgaagccacattgcatccaatgcgtcagttccctgtacaagactaaataactggccttgatcgtatcccacaaggtatacgctaaatattgcaataatagctaaaattactatagacatttttggaattcgatcttcttgtattactttttgatcgagatacagactcatcaccatatatttttgaccgatatatataaacgattgtatggtttatccaacattctaggatgaggattataaacgctcaagtacaataatataatacgagaaaatataaaaatctgaatatcgatgggcgatccattccaaatgttatattatataaaaatttgtgatcctaaaattacgaagtctatccatagatagtaaactgaattctaaatattcagaatctgattcgaatcattacaatactgtacttataatgggaaacgaatacaaagagataaaattaaatttgtaagatactgacttacagcgtgcaccttgtggtcaacaccctaaaatccatatctagcagatacgcacctagcaggattctttcctttaaccctgcgcatgtatttaagacactgcaattgataaaaagggatggacacgttagtagacttttgttaataaatgagttagatttgggggaaggttccataaagactttgataaaacaccttaaaatggaaaaattgattattacaactcaaaagggaacggctatgactgaaaggggagaaaagatttttgaagagatgtcacaatatatttgctctgaaacacaagtacccaaaagctctatatcaattgcagaatataaccatgccattcttttaagaaatatgaaatttgctattaagcaaggcgtggagcaaagagatgcagctattaaaattggagcaaaaggagctacgacacttctgtttaataatggaaaatttcttatcccgggttctaaatttaatgccctaaaaggagaaaaatcaatagagaaattattgaaggatgatctaaaacccgaggaaaatgatatcatcgtgattggaagcgatgacaacaagtacataacagccgagctcgcatcaaaatcggctgccctccagacgctcgaaaatcacgaagatcataagagattggaatttatcattagataattcaaaccgtagtaaaaaataatataaaacaaagatctacaagatgtattatctacgtgtgagcgattagaagacccttcaggattaataattagatgatcaacttgggaacagagtgtcaaatccattcttttataatgcatatttacatagaacatatcgcggtctctattatcaatccttattaatgtagccttttttacaactttatatgaatggtccaaagagaactacttttgaagaattactaagagatataattttacttgatgatattatgttatctataagaagtgaaggcgcaatagcagaggtcagactagaaaaagatatttcgtttcgggttagggaacaatgggccactataggtgatgaaaaagggccatggcacattcatgttaatattcaagaagcaaaggaggccaagttcatcattgaatcaagtgaagacggtcgaaaaaggtatagcatcagattctttaattccgaaaatagattaatcttgcgtgtgaattttatgaaaatgtataccgcggaaaatgaggttattaaagagagtttaacaagatatgaaaacctattctcaaagtatggagaaaaagaaacaatatggttacatgcctgataacattatagtatcagttttattcggtaagtatcaaatttagttgtaatgaagttaggcttcatattcagatgatttggaattatctaaaatatttataaatttgttagaatacactgtttctactatttgcttcgttccttgaggcgcttattggataataagatggctcaaaattcagattttataacattaagtagtttaaaaaatactcaaagtcaagtttatcaaaaaaacatcttattgttcatcatatctttgaaaaaatcaaaatacatttagaattaaaaattcatctaaatcaaatgataatcatatcgaaagttcgttaatatatgattgggttatagttgacatactggtccacctgtaatgttccaatcaattcgcttgagaaaatttgatactacaagtttgcaaatatttatatcactatattgtaatataatggtcatgaatgtaaataattccaatgatttatcacaggcttcagatgataatgacgatagatcgtttcaacaatataatctagatggtttagattttaaaatagtattatcagacgataaaacagaaggaaaatactcattgcttgaaataatattctccgcagaaaaggaaaatgaaatacctttgcatctacatagtagagaaactctgataatatacatcttggaaggaaacttttcatttagatatggtgatgaaaaaatagatggaattcaagggatggttctaaaatttgaaaaagatattccgcattcatataagaaaaccggaaaaactccagggcgattattaatcttatttattcctgcaggctttgaaaactttttcctggatctaggacttgaccgaaataaaatgaaacaatctggcgatgaagatcaagtattattacatgtattagaaaaaaaatatggtggaaaatttgtgttcggataggtattttctcgagttaaaaatcaaatggttagtagaaatcaaaatattgacaacgtaaattatctgatggtatttctaaatgattatagaaaaatggttatagtcgttttatcgattattataaacttaaaaatcatactcatctataatgcctaaaaatacttattatgaattgttttgatgttttctcaaaataatgctcgtattactaaaaaactataattaacgtgactaatagtaaatgacttctagaaattgatacacggaaaaaatagaatattccgaaaatcatgattaaactaataaaatcaactacacaaaataataaggtatattttgatcttttattttttgatatagctatgaaaagatttttctatttccttgacatccaatcaatagaattggaggcaaataaatgaaggctgctgtttttcgggaacatgataaagaccccgagaaggttgtaaaaatagaagatgtcgaagttccaaagataaaacctaacgaagtcttgataaaggttgaagcagctgcatacaattataatgacctgtgggccatctggggacaaccaattaaagttccaatgccccatatttcgggaacagatatttccggcacggttgtagaattaggtgaacaggtcacctctcttgtaaagggagacagggtcgtatctcatggtaacctaagttgcagaatttgtagtatgtgtacatcaggtagagaatacgattgtgaaaaaaggcttgtgtggggttttcaaactggtccgctatggggaggatattgtcagtatgcccatctaccagaagtcaatatagcaaagataaacgacaacatatcatttgaagatgcagcggcgatctcgatggttggaatgacttcttggcatatgctagttgatagagccagaataaaaccagggcagacagttttgataatgggtggaacaagcggtgtaggaatggtaggaattcaaattgcaaaattatatgattgcaccgtcattgccagtgcaggcaaccaacagaaaatggataaatgcttagaacttggcgctgattttgttgttaaccatagacaagaagactggtataagaaagtaagagatattaccaaaaaaaagggtgtcgatattgtatttgaacacataggaaagacagtgtttccacaagaggtatcactgttaaaaagtggaggaacgctagtatcaacaggcgctactacaggatatgattctacaatagatctgaggtatcttttctttagaggaataaacatagtaggtgcaactcaaggtactaaagcagagctcgaggaggtattattttggacttcaaagaagaaacttaaaccattgataaacgcagtgctgccatttaatgaaatggtaaaaggacatgtgatgatggcaaacggagatcaaataggtaagactatcacgacgccacaaaagctttgaatttaagattaggcatcaatcgatgagaaaaaaatagaataaatcataaatttgcgagtgattgaaaatggggcagatatacagcaaatcttttatcaagtgtagataacaatggttacgctcaataatgtaagactcgatcatgtaacatcctttggagatgcggtatttgctttttcaattactttcatagctatttctattcaaatccccactttgccaaataatctctctgagtttgaagttgttaacaagatgcttcagcttatccctcagttggaaatatatttcacaagttttgttgttataggaattttttggataaaatatcatttgattttcaacaagataaaggattctcaaaatgtgatgctatggcttaaccttatcctgttgttctttgttactttgatatcgttcggcactacactgaggtttgaaaatcaatacatctcaacttttatcctttatacacttatattcactgttactagtggtttgctttcgctaatatggatccatgcaaccagatacaatttattgatagtcgatgatatcacacaacgtcagaaaaaattatatataatccaaggaatcaatcctactctaatatttgctagttctattggaattgcgtttataaatttgcagcttgcccaatatatgtggattccaattgtcccatcacagataatttttaaaagaaaaacccacttaaactaattcgagttcgattccaatccattctgttcctctgtaaaagaaaattcatttagagacatgtgattggatatttgataccaataggatgatttcaagtattattgctaatagcatagttgggctatgtaaaagtcatcatccactaagaactaccataatgtaatttacgggtcacaaccaaaaagggccatagctttgaaaccacgtcaatagatattgatgaggatgaagtcgaggataaagtagcgaatatttgagagctagatttgtttgttaatattccctgaatttgaaagattttgtcttggattttatttaccactagaatatgagtatgaatataaaaataaaattggaattcctagtagtcaaccaccgtagttttattcaacaaattagccattaaggcgggggatccaattagggatccatctattatgtctgaattattatatcctgctattttcaagcatatttcacaaatcacaacatttccgccatcatttataaaatcagaaacattttttgtcaggggttctaatcccaggtaatgatgaggactctttactcctaactgcacaccctctatgctaagcatcaaagtcacattaaaacccatttttaacatggtttgagaatccaatatggcaatagtagacctccagggttcatcactgcttagatggtaaactatctttgttttattaacgtcttgtgcgaatatagaaggcatagcgagtttagaaaaagaacttgtatcattaaaaaaaatcacgctagggattgtaaaaaaaagatcagtaatccaaagataagaagaaggaaaatagatggattaactttgaatttaattgcagtgaatctagtctcaatcatatgacatattatcatttcaagcgactattaacttatagcttggatttgatattagtaagattctgaaatggattccttttcttaatgatatcatattttctttattttaattgcaagatatttccatagttcatgaaaataaaaagtataaagtgatagtaagtcttgtttaaatcagatcaattaattctgattctgattctgaattttctgtttcccattgcaggttctaaataatttgcaaaatacaaaataaataataaatcaagcagattataatattaatgataaactattcattgcctgattcactctaccccttcatactcttgatttttatgtaaaccacatggagataagatgagattaaaaagtataatgcagacaatcttttgaataagcatgtctgaggggccggaagtaaaaattactgcagacaagatatggaatgcgttatctgctaaaagaataattaagaatattttatttaacaaaatggacaagggaattgaagacgggataatcggagcctctaccgaatacgtcaaaacctttggaaagaacattgtcataaaattttcatctggggtttatctgaggaatcacatgatgatgtggggaaaatggcgaatttatgatagaactgaatatgaaagtgggactgcaaaatcaccaccgcgttctttctatggaaaaatgaaacataagaccacaaataaaattcaagttaagagcgatgaagtaacggatgtgagaaaagattctaggactagattgaccattattactctagataaggttttagttcaatttaatggccccatattgcatttttcgttgaatgatcctgcaactatggagcctatcgtatctctaggccccgatgcattgagtcctaattacgatgaagataaagtaatgaataatataaaatctaaatccagaaatactgaaatgataatctcaactgccttattagatcagaaaatagtgagtggaataggaaacaagtacaaatcagaaattttgtttttaaataagatctatccttttgaaaaagtgacaacattttctaaggaagaactgaataagcttgtaatcgatatccccagaatattaaagtatggctacgaaaataatggaagaacaagaaagcctgaaaataaagaaaagatcttatgggataccactcattgggtatttagaagatctggaaaaccttgttggatatgcgggaccaaaattgtaccagaaaggaaattaacagcaaggccaactttttggtgtcctaattgccaaccaatcaaaatccattaatattggcagctataggctcaaccccacttttttattatgtgaattgcattatgtagttttaaactattttttggattcacttttatttcttatgtgaaattgattttgatatattgtcttaattttttctaattcatcaatatcttttagttctttgtcatatctgatattttttattctaggaaaacgcaaagcatatccgctgctgtgtcggttgcttttttgaattgtatcaaaggaaacttctaggacaatttcgggttttacaataatgcgtctatcatcatcttttaatacgattgacctcaatttctcagtcatataatcaatctctttattggaaagacctgaataggccttaccgattatttttagatcaccaaatatattatttccatattccgatcctaatttatcaccttcagaattagtgctgtaatcttttactgcgagagtataatctgacagtgttcctgctcgttttccatgaccatattcagcgattactactacggcgtcaatcgtatctaactcctcctttaattttatccaatattttcctcttttaccaggataatactgcgataaaggatctttaaggaccaacccttcgtgtccattaccccctgcttttttgaaatccatggattatttcatctacggatgaaataaagttactttgagctatagaaatcatagagtttttaaacagaagatttgccaataacctcttcctggattcaagaacatctttgattactggtctttcatcatagagcattatgtcatatacaatataacaaacgggtatttcagacaaaatacgctctgtcatgctttttcttctcaatcgtttttgtagttcttgaaatggcaatggtttatcatttttgaaagctattagttcaccatctaaaatgaaatttacgtcgtcaccttcgatattgctgagatgacttttgtcaaggcgtactttattctttttttggccagttcttattttttttctttgtacctgcaaggcagagttagttaattctggaaatgcatatgaaatatcagaaaggtttctagagtaaagtttgcaaactttaccgaatttgtgcatttgtactctaataccatcatatttatattcacaaagaagtggtctgtcaaaatatttgataatctcttttgcagtaaacatgacatcagccaacataaagcccatggggacaaatggcttaatcgttactaagttcaaagtatcttttttcgacaataaagctacatttgcaatatcgcctgacatcagtattgcttctctaatactttcaacacttttttcaaatgcttttgcaatggctatttccataaggctttcataggaacctatacgcatttcattcgatattatttttataagatacttagcttccaaaggtgagcatctcaaaagtaatccctttaagatatttttttatcgttgttagaccgtggccctttgagatttgctatttttctcaactgatcatatatttcatttaaagttggtttttctaccagcatttcaacgctattaaaaagcgttaccaatttttttttagaaattgcgtactcggctatgctacccatatcaccatgttctaaatgaatccgcacaatatctgcctcatttaatcgagagatttctaagagagactgtagtattgttctaaaccctatatttagattatgagtagatcctcttggaaaaattcttccagacaaaaaaagaactgcaataggtagagagtcttcccccaaacccgatatatattgtactattaaatcgactttcttattcttgctagttgtagtcctcattgattcacatgtctcaaccaatatagaaaaataagacattttatggtgaatatcattggtcacgtcaatcttcctcaatcaaaagtatggttatagagaattttactctaatattagggattgcgagaacatttctaaacagtttgctttacagtatgaagaaatgacaatagaaaaagaaattatctactttggacattcaaaattgtttggatatagacccaactacattaaggcttaaagtttcaagattacaatgactcgaagcttatgtaatatcaatgtccaagaatgctaacaacttgataatagctgaaagtttttacgtctatttcacctaatattgtagtaacgatactatattccaaacttaaatttctaaatgacatatgcaatactaattacatttagttctaatgaaaatatggacagtatttgaactagggcattaaaatcaaataatgctttatcatttatataaatagtttatatttattttttgttataacattgttgaatatcctatttatactaagttacaaagattttatctatacggctaaagtgttcacttattccgtatagtccaatagaaatgaggattaggggtttattgccatagacaataacctcatttcttggtctctataataagtaactttgatttgcagatcacatatgtattcaacaaacagaacccaaacaagcgtgttcttcattttggttgcataatctttcttaattaatatcacatgaattgcgtacatgagaatcattgtagttgcactaattgttgttctaagatttttcttgtcagataatatcaaaataagttaagatattatgacaggtttcattttttagaatcagaatatatggtttcaaattcttttaaagcaacagaccaatttttagcaagttcatcaaatgattgtacaaacatatcgatagaattggagggttctcctggaagattttgtatttggtcaagtagtttttgttgttcttcataagtaagatctttgagatcgttcatcgcaagttttactactaataaatcattttataaaacacatagtaaatataattatcataaattgttaatctctttaaagctatcatgacatgatatattttgaaatcaacacgatatattgctttgattatttctcgtgaatcatattgacatatctatcggttattgccaatattaaaaaaaatcaattacaataaaagccagcttaaaaatactttccatctacagtcgcttctaataagtaaatgtttaacctaacaacgaatacctatcagaggtatgtatataatcaagaaagtataaacgactactttaatcaatagaatgtaaattgaaagaaattctttcagagattgatattaatgcatctgctagtaagacatgggatgtacttacagatttcaaaaactttccacagtggaaccctttcattcggcaaatcgatggaactgcgaatgttggtacaaagctcaaaatatatcttcatacttcaggtggaaagaatagaacttatcaaccaacagtaactaaggtggaaacaaatcgtgagctccgttggtatggaaagtcattcatacctggatttttcaatggggaacgaatttttatagttgagtcgttggaaacaaatcgcgtacattttttgtacataaagagttctttacagggattcttgtaaatatcataggaaatagtttggataaagatatgtatcagagttttgcagaaatgaataaagccttaaaacaaagggttgaacagacggctatctgattgaagatttgttaatttctaacttatctcccatctaatgataagcatcatctgatttatctttggaagatcaacataaaatactttggacaataataacgatattcgattattcaacaggaaagataaaaagagaaacagaattatcctgttttcataaatcaaaatagatattatgttttttcataagcttgaactaaagtttgtatgtcgagcttttgcatttgaagcatgactttcatcaccctttgtgattttatttgatctttgtctcgtatcattttgggcaaaactgtaggtacaatttgccaagaaactccatatttatccttgagccaaccacattgttgtgcatttttgtccccaccttctgacagtttctcccaataataatccagttctttttgtgtgtcgcagaacacttgaaatgaaatggcttcgttgaatctaaacactggaccaccattgagagccacaaatttttgacttgctatttcaaaatctacggtcatcacagtaccttctttcattccatgaatctcgtacccttcttttccatatagggtaacgtgatctattttagagtttttaaaaacggtgacataaaaatttgctgcttcctcagcttggttatcgaaccatagaaatggagtaattttttgtaactgacttggtttctctacacctacttttgatatatttgattcattcatgaagaagaatataattcgaatatataaaaagggataagggatcaaaagtatagtcgttacgacatatcaaagataaaaaagtgaaatgttatacttgggtataacttatatttgataatcacactaggctcgttctaaaaacattcttcactcttatttatcaagaaactggacaatgtcattgatattgtttgtttcattccaaaattgtaatttcatctaccaaatattctatatggtgctgaaatcattttcgttataggaaataattaattagcttgagtttaactctaatatgtatgtctaacaaccccatgcggatgcgggaatttctagatagcaattcaccttttagttattttttctttgaaagtttaacacatgaattaataatagattttgaccaggagatcttagtacttcgaccttctgatgataatagaaaataccatcgtaatgaattagaaaaatcaggtggtaaccttttgtatcttaattttttgcatgatgcgaaggaaaagtcaattactataactgatcaaaatggtatagagattattcactttaactatctcagctattttaaacatgcaagattctaatctataggccgtataaataatttacaaatcctataataggtccccatatattaggaacccgcccacagggtaacacgattttactacgtcgtgtcttttgaaagtcgactattcatggacgaggattgactgaccattctatttataagtccgaaacaatgagagaaaaatgtattatttgatcaatagaatggaaagagatcatataaggtaacatataaattttaaaaaacatgaataataggcaaatatcgggtatacaagatactttgatgaaatatttcaaactggatgaaataaaaatattcgaaaaaaattttttatgaatagggtttatcacatagcaagcctgcgactatgcaagatacaaaatttcttgcaacagaaccgctaggatccagatttggattgtagatagttatggtcattcctatcgccttttgagacgaggtaagagtttttagaatatgagatagttcggaaaattctaacccgccattatccaacctataatcaaccgcgggcattattctgtcgtccaatacgtcagcatccaaatgaatccaaaatccagataaatcctcattcgttagaagatgtgaaaccgccaaggaggcagcctcgtttatgcctaaatttcgtatatcggaaagatccaatacctgcatacgggtatctcttacattgtgacttccataactagcggattgatcagcatcacgatatccaaaaacaacaatgtgctcatccagaacaaatggttttagaccttcaatattagaaagaatatcgggccctctgcctgatacaatagctaattccatatcagcaacttctccagttgttgaggcttgaggttgataaaaatcagaatgtccgtcaataaaaaacaatccaaatctacctattcttctcaatcctaaaaggacgccaatcaggatgctgcaatcgcctcctaaaacaatcggaaaattctttttttctatttcgatacttaatagtttggaaaggtcttttgaaaatgacgcaatagaagcaccatttaacaaatgcgtgacagggtctcgagctggatcgtaatccattgaaggttcaacatggccggcaaaagttgcattcaatctatccacgagtcctgctttcttcaatgcccgcggaagatattgtacgcctgtatttcgtaatccaagtattgaaggggcatcgattattacatatcttggtccttctgccaatgtggattacaaaccatatagtcatttttttagatatgtatttattttgatcatgaattcagatttacagatattcagtaagattagatttgaagcagcatatatgactgaagtgtgaaaaaatggaagaggaagaagaaaaagattatcattatattaatacattgcttcaggtattttcttgacttgaaagttaatgtggttacaataaccaattttatcttcatcggataatactatttggctgttttgggtagaggattgagagtggcggatgctttgttctgcagagtttccactatggctgtctggtgttattgtgttccttccactgttaaagtggtgttggaaactaaggttgttgtatgagagaaaggctgttcttctaccagaagcacaatcagcattttggtttgatgaaatggatcttgtatgaaaattacgatttggttaaattatataatttttgaaatttttccaaaacttttaagaataataatatcctaaaaataaccatggtcaaaaatttaatacccacttgtagtaaatgtggcagtctcgttagtgatcacatagaaccagaagtagaaaaagaaggcctaattaaagtaggaaaatatgttaacaatgtttgggtttgtaatgaatgtttaaaaaataaataaactatatcatttcaactagaaaattgatttggtgacactagaaactttcttgaaaatagctattcataaggtgccaaaatcatttaaaattaatcttcctctttctgaaactttgtagttgattacaactttgctaccccaattttcttccattctgttgatcaatccttttttgaccatatcatctaagatttctttatgcttaacattattcaagccacagtaactcataagcttactttgattgatttcaccatattcacaaagtttcaagagaatatctttcctgataaatattcgatcactgtattcatgaaccacaattaatcattcagaaaggacaagttgctcttggtaacaaaatgttttcatatgtccgattaggatatcgattaaccatctagtaaattaacttaatgcatttataccaacggatacaactttatctttgtacatgccaatgccatcccaaggagcaactaaaattagcagaataatgaccaaaaaactcgaaactgtcggatcatcctctactgcgcatgaagtggccataaagatgagggataagcaggttagttcaattctagtgatggatgatagatatggcatacctttaggaattgttaccgagcgggatcttgcgagaaaagtatgtgttactgacaaaaatagtactcaattattagcaagccaagtaatgtcatttcctcttatcaccgtgaatgcgaattcatcatctttagatgcagcagatttgatgttaaagaacaaggttagacatttactcgtcatatctaaagactcgaatcaaagcgtggataagaatgaggcgttagaagataaagatctcataaaaccagtcggaattgtcactgctacggattttataaaatttagtgtaacctctgatacggattcggataaagatgcaaatgaggataagaaaaccgagaaaatattagaatattatagaaatgattcaaatcatcttgattaagatgtttattgatctatttattattaacgaactagtttatcatttaaatttggttacaataaaccaaaaaatgactcgatttcttttatatgtgattataggataaagatatcattgtccggcaataacagggaaactatcaaaattggatccatagtaagagtgataaaaaaaagtgaccaaaagacaggaaagataagcgaaggaatagtaaaggaaatattgactaaatccaaattccatccccatggaatcaaagtaattctagaagatggaataattggtagagttaaagaggtagtcaacgtatcaaataatacaaaaggaaactgatttaagaataggaaattctcgtaattattctgttaataaaagaatatatttccttattcagagttaccatttcgtaagccgatccggtcatgaaagtattttatcttcacatattatacatatttttagaatacatcaatcatcttgaaataacaagatgaaaaatctcgaagttggttttttcctaattttttggcatacataaatatatctacggtctattgaagtgcaacagctacaacaaaggtagaagaaacaccaaataattacaaatacttatctatacttacccaccctagatcaacatctctcatcgtatgaatcagctaaattggctagtcttgttctttttttttgttcatttacttatctttgcccaagttcaatctctttcaaatatttttctagccttgctttaatggtctcctttgaaataagactaaagggcgcaaaaggtgtcttaagactaccctcccgagcccataattcatacagtctttccttaatcttatttacatcagtatttgtctttgattcatttaagacattaatcaaaaatgataaaccgttagaagtaatatacaaatgtgatttagagaggatagcatcctcgtcaatatgaatgagatcaccatgctgcaggtcctccaagagtttccacaattcaagaatagttggatagtcattaaccaaacttacctttagagatcgccaaacgtcaatcactgtggatgaatttatcttatcagattctgaagccttttcagtcgattttatatatcctaagtgaaataatatccacatcctgatgaattcataattcttcatttttgtaagttacactacttaccattcactctttttactcaaaaactttccaaacttattgactataattcaaaaaaccaagaatgagtaaaggttttcgtcaacctatccatatgattctttgtagggatagagcatgattcatactttcttttagagcgaattacttaatatacctcatcgtttttgtcaacatcgtcatacacaatttcattgtttggtttttgctctaaaagtgagattatttataacattgatactatagaaaaaatatattgggattgctaacagactgcaatactcaatagcctagcagttttagaattagactagaaagagaatatttaattagtatacaagaaaagttttccctaaataatagaatcaagaaattcaacatatttacattaagaaaatagtatcaatatcaagttcatagattctaaccttattagttcaattcgaatagaaaactttttttcattaaactctcatttgtgtatgtgacactatccaaaattgacagtttatcgattacattattgatggataattatactgacagattgttaccatcatcattaatagcaattcgccctccaatgatgaaaaatgaacaatttctccctcttcctcctcccgttgcagaacatggtttttcagccttaattaaagttagatcaaatgatactatgacatatcggaataaagatgaatcacccgatgaaaacataattttatttgattgtggaaccagcgagaatggtgttatttctaatgctgaaatattaggaataaatttcaattccataaattctatcatactcagtcatgggcattttgatcactttactggtctcccaagcattctaaaaagaatcaataagccggtaagattaatctaccatcccgatacttttttgagaagatggatagtattccctaatggcaagggtaagtccagaatgcctttcctagacatagaggaattacaaagactgggagcaattatagtgacaaggaaaaaccccagtctaatttctcaagacagtatagaagaatatccatatcagttaaacgataaccctgctgacaattcaacacctaaattactggttactggttggattccacgaacgacagcctatgaaaagggatttccatggcagtacaaggaagatcttaatacaggtaaccttattccagatcccttggtaaatgatgaccaagccattgtcgctaacataaagaacaaaggcttagtaatcattagtggttgtgcgcatgaggtattattaacacaattagatacgccaaattgcttacaggaattaacaaaatatatgccgtgataggcggttttcatctaactggtggtggaatttatgaggatgcaatcgaaccaacaataacagaattgaaaaagatagatccaagatatttgattccttgccattgcacggggtggaaagctacaaaccgaataattcaagaagtacctgaaaaattcttacaacctagcacttgtactacctttacatttgattagatcttttaaagtaaccgtatttggtaaagcataagaaagtttaacagtgagcagtcgtactaagtagtcacctttatttaaggtgcaagacatggtcatcatgattaaaactgctttttgtaaatctaaacaaattacagtaacaaaaaatagtgaatgaatgaataacaaatattgaccatttacctcaacgtatctcatctcgacctaattgttgctacaattgacttgtttcttcatgcagacaatatttgacttacatactacaatgcgaatcttaaatatttgaatttgttaagataatattactagaaatttctgctcacttataatgtactaatgctcgtagtggtaaactagaatagtacatgactacataatttgattaaaccgagaataattaaaagataagacttagtatagtgtgaatgaaatatttttacatacaagttcaatgtataatccttatatgatctttgaatgcccatctggacacatttgcttcagtaaagatgagctagccatatgtggaatgcgaggatgtgataaaaaaacaggtatgctaagccctgatgatatcaaatggttttacaaaataaataaaaaaggactttgtattactagaaccgaccttcaccagataattgaagattctaatatgccaaaagatgtaaaaaaacagatacaaaaaatatttactaatatatcttgataatttataacaagatacccaaaaatagagaacagatagttaactataaaaatgtaaaagattatcacggtacagctcaataacagcagtattaccctgaggtttaaattttatatttaattcgcaaataatttatacaataatatcatagtggtatgcctgtagtaatagaattcaattgcacaattttcatttgtaaattctatcatttcttggagttacatatcgtgctacattcattagagatgtattgaatcaaaatgcggactgtattttttcgtgtgatattattagcaacacttgggagtgtttcccccaaagctacggcagaagagaaggatattattaggacaaactatgatagcctaatcattaaaaccttgacttaatctttttgtacgattctttcacaataatttaactagtaaatatttgactatgtattttagtctttgatgataccttattctgatgatacaatatgcagtaattttgatgatattgccaatattgatctcaatgaattccttcggttctaacggtctcgtcctccaaaatatatctgaagacattaattacttgtttagcaatttaacacctgataacctaggcgtcaaagagtattctaatcatactgatagtgtttccaatgcaccaaaagaaccctatgatccgaattaagattggaggacactaataggactttatgagaacaggctttatggcaaatatgaaatatcgaagaaaacaaagttagatatctagtacttcttttattttattattcctaatttatcgcaaaagttacataaactaaccgataatttctaccttattagtaacataataaaaacagaaaataccccagaatttctaggcgctattgacatgttagaatcaatgatcattaagtaaatttaaaggaacaataccaaaaagagatgatattattcttttatctacctatgtacctaattatttatctaagcaaaaaaagcgaggaaaattatcttactatattgtgtaaaaaaatactaattctatgtaaaataataattcatatattgtcataaatacatagataatcatattattttagattatccgtgggtaccagaagtgtttggaatggcagtatttcatttggattagtaaacattccaatcaagctatttacggtatcagatagcggcaacgaatattcgtttaaccagttggatgaaaaaggacacaaaattcagtataaaagatggtgtgcaatagaagagaaggaaattccctatgaggagataaaaaaggggtacaagattgcaaaggacgagtacataataatagaaaaagaggatctggataaaattaaagcagaaactaccaaaacaattgatattaaagaatttataaatattaaagattttgacactatttttatcgaaaagagttattatgtctccccttttgtagacaaaaccgttgggaaaagaaaaaacaaacagaaagaaagtatagtatctgcttccaccagggcctataaattatttgttaattcacttaaagaaacagccaaaatcgcgataggaaaggtcgtactgaaggatagggaacatttggttgcaattcgtccttatcaaaggggtttgataatgcatcaattaatgtatcaagaagagataacacccatagatgaaatagagggaatgccggggtctgagtcttctgtttcttcagtacctataaatgagaaagaattggaacttggaagaatgttaataggaaacttgagtaattcacagtttgatgcaacacagtattcagatgaatatacaaaacaattggaaaaaatggtaactgcaaaatctaaagggattacttacaaaactgaggagaaagaagattcaatggatactagctataacctaatagaggccttgaaagcaagtgttcaaagaagcaaaacaatcaagaactagtactaaagaaatttaaagaaatttattaagacaaccttgctttctgtatatgccttataagaattgggacaagaacatgcctttgaaaatgatgttgattattggcctgtaggttctgttttttcttaaactttgaaatctgaaatgcgttcgagaatttcttcaagattctgtttacgtgataatatatccttccatggacttattttcctcttatagataccaggtactgtatttattgtaaaatcagtaggtacaatgtctcctatttcttcccattttagcggaactgaaacagtggcatcttctacaggtcttgatgaaaaaatggacgctagtgttttcccaaatgaattttgattataatcaaaaaacacttttccttttctatttgttgttttccattctgtagttatcttgccaggactgcgtttattgaagatttgagatatcactcgggcaaattccctcgtttgttgataggtgtacaagttgatgatgggaataaatatatgtaatcctgtttttcctgatgtttttacataagaacttatattcaattcatcaaagataactttcaaacctagagcaatttctacagtcgttctaaaagccgttaaactataagatggttcctttgattcattttcattatcaatatttatgtatgggtccaaatcaaaaactatgaaatcaggatagtttaggccacattcctctgtttttattgcatctatcttattgcattgattataatcattgaccctgctattccatggatgtatttcgatacatcccaagtttacaagccatagtaaagtttccctgttattgcatacaatatggttgatctcatcattatttgattctgaatataccttgactgttctgacatagtgaggtttctcatttttccaatctttttgataaaacgcttttccatatattccatctgggtatctactaagagatataggacggtctcgaaggtaaggtagaatatattcacttattttattatagtattccattaaatctccttttgtaatagctggacgatactctgttgccccccaaaattcctttttcatattggaaaattgttggtcaatcacagtcgcgtgactactgttcttattaggtattatttttaagtcgttatcatcctcatcgttcgttattttatttgaaatttcaatgatacattgatgtggcggcttgtcttctcgaagtctttgaaatataggtgcccgcattatcttattaaaagtccaattgttaaatttcacttctattactgttatgggccttacccatactgtttccctattaagatatggaatgttatcaacaggacaattgggaatttctatttctctaagtcttttatgaattatagagagactttcgaaattaaatccactaccagtatgacctataaatctcaattttccaatgttatttatggaattgttattatttgtggtaacagtattggtattgtttagagaattatctattgccgcaagtaagagagatccaaaataattttttcggttaccctcacctcttgtatagcctatgattacacaatccggggttttgatattttttattttgagccagtctcttgtacggataccagaatgatatttgctatttctatgctttccaatgatcccttccaagttcattctccttacagtctcaaaaacatctaaccccagttcgtcaataaagtcagatattcttatttttgagttctctttcttaatcaggtcgactaatatctttcttctttcgataaatggtagctgcatgaggtcattattgtccaaatataagatgtcaaaaacataataaactgcagggtaaagtttagacaaaatttcaatagtctttgtggagtcaatattcatccttttttgatgattttgaaaatcagggtatccctcattatctagaataacaatttccccatccaagatgacgaattctttgaatatatcttctcttagagcacttttaagagtgttctcaagttcaggatagcggtgagtaataatatcaccgctacgtgattttatcttacaagttttagtgggcctatccataagggtgatggccctcactccatcccattttatttcaaatatccaatccttattgttaaatggtttatcaataagagaggacaacataggttttactccttcaaagcatatctgttttaatgaaggatcttcaaatgacagattaatagcttcaagattgggatcgtccaaggtatctagagtatttggattatctgtaatctctgaaggatattttatggtgcggtcttcagattttatatccttttccggagtcttattggatttgtattgcagtaaatccttatttgtttttcctgttaacactgattcaggtttactttctgttatatctttttcaccattcttgtcattattgtttgaaccacgtgcataatcatcctttaatttaatcaatagccactgatttttagtcctagtctttaccaaagaaaatttgccctttagtttgtgcccatataatacaaacgtaatttttctatattttttttccagctcagatacgtctaaatcttcgggtatttcttctatatgttccttcgcagtatattttgctaaggtacttttttcaaagctgtattcaccgatatcccagactactacagttccggcaccgtagtttcctttaggtataacgccttcaaatgacaagtaatccaccgggtgatcttctgtttgtattgccagtctctttatggatgggtccaaagatggtcccttaggtatggcccaagacaagagaacatgttctttaatagattctagtctaaaatcataatgcagtcttgacgcttcatgtttttggatcacaaatcgaggtcttggttttgatgaatcattgtcgttaactgggatgccggtatcatctatagctgtagaattttctttatttagattgttgtttccattaggctctggagaagccttaaaatttcttttcctcttgtattcgtctaacacgtccaattcattataatcgaatatccttgaattaccggaaaactatgaaataaacatatagatatattttatcatttaaagttagatataatgaactaaagagaaggataattaattgtcctaagacaccgtaaaaacaaacaaacccttcctttcacaagtcagctataaggctttattctgattgctctatttattcatgtacagactgaaaaaaataaagcccccaaatcctaacaacatcattcctgcaaacatataaaacaatagaaaaaatgcacccattaaccaatagaaaacaaaaataaatcccataattaaaaaaatgaaagataaaaagtacaatgcaagctttcccatggtgcttttaaaattaactcgtctactcatgttgtagtttactctttttcctattgttattataatctattaacattacatcaattgtatacctttgaataaattatccttatttgttattgaaagaaaattattgattcttgtatatcagtagttctagatacaaatctggaaacacggtcattattagcaattagaattgccgtatcaatcatactaatattagtacatgacatttgcatttgtactaaaagatattgaaatcttgcaatgagactatcaaaacagataatgataatgataatgatagtttgtataaaaatatgaaaaattaggcaactgttgacctttcttctgtcttttcaaattctggttgatgttgaaatcccttcttgtccttctctataggtttcctttgttcttcatttcaggatatttcatattcatcgtatatatgttatcctaggaagtatgaattatataatatatatggttcagttagtgaattgaattatcaaatccatatcctataaatcgagttacaaatttttaccaaaagttgcgaatctagtatgatataaaagttgcattagtatcaattatggtatgaatatagatccaaaagagctgcttatgattaatgctactgttattggtggattcctaatattacttacgatttcatctttttctcctgctgaattccctaatcgttcaatgtttgtaactattgcggttgtaattgtaattattttttcagttgcttgtttcaattttttaaacgatagtgataatatgggtatattattctctaaaataggatttatatcaataatcctttttatgatgttcataggattagtgaatgtaatcaatattttagatcctacaatctggtcagatatacccggtgcctccaaaatagcaacgaataatggtacattggttaactaggatatgatgggattggatatagacagtcacaaagttgacatgcttttgaagcaatttacatttatttctcttgtgtaataaaatgattatattaacgcagactatcgttatagatgattaattcaacactggtaaactaaaacgaaatatcgccccatccttcttgttattgtctgtccagattttacctccgtgtgcctcgataatttttctagatatatataatccaagtccattcccgtctatagactttgaaaactttataaataaattaggtatcatttttgggtctataccttctccattgtcttctatgacgacttcaatcatttgccttgttccttccaacttgatggactttctttttggccttttaatctttattgaaatccaactttcttttttatcattttctcttgaaatagcttttatagaattatgaattaaatttgaaacaacttgttcaatcctaattctatcaccaaccacaaaatatttttcagagttattgaactcaaattttatatttttattactttttactaaaagattatcaaaattttgtatggtgtttgatattgacatgcttagattaaatttttcttttttcaagcgaaaaagatggtcttccatacgtgaaacatccagaatattttcagtcagggtattgagtttttgtccacttgtaattaccgagtcaagtaactcaatttgatttttgtctttgagtttacctttcacatattctgttaaacctataattggctgtatgggacttcttagttcatgggcaattatatcaagaaactctttttgcattctttcatgagattgaagttttttattaattttttttaaactatcaaatatctcgatctgattccacaaagtctcaaaaacggcagtataagataaagcagtagattcgccgtcaataaaagtagtaacgcctgtagccttagaagtattagttttggtatcgtcctttattttcaatatgattgtttttgttctatcaattattgtaattctattaagaattggaaagtcaaattgagatgtcctaaatttaatttcagagtattttatttttatttgtttcaaatgatctaccttatggctatggattatgagaattttcactgtgactcctttagaagccaatgcatttaatttttctaaacctccggagttaaacattcgtaacaatccgttaaaagagggaagtattatcaaaatttctttctgagctgaagaatataatttgttgattagtcttaaggagtcatcaggatttgatattatttttgctttaaaaagatcggcatccgctagttcgtttattctgtcttttgcttccacagattgttcccaaatattatcaaatattgtagaaaaatactccaagtatagtggatcgttacttactattaaatttggaaacatttccccacctatcattttttctgttgtagatgcaaaacatttatcgcttataacaaaattaatgggtggcctatctgatgtatgttttatttttatcccatctttcataaataacttggcaatattgatatcgttttcgtcatttatagaagtaatccatctgagttcactatgctttctttgttgatgatctcgtattatgttcttattgatattaagatgatatttatgacttaattgcataccaccaatggttgaacatgtacgtagatactttgactctttgattattttatgaattttatcggcaatttcttcaggactttctaaaacttcggttttaattggttctattccatattcaatttctctgattcttttgaatgctggcgtagcgtgcctccaaagggtatcaaaaacatattgcccctgagcaactacttcatctacgttgctgtatatcacctcggttaatggctgtgcttctttaagtactgtagtagccatatactcagactcattgactgcaatgcccccctttaagccatctagatgccgtagttcactaaccaagtttaataattctttacagtattgtatattttcaggagtaacttcagtaatgcatctaatttttccccctctcgctaaaatatctttataaccgttacgataatcgggaagctgaactactatagacggagccttatggtcgaatgtgatatccatttttattatggtattttgcataaacctaattcctctctctacggcattctctgagccgtatagaatttctgattttgcaggtttggcattatttttcgatatcactactcaaaggttattgtagtcactggatataaaaacaatttaagtcttaatcttaatcttatcttgaaaagtttaaaaagtgttagttaattcaattcgacttaattaactaagattatattcgactctcagtattttcattttacttctcgagtataaaacattaacttcatatttttaccatatgttactttgctcagatcaatgaaattatttttatttttatatacgacgttattgtttagtacaatagttgacaatctctggacaaactacactccgtaatcgaaaaactgatttgatatatgatatggatactgcagtaagttacggaatccgttttttagagaatgttagggaaagaatggacatttgcgtagataagaatggaccttctgtaattatgaaatcggatatttataagaataattatgtaaaagcaagaaatagaggagcaaaaattcgattcatcacagaggttacaaaagacaatattgaatactgtaaacagcttagcgagattgtaagtgagctcagacatcttgatggagtcaagggatccgtatgtgtaaatgatacagaatttttaggtatgacaacatggagagaaacaaagcttctgaatcctgttatatacagcaacgaaagggaagtaatagaacaacagcaatacatatttcaaatgttttggaaaaaggcggaaccttttttacagaagataagggaaatagaagatggaattgttcctgaaattatgcaatcaaggaatagccctgtagatatacaaaggaaagtctttgatcttttaaagtctgctgaatcggaaatattagtaataatgtctacctctaatgcatttctcagacaggctaaggtcggctcctttcagatactagaggagttgggagagtcgaaaccatggataaatatcaaaattctaaccccaaaggatgatgaaatagagaagatgataactaaactaaataaatctaattttgtagtccggtgcattgaaccattatcgaaagtatcaattttggtaatagatagaaagcagtctctcgttgcagaaactaaagatgatacaaaacaaataataacagaagctataggatttgtaacgtattccaatagcaaaccaactgtattatcctatgtagcaatatttgatagtctttggaaacaaacagagatctatcaacagctaaaagatgcacatgaaaaattaaaaattcatgacaaaatgcaaaaggaattcataaacatagtagcccacgatttaagaacacctcttactcccattataggtttaacagaatatgtcagagacaagacaaaagacatacatcatatggaattattggacagagtagtaaaagatgcaaagaaattatcctatttgaatgaaaaaattttggacgtaactaagtttgaaagtaaattatttaaaccaaataaagaggtttttagctttaatgaattgatagtgaatattatcaaagaattagaacacatctcggataatacaaagaaaattaaatttgaataccattttgataccgaatatctagtggatgcagatagtagaagaataggtcaagtaatttctaatttaattgataattctattaaatcaatttcagaacaagatataggtagaggagtaatatcaataagtattgaaaagacaattaacgccattaccactaccagagacgattatgattctcaacatatagttattgtcagtataaaagacacaggtattgcattagataatgaaatattaccacgattgtttactaaatttgcgacaaaatcttttcagggtacaggactgggattatacatctcaaaaaatattatagaagcccatggaggcaaaatctgggctgaaaataataaagatggtatcggagccaccattacatttactttgcctttaacaaatagagtaatataataggtttgtgatttatacgactcatataagatttagataaattaatgattggcgacggtttttacactgaaaaataatcataattggcgctattagatttattataatatgtttgatcctgagcgtatttaaatggagtatttctatcggtaatatgtctcagatgcaattttacctctaaatcatctatttttcatatgcctttgagaggcaaagtggtaactatgttgccctaagtggcagtattatctttttcagcatcttgttgattactatcgcttaatgcttcactaacattatagttattgtcgttttcatctaacccctcttctttatgtattttttctacgattttatcttgtgcataaacttctttttcttcactcatcattcttaaatatggaacaaagtatttaaaatgcctcaattgattccaaatacaaaactttacctatcaaattaggttaagttttgataaataatttagtattaataataataatcatatataccaaccaagacctgatgataaactctcataacgaccttaggctctacagcaatgagtatcagtaaaaatgcctattacgggaggccaataagggagttaaaattctcgtaactatgaacctaggaatgacaggcctatacaaaccggttattaaaaattgtcactcgtcggcgctccattataagatttacagttaggacattgcaatattatatcgcgataattatataccattacattttctgccaaaacaaatccacaatacccacatatgtgggattctagtacgatctctttgaataaaacatcattatcatccatagtaaaaagtgtcttcgtctcggtgtttggtggcgatatgacttgaagcttaactattttagtcatatgacattcatctacattatcagatttaaggcatccttatttttgttataattaaagataattgaacaatgctacttcaataatgaagatctatgctgacaattatttagtaaatttctatatgtcgttttatttagaaagtgtcaattaacgatttcgataacgtttcaaataaatcactgtcaatttcttatcataatacctgctaccccttttaataggataatgcggtcacgatgataggactcgtataacaaatctagatagaatgatagaattaggtatagtagtatgaaagactataatcttttgggaaagttctacaacatattagaatttattaagttttacaatacaatgcattgcgatacaccttaccatatggaccgatgtacaaagctaactttttcttctgcttttacaatacatatctacctaatccccgggtcagccggtagttgaaaatcttagtatagtaattaaataagatcttaatctacagtaaatatgatatctgatgatgtttctccagaggtacgacggttaatctatcttgtaacaaaaactataattgaaaagacaaaaagcaacttaaaggcttcgattaagtttagacaagcttacacggaagcttgtaagaaggataccaagaataaatttgaccattcaaacttagaattgcgtcaacatataagagatatcttacttagaaacgactacatttttgttaatcccgaggatgtagaagacgtatttattacgaaaaaagcaattgatcaatatgaattgctttccaaggataagtgataattgttgttacctaatttgcgaatatagaagaaccctttaaagtaaatacttgatttatcgtttgataaaacatttccttcatggtaatttcatttgagtttgtctttttattctgattctttgacactcatatgaacgttatatctttgaaatccaacagtccaggaattcgtggagttttggtccgacgagatttattgaacgatattcatctactaaaataattgctccatgatcctctaatctgttaatttgtatagtttgtatacaatatcgttattctggacctgattcaattttatagactactttcttcatctagtcgatttctttttttattatgttacggtattttgattaatgttccgaatcaattaaaacattgtcgtcttttgttttacgtttatcgctgctaccatattgttgggcaccaccttcatctatcattctttgcctttctaattcactgtcagaaactaccttcttatttttattgttctcttgcatttatcttatctttagttaactgtgtatcattttatattaggcatatcatatttatggctgcagcgtctgttagatacttataaagtatgttaaaattacaagtcaatgagatatatgtagacataaattacaattgtccaacaagatggcaattttatgatgtcttgattaattatttaatagataattatccatataataattttgaatgtaccgtacaatagtaaaaactcattatagtaattttcattcttcctatagaaaaactttcgacttctatatccgagtgaaataatgtatcagtaacatactactatcttgtgccgcttaaatagtattataaacaatacaatttgaaaaagattgatgaaaattttaattattgcaaattttatgctgtcatttattttgacagcctctttagtaagcaattcattggaccaggtggcattggcccaagacttatccgcgattaaagatcaagcaacaaagttactgaccggaaatgataatagtcaaagaacagataatagttcgacatcaactacagacaattccacctcatcggactcatctctatcacaaaaagcaactgattcattaggtggattattaaaatagagtatgataagaagatctacaggggattttcctgtttttgatatcaatttgttatttttgtagtaccattatttttaaattctatcaatttccagaaacaacatattatccgttgaatcgattaaaaaagacatcgtgattccggtcaggattaattccttatggtaaagtctctataataaaataaaaatcagaagaaatatagttttcttgtatctaaatacaaaataaagattattgtatttctgttatttcaaatgaatcaatcatattctgaatgacaggcaatgaatcttcaaattctttagtagttccaccataagttaatacataaaccatatcatctgctatggcccaaatttgcaagttttttagatttacaccttctaaagtatatgtatatactatttggtgtgctgggtatccagatagagtagaattagaagactcaattagagtatagttggaaaactggctttctaagatactcagagatgaatcactatattcttctaacgtaagatttgaaagattgggttctgtagttacagctatggattccggggcttcgtcggatatcgataatcttggtgatataaaggatagactttcttctttaatccaatcagaagggtattctaatgtaaatcccaggtttggattatcatatattaatgattcactcatttcatcttcactatttatttgagccatagacgcgggcatagattcgactatacaaaaaggtagtgcaatagacaagacatacaaaacagatgttgttattttactcgttattttcatactaattaattaatatttgcaatgtattaaaaatataatgttatagttgctaatttgggaggaaaataaaccataatcctatgctagcaaatattttgcacagacccatgactagccaacatgaataattagtgaattgaattttattcagaccgagccaacttccgaattagtaaaatcattgaaacagtgatgttaaagatattgccaaaattacaattgttgaaaactgtgtagattcagaacgtaaatacaaatactctgatatcgacgactaaaaattataaattttttcattttgggttaaagttaaaaatgtaaaagacgattttatcaaataaaatgttggccattgattatctcaacattgtctattagtgcatatagaaatgataatgagatgatcataagaagaattaaaaactatggctagatcttcgtccctgtgggacataaaaccaaatagaatttctaataattaatggatttaatgtaattaagcccaagaatcgtgaataagtcttaaagatgagaattacaaaaaagagtagaattgtttatctctgtatttcgcatacttgttcccatcttggtctatggataaattaaagttatggttgtaaaaattgttatcgtctacatgatcgtaggagcttattgatataaggatataaggttaaatgtaatattattagcgtaggaataaaatgaaacgcgagaaagaaatacaagtagtttttggaatcttatttatttttgggacagtattgatagcagcatcaggcactttgaatatattgaatgcccagacaaattcaacaataaacccaggccagacaaattcaacaataaacccaggccagacaaattcaacaataaaccaaactaacactttcaccaagaccccagcaaagacaacatcggcacagacagaagcctcagagtcaataaaaggagctataacagagactggaaaattcgtaagtaatgttacggaaaaaattgttacatcaaagacagcaggaacatttcttaacgaaacttcagaagtactaggtgacgcctatgttgaagctaaaaggttctttagtcctaactagttaaaccaaaaataaataatacatattttctcctattttatctcaaagggatactctgggataatgagtgccgatatcggtatattaaataggattctaatatctatatactttgataattaaaaaaacttgtattcaaaatataaagtataaaatatttttaaataaactgaaatcaagagttaatgaaattacaataaagttacttgtaatatcacttgctgtaatgtctatgacattagctccgtcacttataattaataaatctgcagatgctgcattacattcgtgtgaaaatacaaagtgaatagatttcatcagattcgactagctttatgttttaaagaagtacaaaagatcttaaaaaatcgaattttccgactaaattaaatattttgttgattaagattatataattcatgcatggaccagactggctttccaatcccattatttcaatcgtttttctaatcgttggatttttattcttatactttgcattgagaactgaaaaagagtatcgaagacatcaacatcacaatgagcacagcggcatagaaatcaaattcattggaaaaaaggtagttgacaccagtaaaggatggttattttttacgctttttatcggaggtgcagcattaggtacacactttctatcagaatacacatttcatctttacgatacaacgtctattgatagtattactcacgggttatctgcgatgggaataacggcaattgttctaaattttatgattacaaagaagagaaggtattattttcctattagtataggggcagcttggataggatttacgctatgggaagtttatgaatggattagtgtaagcattcacggtccaactggattcattcagacagaacccctagacatgcttgtagatttatgggtcgacacgttaggaagtcttgcaatttgttttatttataaagaatttaccgactaaataaaatttatttgatccacgaaatcaaagtacttgtaccaaggatttcaaaatatatgaaagctaaaattcatacattattttataaataataaatccttatggagtttcagtaacgcaggtaaatagttcatggattattttgatcctttaaaaattaagaaatagtttataatgaagtaaaaacaaaagatatagttttacgaaactagatcctaatatattaaaagaacctgacactttttctatttagtttttccctttccagtatcataggaatatagacaatagaaatagttgaagcccaaggttgtaatctttgtttttaaccttaaaagggaacgtatttaataatgttaaatttcaaaaaatttttaattgactaaaaaatttccaaaatttgagggcatttattttatatatccaaatgtatgagtcagtgacatttacactctggccaccgcataattaagcgccttggccgaggtattgcattaaccccccatcgataaataaagttgtaccatgaatgtatctggcatcatcggaagctaagaatactgcagcatgtgcaatttcgtttggctctgctgctctctttactgggatcgactggacttgttcctttcttacctgaagattatctatcgcttcttgattcatgggtgttaaaaccattcctggagcaatattatttacagtaatatttttttctgctacttccagtgctaaacagtatgtaagatttctcaaagcgcctttagcggcacaataatcagatgctcccactctagggatttcttgatgaacactcgttatatttatgattgaggcattctttttattgttagacaattctaattcttttaaaaagtacttgcaaaaataaaaaggcccatataaattggtgcgaattttttcatcccattcttcaatagacatatcctttacatgctttccagtactatctgttgcggcattatttacaagaatagtagggagtccgagtttttcttttgcttcctcatagaccttttctatatcagataaagacttttgatcaagttcaacgataattacacgttgtcctgttttctgtatagcttttctagtttcttctataccttttgtatctttatgccttgttatgactatatcagcaccttcttttgcaaatgcaatagctatagcttgacctatgccagaatcagatccagtaacaatagctatgcgattttcgagtttctttgtatgagaaatagattcattgcttttttcatttgacaatacaaatattctaacatcaaaccttaataggtatagatagacagagcatatatggataaaattgtattttaaacttgtttgtttagttaaataaatcgcctaaaatccaacgatcaacataaaaacaagataaactctctaaccgtaatcaagtcagaactgcattttaccataatgccgggtagataagaactttagactaatttcgataaatacttgtttatacgcaccatcttgttgctattgactttaatatggagctaataaggaatgatctaaatattaattagcaaaaaatgaaatgtcctcattgctttttggaattaataataacaccgctatacgacaaagaagtggataaatgtccaaagtgtgagggtatttggttagacaagaatgattcagaaaatacatttgactttattgatgaagatggtgacaaagataatacgacatatcaagattttcaacccaaagagaattctaatgacgaaaatgttgagaataaacttgaatattattattataaaaagccatttaaggaaaatgaaaaaatcgatgacatgtttgattttgaataattgatatttaatatatagacatacaaaaatagatgcaattaaaataataccttcttaccgttattgtttgctatcagacgtaaccatctttcataattcttcatagaattctttgtaactgatggtaatacgcaggtttgccattgtttttcaatagatttaatagttaattcagtcgttctgtcaatggttcttcaccattctctttctattattttcttcattttattcatataaatttcttttagtgctgtaaaaaattagctttctaataatttcttaattgtttcataggatctatgtcacagcaagaacggctgttgaaaacattatctattgtatgaggatgacactcaaatacccatgtgctaatccgagtacatcctgcttcttctccaattctataggaaatttcataatttgagttatatcggttttctatcattgaatatatcactttatgatattaactataatatggtaagtatataaactggtaagtgattaatatgtaagtaaatatagggttgttaagttggtagaactcaaaacctcagaacagtatcaagaaaaggtaggaaatccaagtcgccaaaagctaatagaggatatggaatgcaaatgttgtcctgtgtttaacacctttaatataattggtaaaaaattttctcttttaatattacgcaatatgctttacgataaacaaaaacgatttaacgaatttttgaattctatagaagagatcaacccaaaaactttgtcaatacggctaaaagaaatggaaaaggatggtcttattaaacgtcatgtatataatgagactccaattaggatagaatactatcttactcaaaagggaaaagagctacaaccaataatggaacagatggcgttgttttctgtcaaatattgttgtgatcaaatatttgacaatcccgatccggttaagattgaaaagataaccgccaaatctattagaaagtatatgtaattaacagatcttcttatatgatttaaaactgctagtcccagatttgaactttaattagagtttacaggaagcaaaacaggaattaattggaattggtggatctgctatttggaacaaataatatttacatccttttaatcactactgtatatagaatctatgaggcaactttttatatctctttttaatactatttattccttcaatttctatcaacttaccaaatcgtcacctaatattttaaatacttaccttattatagttaatgagataaggtaagtaggcatgactaaagatagaactgaaaaaaataatacgatcaacgtaacgacggttgttagtcgtcatgcgtggttaactttagcaattcttagtagcactctattgacagtttttttctcagaaaccatgcttctgcctgcaataccagagataataaaagatttgaacatttcttatggaacggctgcatggatatttagtgcttacttaattgtagctgcagtaatgactccaattgctggtagactttctgatctatttggaaaaaagaaagtattactatcattacttgtaatatatatagcaggactcacggctggcggactagcagataacataacttttctacttattacaagaattattcaaggtgtggggttagcagcagttccagctgcatttagtcttcttagagatacatttccaccggctaaattatctatagcagtaggggtatttggatctgcgtattcagctggttcagtagttggactattggttggtgctagcataatccaaacctttggttggcatgctactttcctagctataatacctttctccattgtggtaactctgttgattgcaagatttgtaaaggaatacaatgtaccaaatctatcaaataattcaaagactccaggagatgtatcagagaaaaaaggaagaccgttttcaatagatattaaaggtatagtggctctttctattacaattgcttcatttcttattgcacttacaatcatacaaatcggcgtaaataatgaaaatatattacaaattgcgggagcattcataatatctgcaatttcattatctatctttgtagtaatagaaagaagggcgatacctccattcgttaacttgagattattacgagatggaattcttctaccttcatttatactattaatatctacaggaatcgctatgttcatgatttatccaacaatagtccagttggtgaggagtccaattccgttgggtttcggaggtgattcgatagacgccgcaaacgttcagttaccttttatggtcagtttcttggtgtttgcaagcattactccatttattctaaacaaaattggcaatataaaaccagccataattggtggaatcattagcctatttggtacatttggattactaatatttcattcaacggagtttgtagtttctgtaaatttagccacgatcgcagtaggcctatcgcttacaatgaccacaacgtggaatattatagtgtcatcatccccaagagaatttacgggaatatcagtaggaattggtgcactattattgttcataggtatggcaataggccccgcactggctggagtatatatggcagatcatgagaatattggaacagtagaattatatccatcagctcagtcatacaacctagttttttttaccgcggtattactttcggcagtatctattggatttgcgtttatattaagaaaaacgatgtatgctagggttccagcaaaaatacccgactagtatccccaatttttttagaatatttaaaagatatttcaaactacaagtcctctacatgggaatgagtgctgatatcggtatattaaatgggattctaatatctatatactttgataattaaaaaaacttgtaaacaaatattgttataagtaggtcagaactgcattttaccataatcccaagtagaaaagaactttggactaatttcaacaagtacaacttctcccttctttgaatcttctgaaatcatttttgcaataggatggtctagtgtaccaagatatttcaaactaattctgtctcctagtggattgactatttttagatcttcaattatcgtggcaatacccttacctttaactcccctgacgggaggattttcatcatcaatggaaaaataaatagttgaccttttttggatattttgagtttttctagctgatttagatgtgtttatccagagtttttctccatctttgtcatagtaaaaccaaactggttggatatttggatcacctcgttcatcgatggtggctaactgcaaattcagtgaattttcaaggaatctctctacttcctccttgctcatactaggaatttcgggagtggcactaataattttcataaaatatcaatcgtaccaatgtagataagagttccttttgcattaggacccgctctctaaggaaatcttgtggcttgaactagttgaactagacacatggtgccacgaatgatctctgttagagataacataaatgcaactatctgtattcactttgtcgtatgcgagcatggttgtcttttccttgctcaggactaacttgtctgatataacaaaaaagcttttgtcagcgattcaacttaattataagatatttcaaaagtcctcatccgtagggatcaagttactcgaagtaagtgggtgctaatgaatatgtcaagtctagcggatactgtataattataaaatcacagattttatccgaactgaattgtgataatatcataaatattatccagttattgatttctaggcaaaaagtattattttattgaatcaaatcgtcgttgataaattttataagaaactaaactatgcctaaattagacgatttactatccatataatatctcttttaacatatgagaagcttgatcaattgctcctctagcagctggtgtatcagtaatagcattcaacattacaaagtcatgaatggtaccaagatatcgattggcagtagttggaactccagcttgcatcaatttatgggcataaacctctccctcgtcacgtagtacatcattttcccctactaagataagtgtacgaggcattccactaagttgttccatcgatgcttgcaagggagaaacagtcgggtcttttctattagcatcatctgaaagataattattccaaaaccatttcatggcttctcgggtaagaaaataaccttcttggtatttcaaataggaatcagtatcaaaattcgcatcagttactggataaaaaagtaattgaaaagttatgatgggaccactacgttcttgggccagcattgcaactacagtagccatgtttcctcctacactatcaccagccacagctattctagatgtatttagatttagagtttgaccattttttgcaatccacaatgtagcaaaatatgcttcttctattggtataggatattttacttcaggagagggtgaataattaacatatacaatagctgcatgggcaccatttgcaagttctcttaacaatcgctcatgtgtatcaaatccacctagaatccatccaccaccatgaaaatacatcacaacaggaagattttcatttttactgccctccggtctaactattttaatttgtaactcgccatttggaccatttgagatggtatgattatctatctctgcaggaagcttttgaacagatttggattgtagaccagataaaacagcacgagcatcattaggagttaaagtataaagtggaggcccttgtaatgattctaaaaacttaagggttttttgttctacggtactataatcaaatttactcatatcgcatatgagggttatcatacttatttatctttaaaagaaatttgaaaaagggttgtgtcaatatatccaggtttgcaaaatgaaagaagaagcaccatcattattagtaacagtactcgccgtggaggattaagttcatagtggtaattgggtttgtaattcaactaaaaaacagattgtagaatcaagtcatgtttaacaattctttagcttcgtaaaaagcagataattcttttgatatgtgttcagcaaatattccaagtagttcaaattcaataggtgaaagagtctttttactaaataatgcgagcactcctataggttttccagcatgtgtaattggataacctgcaaatgatcttagcttttctttttccgcccatttggggtatttgattcttggatcatttataacatcatttgtaattactggtttatttctaataacaattgtacctattttactgtttacctttattgatactttcgaaaactcgccggtaatattcctatatatccctgaactgaattttaagataaggtttttgttatctttatctaacatccacattcgtgcaaaggtagcatcaaaatatttgaccaaactgtctactgtgagttgaagcttgtgttcaagctttctgatttccttattgaatttattattttgtaaattctaaatttcttttcgtttgatacttgctcatctaatatcgaataaggagttgcttttatgattttagaatcataagttcgatattctgaaactaattctgtgaagcgatttataaaattgtcactttctaattcatattgctctatagaatcaaaaacaaaatgacatatcatatcaaaatccccacccattctagcagaaaataaacagaaatgtgattcgtcaatgtatttgtttaatctatctaaatggttagaagtattcttagtaattttgaactttaataatatagttttactgattttatcagaaataagagagggattgaagatcggcgaatatcccaaaatggtattagattgctctaacctccttaacctatatcgtattgctctctctgttattttatgttccatttgtttaagatgaccagcaatttcagctacgggtatacgagcattcttacttaaatctgaaagaattactttgtcaatttcatctatcatcttatgacaattaggataagaagatgcttatttctatttcggaaaaaattaggtaagttataacttttgattaaaaggactccataactttatttccgttgcggaaatcttggaacatcttttgtttcaatgaagaatattactttgacttgtgtatattatagtatgcaaccagatttatttgaaattgatagagtaattgatgacatggcaagagcttatgcggcaccctgtgctaccacatggtttaaggtaacagacaacaagagaccgacaaaagaagaatacagaataaaggtggtagaatttatgaaacattttgagtatgttctatctaatctgtatcctgcaaatacacatacagaatatctccgagattatgttagaaatggactacgaaaagcaatccatagtgtaactagtgggaataacaaagaagttgaaagacgatatacatactacacggattatagctgatagttaggaagaaaggcagtaacagattatgttaagactaataattccgctaatcataatctttataattgtaggagctataagcttttaattagcgtttactttttaccaaaagaaaaatgtgaatgtcaatcttgatggtatttgttatgaaattttgggtcctgcatatgtagactataaacaacttgaagctgaaagagagttgagggtcttagcacaggaatataatgcaatagaaggaccacatgcaataatacctatagtgtatactggaacaaaaggtcaagtgcaagattttatttcaaagtataatgccaaagtaactgacattcaagaaattggtggcgaaatgtattatagtaaagaatacgtcggcaaaacaattatcagaggagaaatatcaaaagaaagtttacttaagataatatctgatttatctttgctcaaaacaaactctaatgaaaacagcctatacaacttaggaatacagactaacactttcataagtttacaagaaagagaaaagattacatcagattctactagctttatgttagagggaatacagaaaatattagaaaatagaaaagataacattaagcaaacagaatgccgaagtccagttgatctaatggctgtataaagctcaaaataaaggtagcagaaggtctaattttcatcatctttaacctttatgaatcagaaacacagatatcggtccacatttgttgagattaagttcctatggtagcagggttctaattcaaatgtagaattttctatgtccatataggatagaatttctaaccctttgagacgaaatcagtccttaggatttattcaattgttgttatctaactgttagtaaccccatagcttcgattttaatagtatttcttcttcatctagcaaaaacagtatgtacgtgtcagggggagcgaacaaatcatttgaaggagattttacctaattcatttgtggatcatgattatagttcaagttccgccaaacattgttccgtatttatataatgagtaactgaacgtgatatgattattattaccttattaatctctttattatgagatatctaattttgaattcttgatttggttatttactaaagtaacaaacattgttggtctatatgcttaattaacttttacaagctttgaaatttttactaggaacaaggtttcaccatattttgccaacttggatcggtcagatagaaaaacaaatataacgatttctgatactataagatagtaacctatcaatattaggttgttaagtttgagttatacccataagcaaagctcggtactaagagaccccattaacaaaataggctttttgaatattcgaattcttagcgcctatcctatcttatgggaaggccaaaaggactttatgtaatctttaattgcaactttagataatttactaatgtttgaataaaaataatctaaagaaaatcatttattcagttatagttttatcactaattatagtaacattttatttggtttcgcccctatttatatcaacagaagtaaatgaaccccttcctccgaatatcaataattctgttgcatttgaagaattcacaaggatgaccgaggatgagaggacaaacatggcaagaagcatgactaatgaacaaaaaaaccaaatgttagttcaatttgcggaattggggaataatagtaggataaatgatgatctccatactaatgtcacgaccaaatcaaatcaatcatcagaatcagcaacatttgtaggggttaatgatggtatccataatgctgaaggcctagcaaagataatccctttgtcggataatagtaatatattaagactagaaaatctgaaggtcacaaatggacctgatctgtacgtctatctatctacagataagggcgcttctgactatgtcaatcttgggaaattaaaatctaataacgggaatcaaaattacaacctacctcctgataccgacttatcaaagtataatacggtattaatctggtgtaaagcattttcggttctatttggtagcgctgaattcgatacatgagaaaaagcaataactggagatgaagttaaatctgcattctatttgataccaagttataaagttaataaattcttttaattaaatctctggctaattagagaaaattagcatcaaatattccaattgtactaaaagagtttattcgttttaaaaaactattagtatcaatttaaagatctggaacagatctggaatatgcttataatcaaataataactaggaagcactttttttatagaacacgactccttcttgttatggtatcggatctgctattatcaataagcacaataaaatattggttatgatatattataactttagtaaaaaaatttagctgtagaaacttttattatcattatttatgatgaagagtaattacgttgtctaacctactataatggttatattgatgaaggaattctcataatgtgaagatgcccatcaacattttgcgatcatctccaacttaactagattttcattaactaaaagccatggctaaccttcattcacatacagttttataatatttggttagaatgaaagtttcatccaattcgactaaattgtccactccaattaatattaaggttatataatttgacgaacatacatgatatgaaccaagaaaaaaatgaccaaattccgcgatctggtggaccagaaagtaaaacaggcaagatgataaatgaacaaaatgccgttgagggtcagagaaaagaagttaatgtagaaaattacgctctagtttcagagattggacaattgttaaaggacgtagattttccagcagaaaagaacaagatccttgaatttgtacgaggtcaccatgtagttcaaaataaagaaaagattttagatgtgttaagtgatttggaggataaatcttataataacgtgtctgatgttactacttcggcaggactagtttacagataaattttcctgtattatttgtaatttaattttaccgaaaccaaagtttctttattctctaattaaccgaattcatttaactcttaaatttatactacaatcggtctatcttcattgatcaaaacctttgattgaaataagaatcacaatatattagtagcagtgcttatcccgtcggaattaagttcctaatggtaactgcgcgccaccaaactaagaaatatacacgtttattgattttcgatcactagtaaaccgtttagattagtaatctcattacaaattgtttttagaataatttttatcttatgtttatatagaatgacacgtactataagacatgtccacacccccagctgcaatggtggtggacgatgatgaagaacttgcaagtctttttaggagactgttagaagggtctggttataattctgtttctttcaccgatccgctcttagcactcaaacattttaaggatgatcctcaaggatattggttagtaattgcagacctaaaaatgcctaatctgaacggaatcgatcttgctaaaagaataagagatcatagctcttctgtaaaaattctccttattactggattttttgatgacgaatatctcaatggcgatgaatttaaagaagcacgtatatcaaaggttttgcataagcccgtaaaactaaaagaattatcaagatgtgtacatgaactttgtttttccaatgtaacgacccaatgacataaataatatctggcaatatcgacgaaaccgacttagccattcttcaggtattggttttgaagacttcataaataactaagataaaggagatggcatatattctatttttacatctctgaaattttattcataagcaaattataatgaagttcggttaatttgccttttgaaaatgcatccttaatctctcttacaagttttaattttaatgaaagatctatttctttatcatcatacatagaatcaatttttttcataaatatctcctgatatagtatggatatttcatctttcaaattcgaatagtgaaattggcttatcttaccttttgaaaatgaatcagagatttcatttttcagtttgttgagtgattcaaaatcattatcatctcgtctgcctacatcgtacaaagactttattttattacggtgaagatttgatttttttatatctcctcttgttttagcccatcctataatacttggaatagatgcaccaatgatagttgaaataattaaaccatagagaggaatccagtatgtagtaggaaggggagcaggcaattctctaaaactagcagtaaatgtaccatattgggttatgcataaagatgtctccgcagtgtcgttgtaaatttgcaaagttttttgtatcggttctatgactggatcaaaaagaccagtggattcttctacacatgatttcagaggcctcgtagtatttgaatcgatattctcgctccagcctacaaactcatacccactatttgcctttgctatacaggttattcctggttcttcatacaagtactgatttaccggatattcagctttctcatcgccacacaaaatcctgcctgaatttaatggggatatattaaatgtaattcccacggcaaccttgtgtttaggaccatggattgcaaacaagctatcagaattctctgaagtcaaataaataatgttactgttctcatttacttcaatattcgaaagtggttcggatacgttgatattaataagtttggttgttttttcgttcagcgaataaaggccgtgctcagctagtacgtaaactatattggaattttcattgacttctatttctaagagcggccctaacaaaggaattatcttgtcaattttaggatttgtagtgccatttataatggaaatatcgcgatcagaaattacataaactatattggaattctcgtcgacttctaaagtacgaggcgggttatttaacacgacacccatcatactagtatcattatactgtttgtaaaaattcttctctgtgattatataaacagaatggtctttttcattgacttcaatatcaagcggctgttttttatctggaatggatagtttttccaaaattttcaaatcattatcaaaaatgagcagttcgggtggatcttgattaattacataaactttttctgcctcttcatctactgctattttagaatagtttgcctctacatcatatttcttaactgagtcgatattgagaggattggagccattatcatcaatcatccttataccgtcttttcctgccacaaacaacttactttctttttcattgacttcaatatcaagcggctcttcattcaaaggtatattttgtagtagctcatcggtcctgccgtcaattatggagatagtttctgaaggagatttacctgaaatatagacatgatgtattttgtcatttacttcaacatcgtgaggtatggtattaacaaaaatttctttcaaggttcccaaattactgtctaaaactgatatagaatttgaacgttcattagccacatatactttgtttaaaaatttatcgacttttacttcatttggctctaatcctacttctatttggggattagttacatgaaacttttcatttatactttccaaagtctgtccaattgcgtaattattgaaaaatagactaaacaaaataattaataaagagagaaagataacaaacaattaaacgccatctccattatatcctaatcagattactatttgacagaatatttcatagaccattcaatttccattctagtagatagaatatttataggttttgttaagacaactcaagtcatcttcatttagtatagaataaatggtctctccgatgactaaacaattattaatttgtgaaggaaatgccaacaaaccgtatcagtaaaaaagtggatataatatcgaagtaacaccactaacagctttaaagattagtaaaagatatttaaaaaggggataatttgctacggttataaggtgtctacctaacatatgtagtaaatcttgtagaatatttagatatcatagtgagtaactttactctaatacattttgtatttggtataccgtctaccataatccttggttagatgatagattattattttttgtgggttaacctaccatatttctaaaaattggatcaaaattatcatgctaacgttttattcaatgcctctttaaagatccaaattattatgcttcctaaactagtagtataattctaaaataattgagcgttttttatgttaagtaaagttaattatgttgatgacagtcgcacaaagttttgtagttaggatacactttgtctctttctcaaatgacaattctttcttcccaatccatcataattaatcgagtcataggatttgaatccatgtagttagtcgtggtgcgtggggatatagttcgtcaaatagaatttacgtctataaaatctcctgaattgatagtgtgggtaggatcagatttataatgttagcctcacacttggggtttctgcaagtacaataacaactgttaggtttaagattatgaattgtaattattttttttcgaaggaagaagaaccgtttctatcatcgtagttataagatagtatttttaatattaattaatgaaaacaataaactgtcgagaagcaggatttgaatgtgaccacgttgttaaaggtgaaactgaggaagaagtattgaagaatggaatggagcatgccaaaaaagatcacaatatgaaagaagaggatatgactcctgaaatgaaagagaaaattaaaagtatcattcgtagttcttaattaccatttttttaaattagacgttaattgcattagaaatatttctatcttttttataaaaagtgttatactcagattatcaaattcacaatcatgaatttagtaataattgcaattattataatgatagtttctatatagaccagaaaatctaatcggattattaaagtaggctttttaaccaaaaagcaaccaaagctgtcataacctattgtatcaccaccctgtattacttggctgttttgacttgaagattgtgattgagatatgactagaatacaggataccatggtactattctatgaaagtaagattcttgtagtagggttctaatgcaattaaataataaagatattcttacaatgtttgaattgatactgtgtggttataataatttggctacaaggttttcctgctatatgattataactaaatttgaatttttcctactctgagattgatatcccatttcacaatttttcgtttgccatgcttcccccacaatcttttcagatcttccataaccaaactcagtggatcgaactttttttctgtattaaatctttttactgcagaccaggtttgcatataattaatgaggtcgttaagattccaatttacggtcatctcaaattttggggatgagatctctttgaaaggaaaaggaattgttctgtaatcttctttgacatagtttgtttcactgggccaataccttcctaggatatctccgtctacgtttaacttttcactgatcttatcaatattattatcaattttatgcataccataggaccatatagccaagacaccactactcttacttattcttgttacctccttatagaacttatcaagatcaaaccaatgagcagcctgggcaacagttatcaggtcaacagagttgtcctgtatattggctttttccgcaggaaacatttcatatttaatattatttctgttgaattgatattccaactgacctttacttgcatcgcttgctattacatttttgaagtatttacaaagccctatggcggcctgtccattcccagtagcgcagtcccacgccatattcttgtttggcgttatatcattcaaaaacttgtaaagaagatctggatagacgggtctagagaatgaatactccctagaggttgaagagaaatggtctatagcactactcatatcattactacatccttaatctcaaaaagttttcctcataattcaaatattcgcatggtaaacttaattcaaaaaacaaacctcaagcaagcactcagcatagtgccatctaaataaccatttattagattcttgactcaaatttagataacatcttttatattaagtaatatctgattctagttttccatatatattttattcaggattcattggtaactattaaccaaagagaagatgatccaaacggagaatcgaacgcattttatagtggatataaagatggatggaagaaaggtcacttcaagtagatagcaaattcgttatcattttttttaattatttttgatttgatgtttggttctagtagttatctacttttatgttatttattatgaatccaatccctctaaaaaatagcttctttctacatgctataatctaatgaagatgtctattagtaacagttctcatccgtggggatacagttcaaggttcaaacacaatccaattatatataataaagttttctcaagttcagcgaataatcagttgatttaaaagatcatttattatttttattttctatgaatttcattgataacatattgtacataatcgaccacttcattttcagtcaatgacgtttcaactccagatttttcttcgatttcctcttcaagattcttggcaatcttcaaaactctggattctaactctttatttctttgagcagttccaataccatccagaaaattggcttgttcagtgactgatttcctaattgatcttaaaagtatattatcctgagaaacagtttgggcggccgaatataatcctgcaggcaaagaggatatatattcaggaataaaatctgcgataataccgatctgagaatctatgataacggagatccccatgaatataaaaataatcagaatccggttgtttttgggtttcacagaagacgatatactatccacgttatctctaatgttaatgaatattatcgttgtatgatgttattgaatttaaagaattgtagatgaatattaaaaaaaatttagtttcaaagggcctcaatcttagataatatatcaattgatgaaaaaaatataggtataatactttttaataaaatagttttttaatacagtatattggatgaaataaaccctaggcagctaagagcccaatcataattattcgacacatctcaaaattttatctccggctggatacacccataaggattaagttccttgtggtagtatggaatagtacaaatttataataatgtagttttaatcttaaaatagatttgattaactggtcaggtgaatgtagtaatagatattataaaatatatttttcaaatcagacttgaattatacttgttgcatacaataaataatataaccggcatgtggcattgtctttctagctagcagtagttgatttttcgtgataaacttaaagccagcaatcacaaaatcactgcatgtctaaaaaaatgacacctgaagatgtactaaattcagtagttgagggtatcaacacagggaatctagatgacctcatgacgctctatgaggctgatgcatgttttgcaactcagccaggacaacttgcaaagagtccagaatccgtacgccaaagtctacgtagtttcatcgatttgaagggcaaattggatctaaaagtaaagagggtacttcaagcaagcgatcttgctttagtgactactgaatggtcatttagtggaactggacctgataacaagcctgttaatatggcatccaaatctgcggatgttctccgtcaacaagacgatggaacttggcggtttgtcatagataatccttggggaacagattaaaaggaaaaacatcaaagtcctaaaatgattgattcagatatttattctattaataaaggctgaaaaataatgaattttaagattattttgagtaattcggtatggacaattcaagtatattttgatctatgacaaatgaattctctagcggaagtataaaatatgtaatcataaaataattgaaacagtccgggcgcgtggggatacgattcaaggttgaatataatccaaggttaagatttagctcgaacacctaaagtggactacgttttcgtacctagttttttaattgttccatccatgcaggcatatccacaatgttccatctctttaaacattttgaattctgaaaataaaatatagtcattccattgactttgaattgcttattagttggtttaagatctagaaattctccgttatgtgtgccctctagaacatatctacctgcaattttgttcccttctataattacatcttcaaaggtaattcttatatcaggaaacgctttccacagaagatggataaattgtttaaacccctctttatcatttgaaaaatatggaggaaaaccatacgtaaccaaagattcgtcataaaaatcaaagtaagatatttctctcttactgggggtcattaaacgtatcggccaatttttgtattgtttatcttatcgtttcagcagatgacattattaagagcggtttgactttttcataaggttttctgtaatagaactacaattcgagttatttgtagtatgagcaagtaaaatgacaattaagagagagcattcatttatagtttgttcaaaacatctgattacaagttatcaatactttaactatgagtacattgaaagaagacatcaattaaactcacaacataggatttgattaatgaaaaatttacagaatattgataatcattgtttaaataaaatgttgacaaaatagtatttgaaaggatgacccgggtttctgttccgttcaccgaaggtcattattatggttgagaggaaaggccaaacacggaactggctcataatagcctctctatcgacactaatttctttattcgatctatttcatggatccctgaaggacattgtatggtataacacgcctctaaaatagaggcttctaccatagaagggatcactgagcttggggcgcatgaggatacgattcaaggttgaatccaatctattgtcaataataatatatgtagtatgaaaaggatgaaatcaaaaaagattaaatcagtttggaagcttgaaacagggcttttttgtgatatctttatatttatcacttcttgacctaggatatgagaattaaattcaaaatagtccttatggttgaaatccttgtaattatgtggggtctaattttttgtgtatcaatgtcaacagcaatcgcacagtcaaattatgtcattaaagttgcaaaaactacagaaggcgattttaccgttatcgatggagctagttatataggaacgtattttgatacaacatatacgatgaccggcacagcaactgactttatcaaagccaaagatgtgttgatggcattcatgctggatgatttcagcaaatctcctactattgggtacgtacaaatgaacagtacagtaactcagacaaatgacaatatgactgggcttgctaatccatttgtaagcaaagaacagattgatgagaagataaaatcagtgttctcctacgcattagacaagattgagcatccagtaggaattacacctgatataggtgattcaagacagatcaaatgtgtatttggcaacgtattagacgaattttggtgtgatattcctacttttgtaattaggtgagagctacaagctcttaatcttttaaagcccttacagttattttttagttacccacaactgctaatatttctttaatatttctgaagaattggatattacatgaatggtatttcctcgactgatatagtatccatcccatataaggccaaatacttacatttgtagtcattagaaatgtttgatatggtatagagaaacaatatcgataatagaatcatacaatcctatttcctttaaagccactcgaaattaagatgaagttagttgcttaaggtaaagtcaaatccgtgaaggaacgtatttatgaacaagtttgtattagtaaaatcttttcctgcttaaatcacgtttcacggatcgtgataatataaattatattgactttgatctttataaaataagggttataatatttccataaattgtaaagagattgctatttatctaatcctaatgctcctcccaaggttttgcctatttgatctaatggatttcctgttgaattggaggcattgtttagatttgatcctgactgtagctgaatcttctcataatcagctactacatcctttatttgtcccataaccgtatcaaggttgcccatcgtattccaatgtacaaatatcattggaggtttttctagaattggatgattatgtactgcagttacatttaggtttgcttttgataaagacatcaaggcgggtttaagctcactttgtaataatgcaaattcacccatcactacaaccattggattagattcgttattattgctgttgactcctgcagcagaggaaaagttagctggtgcatgcattatttctattatcgagtttataactaggaatttgtttaagatggttccattttgacctataattaggggatctgttctcaaaatgatagtatcacaaacatccttgtttgggttattgattggtacagcacttttactagtttgtgaactgagcgctttacaatctaatgcgttagtttggttgccctgattcatttgattcgtttggtttattgtagattgagattgagctatagcatcttgttgggttgagatatttattgtgggtactaccatcattccaatagatattaaaacaatgaaatagatcttgaatgaattatttatattaaattattaaattagcatacgatatatagtaccaagaagagacatctggaaacatacacagtcattatcaacggttttgcacctgattgtttacgacttttctgaatacttttactatttacaaaagtaggtgttatcctacattagtcatactactggaccttttttatactcaaggagatcgtcgttatgatgatgatgaaaagtcctcaactacagttattacctcaattcttattatggtgattcgcgccatggtccgttactaattttatcaccatgaccatggaatccccataggcctttccaatctccaaatccaaatgacttatgttcctcttccagtccttgtccttgtccttgtccataaccgtatccatgttcacctgcaaatccaggcattccatatccctccatactttggtctcctgatttggcaaagaaattcatcatctgtatatcctctgttttgaacagcacagcaccatttcctgcatcaacgattgtcttgtatccggtatggttagtaggatttagtgaaaagaatttgtatactaaatatccttgttccatcccgagatgaccacccatcaaaatgatgtcattattagattgtcttgcggcaatatcagcggcttgaacgaaagatgtttttagatcattttcaatagcagcttgtgctttttctaagacatttatcgaaccattaatctttggcgattgttcgacaaacatcccttctcccctctcatttgtggtcttatttgatgactgaatggcagtaacaaaagatattgcgggatttactaacaaagctcctgtgataacaactgcagctataataaccacaggtagtatcagtctcttttttactttgtttgaatttatttttgtcatattgaaatattacaaaattgttattataaccattgtttacctttgatacgtaacttagttacctgacatctccagaagatcggaataaaatggttatagaccgttacaaatactgaaagaatgaatccgatcaaaagaaacgtatacttaattgaaggtgaggaactattatatagtttaggtaacttattaatagatatatttgtcaaatgataaaatagactattctctttattatgggaaaatgaatagtttacaaatcctttaattatatagggattattttgaaccgtagtttttcaaatacagaaaatatattatttcaaagcatctataaaaattaattgagtaaaccagtcttatgatctttgaaaattatttagactcagatttgtcatccttttctagttcttcgttaatttttgtttgtaattctttatatttcttgtatttcttatcccattttgaaagaataaaccattgcctgatccctatgcccatccacacaataacaacaataattggaattagtggtagatatctaaatgaagggttaaaggaagaattagagccagagtcactccatggtttattgtttatccaattgctatcatcgttgtcatcatgaaaaggaaatccaaatagcataaaagataacataaatgctatcggaggtataatcataatggttattaacataattatgaaaagtttcttggttttatttagctgatcaattatcccatccattatgtaaaaaatactagaatctgatcttgtatcgttgttatcagaattacttttgtcattatcatcattgtttgattttttcatcaatctctctccttctcattatttcttggaaatagctcttcataaggtgccaaaatctcatttaaaattaatcttcctctttctgaaactttgtagttgattataactttgctaccccaattttcttccattctgttgatcaacccttttttgaccatatcatccaagatttctttatgcttaacattattcaagccacagtaactcataagcttactttgattgatttcaccatattcacaaagtttcaagagaatatccttcctgataaatattcgatcacggtattcatgaaccacaatgaatcattcagaaaggacaagttgttgttggtaacaaaatgttttcatatgtccgattagggtatcgtttgaccatcttgtaaaaaagatttaggaatactttcattttcattgtaaaaacacattattatatacaaatattctatataaaataccttaggtaacatagttacgtctcaaaggtccaacatagttaatataatcaagtatgatattttcaggatgataaaattaccaaaattaataaaggaaaaatctgtgaaatcaactgctcccattatatcatcagtaacaacagtagtaattattgcattttcaaccctacttgttttgtttgctggacctgccagcactattatacctgcttatgctgaacagacagataccatcaatgctacgaaaatagttaacacgtcaaaagataaggtgtggaatatcatttcagatgtggacaagaattcagactactggcccatctcaattgtaaaaaatattaacaaatcgaataacactgtagaaagagaagttactgtacctgcaccaccatttatgaataataaagcttaccaaataatcacaattattccagaacaatatacagttattgaaaatcaaactcggggcgccgttactggagtaaaaacaatatctttgctgcagactggaactgatgtcaacaggactgaaattagtgtaatctggaatctagacatgtccaaaataccaggtattggaaagggatttgcaaaagatggtataaacaactccgtagaagaagcattaaacaagattgtaaatgcttctaattgatagagtcacaatcgaaaaatagaaggcagcgggcttcccttgaatccaaaattgctgaggagttattttgtattttcccttgacggatgattgatttcggtggatatttccttccgctctaagatcagttagttaaatctttgataatcatatgatgacacttttagcttaattgaattgtcaaatatcatgtcaatttccatatcacaacctatatacataaaaaggaataaaaactatcaaatgaaaattatgttaactactatagtaattattgtcgcagttgctgctgctgcaacgggagtcacgacagtaatcactaccatcgaaatttttgctcagaacaaaagttctcctatggatcaactaatcaatgattgtatgtacaataacgttactgcatgtaatgctctggaacattataactctacaacatatcccgcaaccgggttgagtaccaccgcctcttgatgctggatacatttcgggcttccaccttaatctaaccacctttatctctttttgaattataacaactatttatctttacttaaaatgtataacaaactttatgagaaagtttgagaggcagccatttctcaagttctactcttttttaactatgtggaatgtcggtagaaggtgatttatggatgatatttaattacaagatttacaacttgaacaagattttgtttggcagcttgaggatagtaccttggggtaatgggattctaatacagataatgaagatatggtttaaacgaatagacttacagtcagaaaaacaaaaaaaattaatcgagagcgtcctttaccttttcttttgctttgtttagggtttctgagctaggttttccctctgcatgatcttgtgctgtctcagcctcagctttagcatcttgttgtgaatttttcaatttctttgctgcatcatcaataaaattatctgtcattacttgattataattaacatgctttataactaatcaactataactataataatatggtttatttattaatgctttagttagagccgtttcatagagatcttaggtttattattatctacaaataacaaaattatgaacatcattataagctatatagtctaaaaacgtcatcttttcttatttatgaaatttacaaatcaaagaaatactttgtttaagtagaacaagttgtgggaattaatgtggatatcggttcttcaagaaatctcatcatattgtaggacaattaaaaatatcaagatttatgaaattatgaatcgaagtgttattccgaatttgaatttggaagcattatcaaatacgaatgtatcatcttatttttgtgaggtcattaagttatttcatgaaacactgcacaagtgggttcttttcaactcatttgcaataaacttgaaataaatcaaacatatactaaaggcagaaataaaattggattcaatttatacttttaatctggaggcgatacgtcaaaataaaaattaggcagctatgggtttttcttctgcctttctagattctgattgttgttggattattttcttttctttttctattgttatcttctgttcctcttctaatggtatttcataatcacagcacataaaactagttagaaaacatcgtttatataattataagaacaaatatgcaagggctttatgaattcatattttaggctctaataaatcttaatttaaacaaggttttacttgtcaattattgcaattctagtttatctcgccaggatatcgactatataattattggaagaaagagtctatttgtttcacaagagcgagtctatggaccggcattacaacaatcatatagtcaccttatcattataaacggtagagcgacttttgcgaactgtatagtaaattgccccgaatcccatagaagtcacgatcacctgggctatttgaccaaagtaggggataggaactatgtataaaatattgagtatgacaaatcctatcaaaaaagaagaaatattattgatatcacctgatgactttcttcccaataactcgaggattttttttccgagagcaaatgataccattaatgatgagaggatcaatccgataataagcaccaataccccaaaagccgatacaggcatccctactacagttattgctaccaacactattacaaccacaaacaagatgattaatagaaatcccaccaccgtgttttttattatagatttattcataaccaatcgaactgaatcaaactgatttggtaataacttgacaagtatgatacctaaaataccaaatcctataacgaacaaaataccaaaaagacttaaccaaccctccatatcctgcgtcattgaattctggctcgttatctctaggtctccgatagtaccattgttttggagatggtcagtcataactaccagttttcctgatatgttaccctcgttgttgacagttccacctgcgacatatgcgtctttaactatcacagatgtcggatcgaagtgtatgttgttggctgctaaaattgcatttgttgattttccacttaaatctatcatatttccagcagccacaatttttcctgaaatatcagcatttaccgttacttgtcctccagctgcaaaaaggtcgccctctattggtgcattgacataaatattattagcaaaaactattgctcctctaacaggggcctcaatatatactgtttctccaaagattaccacttcatcttgaataggttcttgtattgaaatctgatttcccgaaataacttgcaaagcaaaggcgctatcaggtataactaatggcactagaactagagcagtcatgcagaagataaagaaatattttattctagcagtaatgtcatttcccaacattttatgaggtgacccgtatctagtcaaattcagattcacagagtaaaaacatttcatgtattaccattctgctaactttttattaatactttgatttaatagattgtgcctccaaatacctattaatatatttatgagaatatttatggattctttgacaaacaaacgattaatcaaataaataatgtatcattttgatgagattgaacaattagatttagtaacaagaattgttggctttcgggatgatatttctatatattgtttggaatttgacataattatcaaaatgaatatctgttacaaaggcctttgatatacatattgataatctttaaccgggtcttattaacagatatgtaattttgatgattcagttagtattaagatttaagtttataacctataactagtccatgagcatggggattgttccctgtcgtagtagggttctaatgcaacataagactttattgttccatagagacaataaagcatcgatagatcatttacacctcttaatcttactcgaattcttaatcacaagaatctcatttcttcttggtaaatagatgaatatattttactattaaatttatgattgcataggaaagcactgaagcaatcagtgatgaaatcgtagcagcctctatggcggagtattctaatttcagtaattgtattataaggaaaaacctacttacattattaacagtatcaaatatggagctagcaaatatcattttaataaaaatccgtcttaacgcaggaaagttaatttttcctgttaatcgctttgtgtaatttcgcttattatcaatatgaaaaaggactgcaaaaattatcttatacgtcaagaatcctgtgattacagttattgcagaattaaggacaaaattggtagaaaattctgcaatatagtgtgcaataataatactagaaagaaagcctacagaacccgaaattaatagatttttgtttagggagatagtattataatacttttgataagtattagtgaaaaacccgttgattttcttctgagtaattggtttcacctgatataattaaagatgtttaataagttatttaaacctgctaattttttttagttcattttctgttgacctgtaactctatcacaccaagggtttgggcctatagtaagatagtagcataacttatccaaattcaaccactacaaataaggattaaacagactcgatttctcattggtggacatggccttgactatagtatctatctatctatctatctattagtaacagtcctctttcagtggaatatgatccaaggttgaataaaatcctgacgcttgattctactattgataatctagtgcaaatttatcaaactctatggcggttataagacacgctctagcaactgtatgaacagcgcgcataaataattctcgtgtcaaagtatcaaaaaacaaagggtatatcaatgtgagcccaatggaattgccctccttgtttgtttgcaatgaacaaaatacacctactttcaacaaatccttggtcaattgtgtttgaaaatcattaattattttgtcatctgcattctgtaaagttttaccatcttgagttaacaggcggggtcttgatataatttcaactcttcctgcatcgtttttataaatatagattccaattttaaaatcttcaaaataactggcattaataataaaaactgtattatcatcatctattgtttcatctacattgcagattggatcctttttgagccaatcaactatattctcatattgtgtatcaacgttttttcttatttctgacattgttatagtattgcattatatactatattaagaactactttgattggtagaaagatatatttgatttaatgtgttgcgctagaatgttcctttaactcctgtctggatttaaaaatctgaccacatttttcacatgagaatgttgcgtcaacactcgttgaactacttcaaaattgtcactcatagtatttatatgaatgcaaagtatatatagatacgattcttcttaaaataagataatatttctatgcaattggaggctcgctaattattattttattgttcttgttctgactattacctttagtcaaataattcaatagattgttaaaaactattaggtatatttattgatagagtatttggacacggtattaaaatcaacgcttaagcgtcaaatcccttttcttattggaggtactataacaggtgttataatggcgtattattacggttttctatttactattgtggtaaatagcatcatctggtttattatttcgatggttgtcaacaaatattattggcattatacgggctttaaagacgaaatgtatctctttcgaaagtatgtacttgatagaaataaaactaaatcaaaataatctccccgaaatgtcataaaagggcaataaaaactgtaaaatctatcctaaaaaaagaataaagatacatttctcaatgtattgatatgacaaaatcagtggtttcatcacaataatactattagaatgaaagaggataaaagcaactcatatatcataatattttttatcatttaggaaagtgagaacaatatactagaatcgcttctttcttataatttcagaggattaaagatctgattagagatgaactaatcaaacaagcaattgttgaagagattcgtatcttttgatgtactctattcctttatgagatatgatataatgaggaacatcaacatatttactatttattaatagatctttgttaattactaggttgattagttgtttggataataatgacgataatacgttcttgtttgttgatattcgatgttttgttaatgggatcggatagttacttagatatattagagcatcatacagtgagtcataatgggtattgtgctgttttctgtcttttagtttttgaacttttgttactagagccatattaatcagacacaattaaaatagcacgaaccttaaaagcattagaatatcaaaatagtaaaatgttgatatatgaaaattatacagtaaaattcaatttattcgcaaatgattatgatggtattctgttttttttttgatgtatcttacttatgatgctagcttgatttaatgaaggttttatttctgttacattttagaaattatgatatggaattgatgttagtaattgaaggaaaaacccctaagaatatgcatgttgcactttaattcctactatcattatcttaacaatggtggtaaagtaccttttttctttttcattaatggaatagtgatttcgagttttattttctttgccaacactaagtttgagataatttacattatatacgtttgtatacaatatattattactattacatgtgggatttcttttcttataaaatttagaaataagtttgagattattcataaatcttatataatgtaaatcatcaattgaatttaaaagtaaataaaattaatagaattttctgcaaatggtagtctacagctgatcaatactaatcttcaagtttcatcaagtaattttttttgtgttttgtttgtctgtatttcttatttcgtttttcatttagtcgcccttccttatgaaattcaagaattttttaaatattttatcattagttgcatatatttattctaggggattaggttcactgtagtcgtggtttcattacaaatgtggaatttatcaaaagtagcatgagttgatgggcagtgaatctattagatgtaggagaactgcgagtagacataaattatagatactacgataaaatcaaaaaaaagagacgttgaagtaaaataatcttgctaattgctattctactaaaacctgttttccctcaagcgggttcttatcaacaatgataggtaagtaaactgtaacgaatatttaaacgaccaatgccaattcaaagctattaataacttaattattgccgtagatgattaaattactattatagaaatatacctcctccgtactcataagcctatttgtttaccaagaattgttctttacatcttgatagagttttttaaattgtggataattgtctgaatctcttttaattgctgacgcgtatatcagaaaggtgtcatcgtaatagctgattatcataggtttgatgtatttaaccaatttcctgtcagtcataattttttcattaatcataaacgaaagccattctaggctattgaacatgcgagaaagccatgaacttctaatttcatcatatttagatcctgaaggtatttttgccagttcccgatccacatctcgtaactctttcatgacatcacctaatgatgtgatttgatctattctcttcgagcgctgaaatgtgacaatagtataaaataatgctattgcatatatcgccgcgacaatgatttgaatataatctgaaagaaattccatgaatggatttatggataaggtatgattttagagttgggctcatcagataagtacatatccaatctcagccgattgtcgcagataatttgacatttccatcttttatgccataataaacatttcgctctatgaattttagtttcatctcagaggctttattctattactcagtgtccaagttgtaaatacccaaagtctcacaaattcaataaacaaagcagtgtataataatatcggaaaatactttagattcgatttatcaagaattcaatagtagtaacaacagtgcctcgaaataatatcgactcctattaagctgccaacactaccctacaactacaacaggccctagaaattcaaattctactactacaataacaatgaaaacaaacagtcaatagcacatagtattccccggtaacagtccttatccgtggggatatagtaaataatagaagcggatttatatcaaaataaaatatttctgaaatcctcaatctctaatgtttcgaaatctgtccagatattatatcctgtaaacacgaacgcttgaaagtgtagatggggaacataggtaaaaccagtcattccaactttggatatctcttcaccggcatgaaccttttgatttaattcgaccttagagctcttgtaatctaggtgatcatatcgagaatattcaccatttgaatgtttgattgcaataaaattagtataaaaccagtatgatgcatcaggacctccaacattagagtcatccttgatatgagttacaacaccgtctgctgctgctagaacgggtgttcctttgggagcaataaaatctacagcattctgaagcttaccgacatgagcaggagaagagtgtctatcaattctctctaacatttctctaggtataggtaatatgtaagaattttttgccttcatctatagaaaatattcactttgcatgaattatgaaccaaaatactataagaagactatctaatccttgtgtccttatggatcaaccatcatttggcttatcgactttgactcacttaaaactttaataatattttacaaagatcatctctgaaaatattatcatataatactactagaattgttaaattttaattaggaatacttatccacaatatcatgctgttgataaagagaagggaaagaaatctacctacttttctcgattcatcaatatgtgtatattcgtataggttttcatagttacctattgtgctaataattaatgacagttctcatacatgatgggaattaagttctttatggtagtagggttttaatatatttaaagtaaattaaatctaattggtgatgaatttaatcggttatagatttaaaacaatatataataatttctatattgaaattctctgtagacggcgtaatgaacaataggttaatttttatcaatatgttataagcaatgttgatcaatattgtctgagcaaacattaagaatgaacaatatcaatgaattaacggcaataaccatgaatatgttcttaccattcaatatcttttacttgtggaatactcttgggatgacagtcttattcaaaggatttatgagaaataccttccagtagtagactatgataagttaggataaattgaaattttttatgatatcatatcattgcataactgatcatataagtgtctacacaggtagatattggtaccttgtcttgatatgatcatactacaaatgaaggatatattcagtattgtcagattctaaatattaaagatatactagaaaaaattctaaattattagttccttgttgtcaattaaattatcgtattattatagctttctcatgatgatttacaagcttttgtctaactttctcgggtaatatatcaaagtccttttgatgatataaacaaataccctttacatcatattcaaaatgagtcggtaacgacaactcatactcaatcaattgctgtaatttctttttaaaaaagaatgctccactatctcctaaaatagatactcgcttctttcctagccttttagcatacttgacaagttgttgaatagcttcatactcatccttggtatcatattgcgaaagatacttttctagggaatcaagaataatcaagcttttcttattaaccttttcaaccttgtttaaatccctcgctctattatggtgactatgagtaagcgtatatctgacagaatctcctgtttcgtaaaaaggtgcaatctgaactatttcttcttcattatcaattattttttgaatataaaaggaataaaattctctacatgtatttaagtcacgatatataactaaacagtgaattccggtagactcaaattttaggaggctttttgctgcattcttgctttccatggatatgatattatctttataagaaattgatcaacaccactcgaacatcttatgtattaaagtttaataccttgtactaaaaaaattaatgaatatgctataaaattatgttgtaattatataatgtagagaattgttaaatttaaagaagaagcgaattctatctattacccatcaacaagatattgatggtttattctgtggggctatattaaaaaacgcttttccagatacttttgtttatcttacgaattatggatatagaaatattattagtatcgcaaatacaatagaaactaatattataaggtcaaaaaaacaaggtacaataataataagtgatttatcagtcgataatgaagaagaagcctcgatcataaaaactgctggaaccaaggcacgaaccagtggatgggatttcatttggattgatcatcatagttggatgcccggaataaaagactttattcaatcttttgcaacagtggtgttatcaaatgagaaagaacaaaaatgtgcttccgaacttgtttgtgatacacttgatattaaaagaactgcatgtataagaatggcaaaatttgctcatatatcggactttaggctgcctgaaataaacaacatgcttccgctgccagaaatggtaagatattatttaacatttccagattatcatagaaagttacattcaataataaataaagcctcaaagggtaccttttgggatgatggattacaagaggaatacgaaagtaaatatctgccgttaaaagatttagcaataaaagaggcattgaaatcaattatggtaacattcatccataaatataaagtaggagtgatagagtctccaaagatattatcaaaaggattactttcagaaattgtgtacaaatcgtatgatgatttggatatcgtatttctattttcacctgatggaaaaacaagcgttagaagaaaatcaggctcagaaataagatgcgatcttattgcacagaaattgaatggtggtggacacagttatgccgcagctggaataataaggccttctactggtttagaagatgatgaaactagaaaaatatgcatacaagacgttttaaaagccttgcagatagccttggcatagataaatctctatatgatacgaaattgacaaattcattgattaatggtacagacccgacaaaaaagttccaggagtcgataatctatacactattggcaattggtgggtccgaaggaaatgttggccgataaaagctttgcaagtgccaaagcagtagatctaaaaattctaaatgaaaacataggaattgaaatacatcatgtataagaacaacaattttaattcaactcctacgatatttcatactgggcgacgttagatgctttagatttactaattccttgtcgcaaaacctgacacacgacttcctggtaaacaatttgtaccgtaatattgagggtaatgtaatcatcaaggtgtctaggattttcataaccttcgatagttataacatcatttgataaaatactagatgtagtcccccataaacaaacataattctttgactgatttttgtttagaaattttttatattcaacatattcaacaagaagaaaagtatctccgtttaaaatcaaggtgccttcgttattttcatatagtgaaagtttaccaccaaatatcttagtgcttccagaaaaacaccagtcagtaaatttatggccatccaatatataattactctatcactaacatattaatcgtataactaagaatttgggattattgatcctgtcccttggttacctgaaaatataatcagttgtattttttgtttgcctaccttattatatttatactttttaacagagtattagaattctatttggtataacctcaattcggtgaaagttaggttgaatgtagttttttggatggtatatgatcgacagaaaccctaacattgaaattagtaatgtcggaataatatttaggatctaagggtaataacgataatacgagtggaatctaaaccttaatttatagtcacatttttagatggactgtggaatatgattcaagattgaatataattactagacagttatataaaactagacaaaataattaattgatatgtgttgggtaaacaccaagtcacattaaataattgaatgtttgagagtaatgacgattgtatttgttttttatctagagacagatattcaaaaattatgatataactctaacttcaattttacaataaatcactaaatcgtagtcatcgatacagtaacttcactatttattgaaaagtatcgtcaattgataatattaaaatatttggtataaccatgctcatttcgttttgttatccttttatagtttattaaacgatggaatttacaaatgactactaagaaaatcatggttgttggcatttcattcgctttggccgcaatgttactttcatcaggtaatgtgttaaacgcctcttttgcacaaaataatattgtagaccaaacaaatactatagaccaaacaaacggtggtggtggtgataacaacaactcaaatagacagaattatgacgattttcaaaattgtctagatggtgaagctggaactacaggattcgctactgaacaacagataagagactgttttgccccaatatatatcggcgatgacagcaacaacgatgacagcaacaacgatgacagcaacaacgatgacagcaacaacgatgacagcaacaacgatgacagcaacaacgatgacagcaacaacgatgacagcaacaacgatgacagcaacaattaattgaaatatccatactgggaactgcccggttaaataaattccatctattcaaattttttttcgaactaatgactatttttcgccagagatcgtatatctaaaatgagaggttctatagtgtcctttaaaatagtaattccttctacacgttgattgcttttattaattctttcatcatgttcaaagttattgtgaagacactagcggatattcatgaataaaatggtgatcgggcaagcatggattagaattagaaaacacattaaaaatatggataggacaatggataggacaatggataggacaatggataggacaatggataggacaatatgtgattattgactgtatatacatttccttaatgttagtaatatatatcatatttttatattaaatatctttcatagattaaaatgaggaaacagatgtctttttgttaaagaatgtagaaaagaaactacgatcaactactacattgttataaactttaattataattagtttgtgtgctatataatttaagaaaacgacaaacagtctgttcaagaacaaaggcaactttcattaaggttctaatgttgattgcaattttcggtttaagccatttatcattatcattatcattttcaccatcacttattgcatatggtcaaagtcctgagatggctaaccctcaaatgaaagcttctaattttgtagctgtacccatcgaacagcatcttggagacaataagaatgacatttttgctccaggctttccattcagaggagacatatccaatacatttaactttacaattgatactcccaaccctgtaggccaaagttatcttttgatccaaatattcggattcttattcccaaggtcatacaataaacatcaatggacaaaatgtaactagtccacaaggtatcttagacaacattggtgatggaaattgggcaacattgactgtaataatggatgatggaatcctgaaatcaggtccaaacaatatccagattttaaggaatatagactcacccgataactttctaatagataacatagttgtcaactggcaatatcagattagtcaataatatactcatttaagatagacaggtggtcccgattaaccaatagttaatgctaaaaacactaataaaactcatatttcctaaatatcgacatgtattatttttttcaacacattcattacaagataggcggaaaggaatagagtaaaaacatacaaaagatttcatttaaagaaatggctcataaaaagaacaaacttatggttcaacagattcatagacagtttatgagatagaaaaaaaattacaaactaagctacaaggatatggataaaggagttcacatgttcacatatgtatgctacaaatgtcgtgtttgtctcagatctaccatattatcacaacaattacaaatggactcactaacttgatgcttattatttactatgtaataaaaaagaataaattcttaaatctggaattgttcttgtgaaggataaaccatttgattttcatggtgcaaagtttactatcaaggttctcagctccgaaacagactataaacatactgttctagaaatatttcaccaacccaatttaggaccaacattacatacacatccaaaaggttcagaaactttttacataattgatggaaattatcgcttcattttagatggaaaatcaatcgaaggtatgcctggagatacaatctttgttccaaaggaaactcctcatcgatttgtagtaggtccgaaaggcgggcatgcgattgtaattagtcccccccgaacttgagttctattttttcaaagtcagtgaattactagttaaaggacaggtctcctatgaagaagagtcgagtatagggaaaaagtatggtcaggtttttcttgatgatacaaaacattggagctaattaacctgtcatagcttcatgaattatttgggtatctgtatattgtttgaactggaagattttgtcatctttaattgtatacaaatgacaaaaagggacaataaaatttttgcctatttttgtttgaccgcaatacattccaaagacaatcactttattatcaatacacagaaactcagttggattcgcatgaaattcttcaaaatttgacaacattttaggaaaatactcttcaaaaaccgattctagtcctacgtatcttccgccatttggcattccatccattgttatccattcgatattatcgagacaaaaattacgatgaacttgacctctatttttgaatgaatcatagaaatcttttactaatttctcattgttttgcatcatcattcctcgttatccttatccatttaatctctttcatattatcgatttatgataatcttttttaactttagatacctttatcattcacagaattatcttgttataaaatttgattcacagtaatttattatggttacagttctcattcgtggggatacatttcaagattgaatagaatctagtaaaaaaatatgcctatctaaaacatacgtcaactatagatcttttgtaaggtttagtcatataaccaatgcagaatttttttatgaaaaaattgttagatattcagatgttcgcattactctagatcaattatctatctctcaattcgaagtttgtaatcttatcagcatattttttatacaactgatcaataactctaatcctttgtgtatgtttgcatttcttgggatttccagccgaatacaaatatcccttacatgtgcaaaaccaatggttattatcctttaatttattaaccctatatttctctcctgtagtaactgatttcacataataaatatcctccttatcatcatactctaccgatttagtgaaatcaattcgcgttatatgattagaattcatttttctaaaaattccttaatataaaatcgcatactagacatattaatttatgacatatgttttcccttaaccattcattggtagttttcaataattaactggagctgtgatgatgttgcaattccatcttctaaaacggagtgggagttagcaaagcgtgcaactccttatcagcacgtatctatggaagcgagtatagttggaaataagataaaggatttgaaaaactacaaaacactctcccattatacaattttactatgtcagaaggtaatgacctaggcttgcctgctggaactaaaaatgaagctgtttcatagggctatttgataaagttagaattacttactattggtaaacattacattcaatttaaaggcatagttactgattttacagttacagcatcgtctactttaataactgaactaacataacatctgaatgtcaaatgatagaaatattagattaactactcatattcattaagttttgaaattatcgcttctccttgaggcactccacatttcaaacaagaaggcaaaaaagctttgaatactgtccttgatgatattttccgctttttcttttgttgtttttcctctgatgccttttttatatttgggtaaatcgctacttttcttgcaaaacacatgttcaaaggaactgagattgttatctacagacttgcctatcttttaataataaaaaaagaagattgtacaaagcacttcagatattgttttttcactgacccgttaaattaatattctgtagggtttgtgcttgctcttgagctaactgtgtctgattttgagctctttgaagttgttcttctgcaaatggcgaaggctgttgactggctggtggtagtgactcatttccctgacttgattgaatttcttcctgagctaactgtgtctgattttgagctctttgaagttgttcttctgcaaatggcgaaggctgttgactggctggtggtagtgactcatttccttgttgagcactaatgttactgttgactggattcaaaaacaccatcaaactaatagtgaacatgatggcaagaacattgaatatgtttttcattgatattgagtgtctaacaatgtttttataactatcatgaaaacagaaataaatcaaattctactcaccaatattaagcagaaaatagattaactatgtcaggttataggtttaggaaattagttctaaaatatggcggtttggtaacaagacatctgtcaattttaacatgaatttccaccggcattccaatcggacagaggacgatggactgggcgagatcaagctccttgtggtagtggggctctaatacaaatagacgatttgaatgcaatctacaactatgcaattctagtcagtatttagtagtccagcctgtagtcattttttggtaggagaaaaacgaaaaacgataaatggcagtttatcttgggtaggtttcttgccgtactgcgaataacatcagggggagtagtataaaaccagaagcagtaaggattttagcactctttacacgtccagccaatgcgaatactgccgaaattgcaaatggtaaaatcatctcccaagttatagtatatgcttcaactattctagttaatcaggtatatttggattaatagtggttacacctgctaaaatcaagataccaactattacggttgcatcaattccagcaatatctccatctttaaacaacttgaagttggtacaagactaaaaaaaataaagaatttgatagatagtatctctaatagactcatattcagttattttaaacataagtattgacttttagaatgcatcattatttcgttatttaaatagatttattagatagtaacagttctcatccgtgatgatgcgtactgatttcggtattttaaacaggattctgaaactagtgaaacaatatcatactcaaactttaatcgatctccatcactctctacccgcttgagttgtttttcctagttattgagattgcgcctcttaatagatcctcataaattgctaatgccgcagtggccccactcgcagaggccaggatagcgtagtgtctatctgtgtccatatctccgactgcatatacattagcaatggtagtctgttgtttctcattgaccttgacataacctgtatctaattcgcatcctaatttttgagcaatttcattttgaatttctattccgaaatggtaaaatacgatatcaactttatgatgacgattactattagttagtacactatttatggtattcgtctttgaatcgtaaatgatttccgttatgatttcatcttcaataacattaattcccaacgaagtcaattcattcttttgtttttcggttagacgattgttcttttgattcccataatacactttatcgctttctaattcctgtaagaaaagtgtaacatctctagtccatccgagaaaaactttggcataatcgattgcttctgcataatccttattggaagctattatgacaagttttttatttgtagatgcaaatccatcgcagtgtggacagtgccaaataccatttccgagaaatttgttaaagttctttattttaggctttggatgctcaacgcctgttgcaaaaattacataccttgttttaaatactttcttttgaataatctcttctattgaattattttctttttttgctcggatggatgccgacaataagaaaatatcgctaccttcctcagtaactttctttaccgtttcaacttggccttctattcttttgacggattcgtattttaaaacatctgaccaggatttttgaatcgcgtcttttatagatgaattttcaaatccaagatagccatgcatattgtaattcctttcttttaaaacatcaaaaactataacagatctaagataccttcccaatagtaacgcagcagacaaacctccaaaccctccacctattataccgacatcaaaaatatctttagtaaagctactaccgttattgctatttaccgaagtatctatgatgttattgcgtttatggggggacaaattagctttatttactttcgtattaagacataaacttgattatatataaatggcgtaatctcgaattaagcaacaagcttgtgaaaagtttagatcaacaaaatttgagctttgatgataggaggatcttacggagtgaatttgacttttagttcattattgtcgttaatgatctggtacgtttgcatattgtttgtcctaacaaaggagattatttctccagcttttgcgaaatagtcttgtatattttttggtaaggaactcgtatccattccggacattattgggtcgctgagcttttgaccagtaacgatatcgaatgtggcatactgcaatgggcaagatattattttcttttcaccattaactcggatctgaccctaagacataggggcattcgtatgtccacagcgctcttcaattgcatagaactgaccatcaatattaacaagagctatttcttttccatcaatgtcgacgtgtttcattgatcgaggaggaatttcactcgccaatgcaactttgactaagtcattttcaacgttcatgagctaagtaaacttaggtttacatataaagttatcgtatgcccgatatatatgactatgccatcggcgacaatagtgattgcagcattattattactcacgaattattatttttggcaactcttttccctttggaacaaaatgtaaggataacgaattgatacattcccgagtgtttttatctgtcaaatgttctcccaggaattcgtgtcctaaatgcgcatcacaattttcacattgtatttctgttcttattccatcgacatcaggtatacgttttaatgcattttgtaaactttcatcaaagcttggccatccacatcctgcgtcaaacttacttttggatgaaaagaggggattattgcatcttcgacaaataaatatcccatcttcataaaaattgtcatacttaccaatgaaaggagcttccgttgccttatttacaattattctctcttcctctggtgttagcttattgtagctcatactctatagatttcctgctaatcacataaataattcatgttttttagtccttgtattcttaatatctaaaactaattttgtttgactcaagttaacttccaaaatatacgataaattaaatcgactccttttctaccccatcaacttatcctaatgactagtgggatttataacgaacctgcaagatactatacgccctccactctgcactaaaaatcgtccaacttcaatcatctttcaggccatctttaaacggcgataaacaatgaaattacagactgctttttttgaatatttgccgataaaccttaggttaaacgagttcatgtaaaacaggagttacccgggtccctattaatttcgtagcttgcatgagcttttcatgaggtaatgatgcaggattcatcataaaagtaatgcgggaaatcccaccaagtgctttactatgcctgataattttctctgtaacttcttccggattacctatgaggagcgcaccactttgacccagctgagtatcaaaatccctatgagttatcggtggccagccgcgttccttcccgatttcgttcatgctgcgagcatagcccggaaaaaagtcatcaattgcctcttgggtactctctgctacatatccaagtgaatgtatcccgaccttcagctgatgtggcaaatgaccggccctttttcctgcctctctgtaaagatctattaatggtttgaaactgggtgtttggccgccgatgatcgctaccattagaggtaatccgagtaagcccgctctaacaaaagattcaggggttccgccaacgcctatccatatcggcagaggattctgcaagggtcttggatagattccctgtccagttagagctggtcgatatttgcccgaccaatgaacatgctcattctctcgaatccttaacagcaattcaagcttttcagaaaaaagtaaatcgtagtcatccagcctcaagccaaataatgggaatgcttcaatgaatgagccgcgacccactaccatttctgccctaccttgagaaagaaggtccaaagttgcaaactcttggaataccctaacaggatcggctgcacttaataccgttactgcactggtaaggcgtatatgtttagtacgtgatgcggctgctcctagaatgacagatggggcagaatcaaggaatccatgacggtgatgttcacctactccaaatacgtccaacccgatttgatcggcaaattcaatttgttcaactaacctttgcaagcgttcggatgagcttaccgatttcttagtatcatcatgaaaagctgcaaaactgtcaattcctacttgcatagatatacatcaaatacgaatattattatttaaataaactagttgttaggatcttagtaagtatgtattttcatacttacttacctaattacttccttgtcattatctcctgtacttcaataagtggtagaggaataacgatgatgtcaagttataatcaatatgaatggtatatggtgtacacatgtatcgaatacatcccaaagtgttactgctatcttcgaatatttagaaattataaaaattaaaaaaagcatgtcattatcgaagtatttgatcctgtaaagatacaaaagatcacaaccctatccgatactccagaaattacctgttttattgactgcatattttcgtgggtacatgattcaagtttgaatataatcctaaatatcaaacactgacacaaaaaaatagtttaatctactaccatttaggtaatagatctttaatatgccacattgcaaagatcctttttccctctccttcgtctatgtatgattcataaactcctacaatactcctaagcgattctagatttcctgttgcgttatcatcaaagaatgcagcccccagacttattctaatgccttcttctgtagtatttgttatggccccaaaggaataactagcagtcccgttttgagaagaggtaaaaagtgctctaccagtaagaaagtctgttccatcctctcttgaaacttctttaccacttccagaggccgttatttgcaaattgtctaaggttccattaccctgaaatgagtacacagaactggcagaagcactactattttcagaatctccttgattttgactttttggaaattcaaatttctccgtatagaaaggtttaccaagagtcagattagagtttttcacatccataaaatccagaatactgctttcaatttgttgttgtgaatagcccgtatttcctaacgaaagtgtatagatagctgttaccatcatcacgattacgactaaaattgctggttgttttttcatcaactaaatgtaatagaaagagtatataaaaaacgacttgtattaatcatatcgccatcggctgtatggatccagctatagggattaagttcttagtgataaggggattctattacgttgcctaaacctattgttatttatgaatgtgaagacattagtgttttaagtcgagcccattagatccattattaaactaaagacacaagtgattcagaattagcactttaaataacttttcgtgcattcaatgaatgtaataggaactatgtctaatcgttttgtaataatcatcatgctatttgtggtaatattcggtgttagttttttgaatatatcgttacaaatcacgacttttggatactataaagaaaagctaatcgacgaggattatgattacaataaggatatagagattaaaagtgatcagttgtcatcctcaaactacagaggctatggatatactttagtatcttcaccattgatggaaaataaccagaaggtactgaaatcaaatattacctccacagactcagacaatcaaaatataacaataagagaatactctgtccctgaaggctcaagaccccatgatgtagccccggctacatctatggtttatgttaccaataatgtgtcaaagaatttattaaaggatatcatttggtatacagcacaggcttctggcgaacttggtaaattaaatattactactggagagacttcacatattttcttaggagaaggttcggctcctcatggtattatagtaggtcctgatggagcaccatggattactgatggtggattaaatgcaattgttcgagtagatccttttacagaaagtgttactgtttatccattaccacaagaagtcgcatatgcaaatcttaatacagctacatttgataataatggaactttgtggtttacaggacagagtggaatatatggaaggctgtttccatctacaggagctattgaagtatttgatgcacctagaggcgcaggtccttatggaatcaccactacaccaaatggatcagtatactatgcatcactagctggtagttatataggactcatagatacaaaaactggagaagtaactgttttggatcctcccactgcaaatcaaggagcaagaagagtttggtctgactctgatggaaacatctgggtatctgaatggaattcaggtaagttgggaatgtacaatcctcaaatagacctctggaaggaatggaaattgcctgggaataaccctaaaccatatgcagtatatgttgataccaaggacaaggtatggataagtgattttggttccaattctatgtataagtttgatccattaaatgaatcctttaccaaatttgatattcctagcccaacagctaatataagacagattcttgggattgaagctgaaatttggggagcagaatctggaaccgaccgcctgttgttgataagaaccgaataacttacaaccattaacacactgatagacaagtcattcatattttgaggtattgtctttcaatatgaaaggcaaaatcctgtgatagcaagaatataaacaaaaagaaaactacaagttatattaattcaaaaataatttggttttccaagaaattccagaaacaaacaattaaaccattcatgaaatagaatcaatcgattttctagaaaagtgcgttaaaaaagtcaataaatgtatttaataatttttcagtttcagatgaagctgtcggatgaggtattgctaatcttctaaatgataagttatatttgcactttggtataattgtttaggcttaatattaggattcgaactatcattcctttgaattgcaatccattaattgggctactaatgggatgttttttattattctttttgttgttattgcaaatatttcactggtcttattcatagttttatctaatgagtataatcttttgatagtatttgagaatgagagtaaatcaaatgttcaattggcaattcaaaatgggaatctagatgcctattcaaattattcaatagtaactgacgtagtaaatgttactactacctggatagatgagtatggatatgccggagtctttacagcagcattgttagaaaatttatttccacctattccgagtgaattaatatttccattagctggtattactgcttttaccaaggatttaggggtattggaaggtgtaatgggcatgtctctggcaggtgcagctggatcaactgctggcgctttaataatttactatgtatccagaagaattggtagagacagagttcttaaactgggaaagcgtgttggagttggagaaaaagagttagagaaggctgaagaatggtttgagaagcatggtcaggcagcggtcttttttggaagaatggctcctggaatacgggaacttatatccattcctgcgggatttgaaaaaatgaaattatcttcatttattatctttacttttgcaggatcccttgtatggtgctcatttttgacaacaattggattcttcctaggcgacgtatggagcagcctatatgatgagtactcatttatttttgatttaacggcaattttagttgtaggcggaatccttgcaggaatcgtttatcgatactataaaaacaaaagacaaagattagataatatgggataattatttgatacttgtcgataccaaagattgcatttgcagaagaactttacctaaactgtacgtatattcattccttatagttaatcaatgcaacaatggtactacaacggcagttttaatttcaaatgaaccaggacaaaatagatctgaagcacgttacacatgaattggaatatatggtatcaacgatgggtcgatattactatcgataggtttgagcatgttccgggattgtaatgatccattagttaaagatcagagaatctacgataaaaagaaatatcagagtatttatctaatgaccatagttgaatcttgtaggatgattgctataagccttcttataaaaaaagactaatatttcgagcaatctcatattatccaatgactcttaggataaaatgtaaacaatgcggttttgatcatatttcaaacatatatagattagaagaacacaattttcatagaaacttttcgaatcttgaaagttgtcctagctgtggatatgtatctaaatgcgacgaatcagattataaatcttaattagtcagagtacaattgttggcttaataggctatacctattggataatggaaaaaaataaagatctaaaagataaataaaatagcatggacgaaatgttactaatttcttagatatttaacttttttcctagatgtgctttgcagtgtttttatatttgcatggctattcaacaaaaaggaacttatcatgatgccctagaaaagacaaaaagttttctaacattaaattttctttgaagaattagattaacaaaactaaatcattaataacgaatcaaaacattatttcctatctctgtgtgtatgcggatccaattttgagaattattgatttgattcaatcgactaagattatttgtagttaatgattgaataggtgggcatgaaatgcattatgtatatgggactgtcacaatctaaattgaaggttgacgtccttaatcatgtaacaaatattatgtagggtttttcaaatctatcttttgatatagagtgtcaatgacttttatcgcatttattatgttagtaactgcttcgaagaaaagattttgattaaatccatcaaaataaagattcttacttatgtcgatagattctaaatcgtcaatattgattagtgcttttctatctaaactcacaggattacggtttttatggatgaaaacatactgtaaattcatttgtaataatgataattgcacattgcttagtaattcaaaaccaatgtttttaagatttgaaatttgactatttggttgttgattgaatatatacgacgctgaaattttgacaatctcatcttcattcaggattattatgttatagccatatctatcgttgacagttacctttccaacaaaatcaattttctgagattttgttagatcatgatctgactctacctttagtttggataaatcaacccatttgtatatgttatccagtatttcttgcaagttgaaattaatatatacagattatttttaaagatattgatttggtgtctgaaccagaaatacgaaagattgtttgtccaaagcttatcatattgacaataatacaactatttattatctattgaattttgattagtttatgattctacaggtctaggagtacaataagggagatgagccatctgataaagatattctggaaatattgtgaaattctgtctaaaagatatatttcacactgcgagatacatcattggtcctagtaacaaatttgatcaatttacaagattcaatttatagtaaggtattattgtgacacttaaaattgtggtaacggtcttacagcgttttactctttatctatgacgaacaaaagaagaaatgaaagaaatctcaaagtctatgatatttaatatttatacgatgttatataatctaatttgtgatgcctaagaatcagagtaacaaaggcactgataaccgttgtgactatcttgctgatattgcaaataactacaataaaaatgaaaaatattatgatgaatatgagagtgttttggaggcaacagtaaataaagtgaagacagaaactaaagcagttatttacaaactcaaagatgttgacaaagatttggggcccgaatatggtaaagaacaaaataatctgaaacttaaaggatacagatgaggtctaatgaatttcctggaatatttatcttttctcttgggtgtgattttagctatattttttataatatgcatcgcggttcaacaaatggtaacttatcatagtataatacaaaaagcaagaaaatttgctaataataagtattctatgaatgattaatttaattagcctcattataagaaacaagtaattggatgtcatagaataagtattgaacgcttttgataaccagggtcattcttcggctgtctaaatatcaaaccataattacagcttctttagccatgatatttcctatgtgtatatgacattttctataaatcgtttgaaatttcttgtaagattttatcccttcagactaatactatatgttaatgattctagatgtacctaatttttattctgttctatttttattagaaacgatttaaaaaatatttctaaaattttcaatctctaatgtttcgaaatctgtccagatattatatcctgtgtatacatatacttgaaagtgcaggtgtggggtatacgtatatcctgtcattccaactttggatatctcttcaccggcatgaaccttttgatttaattcgaccttagagctcttgtaatctaggtgatcatatcgagaatattcaccatttgaatgtttgattgcaataaaattagtataaaaccagtatgatgcatcaggacctccaacattagagtcatccttgatatgagttacaacaccgtctgctgctgctagaacgggtgttcctttgggagcaataaaatctacagcattctgaagcttaccgacatgagcaggagaagagtgtctatcaattctctctaacatttctctaggtatagggattgtgtatgtattttttgtcctcatctaaaaaaatattcacctaacatttaatatgatttaataaactataataagactatctttacctatgtcgcaataaagaattccattggatcattacatccaatcagtttaccaaaatgaaaaacgctgaaaaattcgaactcaaattgatcggattattgggaagatccggctacagattatttttcttatttcgttgttaatggtttgtggactttgtggtagtagttgatgtagtagatgtgtttacgtttgaatcggctgttacatctttaacatctgctgctatttgtcttgaattttgctcaaacgttcttgcggcgtttactcctgtgtttgatatgtgtcttgcaaaatcttttgtttgttgtagtactggtttccatgcatcaagggttgagaaaataacgttgtttgaaagtctaatagctgatacggtattgtctgcaacagtacttacaaatcttgtataggcattaattgctgcatcaggagaatagaagttggtaactaatccattaaaggcttcattgtatggcctccatgctgattggagtgaattgacgacttctttttgagaatctatatattcttctgatatctcttttgcagtttgtagtgattgttcttgataactatttacaatactattaattcttggaatttggtttcttgattcatctattgattttttaatattatctttggtttcatcaaatgatctgttaactgattcattgaaatcgatattattgttattgtaattattttgttggttggtattatctgaataattttgattggttgatgttttctttgacatagtatctgttagttagcgtactatataagcactggtattaaacggtttttaatgccaaatatagacaacatatgactattattggcatattgctacgatctgcttctgaaatctatattcgagactcagaagtacagcaaaaagaaagctcacattgctcggggatataatctattgataggcttatatcaatggtgagaggatggtagactcgcaaggagcatgcatctgttcagaatccaacttaatatatagttattagtaacagttctcatccttggggatacaattcaaggttgaagataatccagtatctacaaattgatagtcaagatattaaaggatgcaatatctcctaaacggttctgcttgttaaatagagtaaatctcttttatgtacaatagattggatgactgatttcaataattacaaaaacttaataatatgtcaaatgacattttgaataaattttactaaggtttataataacaaaacgaatattttcggtgtgtccggtattgatagatgttgtgatggtatgaatcatatgattgaagatggcgtgatgggaatatctaacaaaaataatagagtgtggttgaagattttaaaacataacggcactagtgatctggaaccctataaaggatttatagactacaacgagataacaaattgtccattctgtggaaaaacgattcaagttagttgatttgagcatggtggtaggactatgaccggtgggctttagaacgactactgcattttggtaagaaattcaaatcatcaatatttatacactcgtcatcagatattgaaaattcattgtcgattactgactctctgacaataacttttactctatttccatttttgttcacataaaaggaaattcttccaaaaataattaaacgagtaagaatgaagattgaatgaataccttggtctttgaaccctaagtgagttataaatccactattatctttcacaacacaatttatttcatactcctccacactatttcaattacaattgattagatgagatgttattattattttttctattgttgtatcttaatttcagaatttggcaaagtattgagaattaaattatcatcctaattcatgggaatacgattcaaggttgaagataatccgctacgcaagaatattatgtgataaaatctttgatgattattttatcactttattacacatcgattgtcaagggattcgtctcgatgtatgatggacatttatactaaaaatcatcctatcaaatgcttaccagttccacaggattgacaataaaaatcgtctccttctatacagccatctaaggagtaaaatttaacacatttactacaaaatacaaaattaactagattgccattcttgtctctggcttttagcatttcctctgtaagcttcatatatcgctatcactaacaagttaaatccaaatatcaaatatatgcgatctttagcctatttgtcttatcttcttgcataaatatttactacatttatgtaataggttccttgataatctattaatcgaccaatagatgttgtgagtagcatatttacaatatagattacaaatttagaatgtccatccgcaaatacaaggtattttttctacgttgaattgctcttaatgatgagaccatataaaaatatcttgaagtataatgaaatctgtatccacgccaggtagtcataaattagtcccttcaaaagataatgtggataaacgaacaactcagttattaaaagctaatttcctaaaataaaaactaaatcacatcgttttagattggtttcaacaatgataacaaagtggaacaagttaaaggacaattatgataagtatttttatatattgcatttaattgtcaattaaaggaaattaatttatgctagattaatcataaagtggtgtaaataaaaactagagaaacggagaaattgttctagaaactatacgcagtggtcgatatcaacatgatgaatcataaatcttttcttttagtcgataacagtataacttgatggacagaaataagaataacgatacaattgtaagacatattatactaaaaataagatatacatctgatcgatttcctagggcttttgaaatgtctaggatacaagaattaaaaatctgtcgaatgaaagtaaacaagttcctaagagaaactttttcagtaatagtcaagaattgaacatggataatgaataaaccgagtatacaatcgatattagaagaagtatcgacagaaaggttaaagcaatatctgaatagtttatctaatttccatacacggcattctaaatcacctcttctaaatgaggcaggtgattggataatgaatgagcttcgaggatttggttacaaggatactttttatcatttctttaagtcaaccattgataatgaagagtttgaacttagaaacatagtatgtaagaaagatggaattgataaaaaattgatcctggtttgtgcgcattatgattgcattatggaacgcaatgaggattcagttagtcgtgcaccaggagccaacgataacggtagcggtgtaagtgccataattgaaatggcccgggtattggctaatgaaaatctcagacattctatccagtttgttttcttttcaggagaagagcaaggtttgttaggctctaaaagttatgctaaatacatcaaggagaatggcatggatttgtatagactagtcaatctagatatgattggctatccatcttttgcacctaatacagtaattattgaaagagataataataccgatgtaaagcataaccaggtcagggaaaacgatattgaatcaattgaatttggagaaatgatgaaagatatgacctctgccgttggtctgcaatttgatctcgattccatttatgacagtgactatgaaccctttgaagcaaagggatacgtggtaattggtgcttatgacggttctgcagattcaataaagaatcctcactatcattcctcttcagacatgcctgaaaatattgattgggattatttgacttcagttactaagttggtattggcaaccgttctaaaaatagattctatcaacagtcactgatacatacaactaataataacagtttcatatttctatgacaataaatagacctgaccacgtagcgactcgaatgttgtctttgagacgggggttccaccaaagacggttgcatactgataaatagagtatttaaaaagacgattctccttggaccgagcacgtgtagatactgttcaacgttgaatataatctaaataccaaaaaacatcaaactcaatattataaagacaatttcccactccttaaatcaatctttagttttcagatattcaaacgatagttttacttgtttaataaattatacaattggctaaatgcactaactacaactaattttttccttcatctattgatatatcttactttcaatttttctttacctcatagtggagcaaaaccagaccatagtcaaacaccttggattcgatcaatgtaagtttttggatctctcaattctttgaagatagtctttccgcttccaaatacaataggaacaactaacaaatagaatttatctactagtttttctttaatcaaggaagaattgaacgaggcatcaccataaactagtatgtccttcccatcttgtctctttaacttggcaatttcgtctgagatcaccttttgcaatttgtgtatttatccagtttgacttgtttagtgttttcgtaaaaacaatctttggaatctcgatcatttttttagcaaatgtattccatgggtcaccaggtttgttcatcctatcagaccaatgtgaaacaaagacatcaaccatttttcgtcccataataatggtatcaaccgaatctgctatagtgtctatatatttcatgcaatcatcatcgcaaactaaccaatccatttcattgttggttcctgcgatacagccatcaacagagatatctacctgtagttttaattttctcattactttgttattactgttattcatctatgtttccctattattttcatctagatgatcccctctctcttctgattaattccatcgattcaaaaagacattcttgaaaataaggattggtcataaggattggagcataaagatgcataataagtataaaagggatcaaaaatatattagaaatacataaagtcgcttaattttatttatgcatattgttgaattttgagttttgagttttgaatttctgaccgtcaatactttgataatacaaaatgcattagatttgtaacttccagagaggttaaagaagaaagcaatacaaccctcacctatctctgaatattttatctccagtcgaatacatcagtgggactaagttccttgtgataaaggggttctgatgcattcagactaaaaccaactactaaatcttataaattaatttgattatcaagacatgactcagtagtcgttatttaaggatatcaaacctctaaattatcctcctaaccttcctttcaaagtcgcttaaaattactatataattgagggtataatttagaaaaatactatagcaatcaaaaaaaattagagattaaaattagtcatcttttacttcttctttgaacttttccttgtcgtattctgtacccacttctttatcggggtcttttactttgttttccattgccttggcacctgatttgatttatctcctgcttcatctaagccgctttcagtatcttcagccgtatctcgtacatcttcttgaagatcgtcttctctgttaagtggttcttgggacattgtaattgttagtgtaacaatctatttatcttatatcaaaaaatatttttgataatgattattatgtggataattctgactcactttttttgttaggcaccatttcataattttgaaattggttaaatatctgtatttgaattcattcattatgaattcaataaatctacatgaatctcctaaaatgtttattctttattgttctttggcaggctttattgctgcttggggaatctcgggactattggttagtatcgacttaatctcccaaacaccacctggttctttttttggggtaatagggatatcccttgggtattatgatcctgttactgctcagcttattggattcggattgcatgtcttaactgggactatagcaggaaacatatatggacagatatccttattttggaaacgcatgtcaccctatagcactaagcatggactaaaaactggaatgattgttggagtagtgttgtgggctgcattgtttgttccagttgcgtcgctaactatccagcccatgctagattctttcaacagaggaattagtccaaatcaatatgtttattcagctgcctctaactttaatgggctatatagtataaccatagttggatccttaatatttcacttgatctatggagcattgctaggatatatggcgggccggatgatggatatcaaagcatttgtatatcctaaagccgtatgatggaaaatataatctaatccatttggaactatatttttatagatattatgaccaatgacatttttacaatatgaggtaaggttagagaggacttttataattggataatgaatcacaacccttggacagaaacagcaacgattttaaaattttggttactggtgctagtggatttatcggaagtggattgctaaagcaattaataaaaatcaatgatgaaaataacaatactaggaaccgtcacttttcgattctatgtataacacgtaataaaaaatcttttgataccgatcaactaaagaaaaatgggaattcggatatagaggtcattgaaggtgatttaagctattatgaggattgtttaaaggctctaaaagatgtagatatagcatattatcttgttcactccatggagggatcttcaaagaactggaaaaaattttcagaaaaagaacaaaaaactgctgagaattttgcaaaagcagcagacaaatgcggtgtcaaaagaattatctttttaggtggtttaacatacggaaaagagtccgaactttctcaacacatgctcagtaggaaacatgtaggagatatattaaaaaaatcaaattcgaaggtgacaatttttcgagctgccgttatactaggaagcgggggaggttcttttgaaatgttaaggtatttggtcgagagattacccctaatgatctgtcctaaatgggtattgactaaatgccagccaatattcataggcgacgttataacatacctttctagatcaattgaaacaccgcaaaccgaaggaaagacattcgatatcggcggtccagacatactaacgtatagagatatgatgaaaatttatgctagaatccttggtaaatccattagagtcttgattattccgtttcttaccccacgactttcatcatactgggttgacttggttactccaataaaagcatcgctggctaggccattaattgatagtcttaaacatgaagcaatagttaaggatgattcaatcaagaaaattattccaatagaattaaaatcgtttgaagattcattacggtattgcataaatgaagaagataaatacaaaaagaagaaagataagagtctaattaaaaaagagcggacttctatgtctgcgaactacaagatccttttagtttcattattcttgcttttggcgataggcacaacgtactactttttagatgatagaaaacaatttctagaaatcttttggctcctcattgcgggtatttggtacctacttatctttattgcaatctattttgtgcgttttggagctaggcttggtgcactagtagcaggcattctgggatggggaagcttggcattttggttacttgataactttcacatagtttctggatactctattataggagaaaggcctgataacgatgaagtttggcgagacatcataggaataattatagcatccttcactatcatctcatcacacaacatctttaataaaatacggttgcatggctaatgtgataagtcaggaaatcgtactagaagagatggtataatattttttatttgaaaatctactacggtgatactaggtaatagaaccaattttataatgttgtataatacgaacctaattagcactagtttgattgtttagtatcgcgttaatatcctagcaattggatattaaaattatggcttttattcgaattaaaaagataaagggttatgattattactatctagtaagaagtcaatgggatccggttaaaagagatctactcagcacattatcaaatatttaggcaacgctgaaaatatcaatatccaagatattccggaagaacaccgggacaatccaaaagtattatctttactggtcttgttcaatgattcagaagaaaaaaggtcaacacatgattgattgaaaaatcaagtctgtgaatttataaaaaatggtccgcaatacgtccttagggatacggttcaacgttgaatacaatctaaatatttagtttgacatacatcgggagtggggctcgaattcatatcgtgtacttgcggattcatctatattaaaaattattaatagatgtatttttatttattgaatccagtagaacatattcgagatataagatttcattaaatggacataggtgtcaggcgggtccatacattttaaatacaatatttaacaacctaatatgttatgctatttaatacaatgacaaatgataaaaggaaatttcttttgttctctactatatgtgtagtagcattgtctttgggtttcaatataatactgaatacaattaatttgattgttactggaaattatatctttgttagcgcttttgctcaacaggaactaccaaatatacctaaaaatgataacagttttacaaatacaaataatagtatgtcatcgtcaggtaatagtccgggtaaaccttcagaagagggcttaattaaactatacgataaagtggaccactctgtagttcaagtgacgcaaaattcaaattcaaatataccgggcatgtctcgactaggttcaggttttgtatatgataaagagggacacatagttaccaattaccacgttgtggccggagacaatatcaataaagagtttgacataacattcactgatggatccgcatataaagctgtaattgtaggtgtggatccttacgctgaaatagccgttttaaagattcccttagaaaataatacccaagtgagagagaagctaataccattaatgataggcaatttttctgaagtaagtgtaggacaaagggttgctgctatcggtaatccctttggcttgtctgcatctattaccgaggggatagtgagtggtctaggaagaacacttcctgctctaccttctgagattggtccaatacctcttgttgaagatacacctgctttttccattccaaatattatacaaacagacgctgcaataaaccccggaaattccggtggtcccctactaaatatgagaggtgaagttataggaatcaatacggccattttctcttctacaggtgtgtactcaggagtgggttttgccattccctcttatctaatacaaaaagtagtaccttcccttattactataggtgaatatcaacacgtctatttgggagtatctggaactgatttagatgcagacattgcagaaataatgaaccttcagaacactacagggtttctagtaatacaggttacttctggcagtcctgcagagaaagcaggtatacatggaggagatgtaataacagaaataaacggaagagaggtagagctgggaggagatgtaataataggaattgatgataaacctattagaaaaatagacgatttactatcttatctagatagggaaaagaaggttggagaaaatgtcactctttcaattgtaagaaatggacagatacataaaatagatttaaccttggcggccagaccttcatctacagatttagacagtgagattatacaggaaacacaagaagtaggtcctacccttggtattactggaattaatgttacacctgaaatagctttacaaatgaacgtaccttctaatattactaatggaggaaaaggattcttagtaattgacgtcctaaggaatggttcggcagagagtgctgggattaagggagggtatattgcctcaaatattggtgaaaacaaaatagaacttggaggagatgtaataataggaatcgacaacaccacaataggatcggtagatgatataataaaagcactttcttcaaaacgggtaggagatagcgtgcaactcacagtatatcgtgatggcagcacactaaatatcccaattgtattaaagaatggaactcagccggatttaatagacaataccatacctatacctccaccacctacttttccttccccgaatattccgggagatccttctccattccaaccgttcaatccatttaatgattttggtaatggtatctacaatcaatgtgttgatataatgggtaaggatacttgtgatagactatttggaagataagaaataaaggtttatttttactacagcaccctttttttgtttggattttaacaaatacaaatagaaagggcttacttggtctatgggaaagacaaatatgggaaattatatctagtttctaagtttagccaatgtgtcgaaacattatctggagaatattataactcctcaatttcaataaatctgataaggatctgaaggtagataacacattctattttttgtttattgtttaaaattgcctcataataatgaaaattatgataattctaaatatcatctacgtccgttgggattaagttccaattgatagcatagttctaatgtaatttaatgatgtcacatcttttaaacttaaatgtataaatcatttctataaaagttgtatatgtatttcgtaacgcatgatcaattctaaaatacatattttatgggattaagtctttttgactagatagtagtaattaagaatatctccatcaatttgtttgatgtcaattgatcctgaaaaaccagcttcttttagtttttgttccgccatctgtcgtccccaaactgttcctaaaccctctccatcttgcgccaatgaaacagtcatacagtgcattgttgagaatgtataaagagtaggcgccaaagggttttgtatgttttcttctgtattacttgaagcagcaatgtcttgcattaagaaagttccattcggttttaaggcgttatagatttttgataatatagccgtaggatgagcttgatcgtgtatagtatcaaaggcggtaataaggttaaatttgttagtatcagttaagctattgacatctctaacctccaattgaacattgtcaagtttcatttctctagactcctttattccagattctatcccttcctctgataaatcatatccaacaaactcgctatttggaaacgcttttgccataagatttagagcatgaccacgtccacaacctatatccaggacaacggctccgttttggagatttttaattacatcctttcctgttaaaggtattatctggtctatcaatctcgaatcaaatactctagaggtttcttctgcttgaagtgactgaaaaccagggtactctgaatagggtacgccacctccatttctaaaacaatctacaatcttgtcttcaactaatcccattagagaaatatattgagaaaagagagcaatattgtcaattcctgcagatcttgttgtgaatgcggcatgttcagaaggcaaaaaatatctttttcgatcaggataataatgaactatacctccaacaaccattgctcccaaccactcccttgtatatcgttcattgagatgtgctttctttgctatttcctctgatgtgcttgggatgtgtaattctgacaaagtatcaaatagacccgttttgtgaccaatactaatcataagtgaaaggctacccccattgattatttctaatagttttccagcaaatgcttcagctttgacattatcaaacccagatttctctaccatgaaaagtgattttccactaaaatattaaagaattgttattgttatcaatctattagatggccttttgcaaatgatggccattttgaaaagataatatcaatatttatcgtctgctctattcagcgtatttaaatggatcatggttagagtcattagggtcaccaactgtagatgttggtaagaatataatgtagttttacgaacttttctcttcattaaactttgaatttaaataacttgtttcattggtaatagttcccagctgtagggaaatgattctatattgaatataatcataacgtacgataacggaaatcagagcgtagatattgcattaaagagatgacatcataactttagtaggaacaaccaaatgttagttaagtggattgggatcagaaatggcaaatactaatagaatactcctatatctgggggctgcagcatgtaccggtatagctggaattttacacctcatgttagttccaagctcgattatggcaggtatccaatacactactttttttttgatttctggtctattacagctcttttgggttttaccgatggtaaaaagatggggcaggatttggaatattatcggatttgcgggtacggctgtgttagtcggtttaactggttacgttattattgaatcggttaggaatccgcaattgacaccacctggggtacttgaactggcagttgcaacagaaatatttcagatatcatatgttataattactgcaataattatatttgtcagaagatgatatttgaatatcatcacttgacctgagtgatgagtaataggagttcaaatgcaagatggtattcgcgaaagttatgatccaattactttaccatctgaagcatatctaaataaatcagttgctcaaaatactttccaagttggaagcagatgggatccttcagagaatacgaggtaagcataccattcgattggagttcccagaattacattctcgtagacgatcaaaatctgaaaaaagaccgggattgcatataatgtatagatttacagatagtgtaaaagggtaacatagaatacgttaacctctttgtgcagtaaagagaattatccttgaattggtcaatcctatagtgtaggaaataagtatatcaaacagtaaataataatttggagaataatgatttaagtttatttaaaaaaaagataatgatcttgcttaaataaagaggtaataaacccaaaaaaagggttatttgcacagttctggggcttctacacagatgagatgctgagttccatagattggagtagttccaaagtgattattagtcgaattgccatcaacagtaatggctatcgcactttcatctagtaactctatttgtgttggcacatttgaaactggtccgtctttaagcgttactgttgttgttccattgagcatcgtagagtttgaactgctatcaacaaccgggctacccgataacttgaggtcatatatcgagtgaatatgttcggctgtaccatctattttagtcatatagaaagaagcgttaaaagcaggagaggaggaattaaattcggtaaatttatacactccacctaatacccaggcaggctccgttgtattgccatcatttgaagtacttgtgatacctccttttaggacatttgagtccgtattcgaaggattttgagcaaaaacctgattcaaattaacagccactactatcaaagaaacagaaactgctaacaaaaagatggtctgaatcaatctattggtgattttcatcataatttatctaaaaccctggtatttaaatttcattagtagggaatagtttgttttggtctaatatcacaagctttggcaattaaagaatatactgaaagatatgcttgattaactcggggtaagtcttaatagtgcagtctaatcaggtcaatttgaaattgaatttttatagcaattattatttaattcattagttacagttttcatccgtggggattaagttcatgctggtagtagagttcggtcaaccttcctgtaattcggtatacgccctttctggtaactttgattaagtctgtggctaccaatatctattaatccgatattaaagggcaaattattgcataatcattatttgacagtaagaaacagaaaagataagagagaaagaaagaggtaatgggctttgtaaattacctaccttcattactcgagtttagattacaaaactaaatctaattaaaaaaaattgtttattttttctaaaataattttaattattgagtagttgaattaccacccatgctggtagaattgtccatcgtcatggtcatattactatgatccattggcattgttgaattatccattgtcattgacatgttatcttgtgctactactggtgttaccattgctattcctgcaaataaagaggctgcggctatgatacttaaaactacaaatacattgaatttattcatgcaaagtacatttaattttatagtatataatatttattttagtattagtatattatactgtattaattttatagtatatattatcttgttagtatcagtaaatatattaatttttatgtattaaaaaagattcataatttaacctttttttgagaaatcgatatatagacactgcttctttttttgttcttgggtatctggaagaaacacatgggatcttttttgctttgaatctttcacatattccattgcagctcatgattcatccatctcccgaaagttgatttatagaagatagtttattctaattactatagttaaggcagttataatagtggtaccaatttcagagatctgatgaggaaggctttttgtacaatatgttttgatacgcctgcatataatttgtttgacaatcatacacttattttgaatgttatgaacggtcattttgactcacaaaagaaaataaagaagtatttacacatgatctattagatcattttatttaataggaatgccttacgtatcttttctttatctatatatggaagtaacgctttgacagccataaatactgctatacctcctaatacagatagtccaaaggccatcagaatatcgtttgtggacagattatgtaactcagggacaccatgtccaaatgctccaggagtcaaagctgcctggactttggaacgcgctacctctaacgattgataccatggatcagtagtttgtaattgtatctgtaagtgctgcgcatacgctgtcttgcctctgttaggtattgatgccataggaagcaatcctagcactgagacaaaacttaccaacaacagtttgggcaaagattttactctctggactatttgattttgacctctgtagatgattttggttacaaatttttttgtattcataacttgatcaccatcttatttcagttcatctactgtaatttattttttactttattgtttttaatacataaatgttagaaaaaaatatatttgtaatatttctaacaactatacaaggtggtttgaatgtatgagtattgggatagaaatagagacataataccaaggagaaattcattcaaaaacttttttgaggacattgatagagagtttgcgcaagctgaagaaatgataagcagagtctttaatacggcaaaggatttgggtcctatgactattgacgcatttaaagaagcatcaacatttccatattattatggataccaaataactgtaggaccagatggtaagcctcgtgtacgagaatttggaaacgttaaacctggagctcgaggacttgtagagcagtcaagtattagacagccattagttgatacagcagtcgatgaaaagaataataccttaactatcaccgcagaaatgccaggtctaaccaaggaagatatcaaagtgaatacaatagagaatcttttatctattcatggtgagaaaggagagaaaaagtatcatacggaaatacctctaaatgtcgaaatagaagctgactctgccaaggctaattactcaaatgggatactagagttgaagttaaaattaaagacacaggcaaaatcaggtggaaaagagatcaaaatagagtaatgtagcgcacaaacaaaaaatccttaaaatttttgtcaaaatgattggttgaggtgataatgaaatatggttgatgtcaataataaaaaaaataataataataataataataataaagatccaacaatatcgctaaaaattgctgaaactgatccgaaatttgtaggaaagggaatggctttagtggatccgaaggtaatggaaaggatgcaattaaagcctggagatgtcatagagattattaacaagaaaaataaaagtacctatgttttgctttggtcaaaccctcatgctgattacggaaaggggctcataagagtagacggttatacccgtaacaatataggtgaaggaattgatgatcgtgtaaccattagaaagattgaaaatatagaaaaatcagagcaaataatactttctccaacagaagaactcaatatagtggggttggaagagcatctacctgaaatacttgacggaagagtagtaacaagaggtgacataattcctgtaaatataatgggaagaaaaattggatttgtagttaacagtataagccctattaataaggttactataatagattcacatttaactgaatttattatcagtaccatttcaaaagaaacatcaaaaggtgttatgcctagaataacatatgaggatataggaggtcttaaaaacgaagtacaaaaagttagagaaatgatagagcttcctctaagacatcccgaaatatttgaaagaataggaattgaagctccgaagggtgttcttttatacgggccaccagggactggaaaaacactgttggccaaggctgtagctaatgaaacaaatgcaaactattattctattggtggaccagaaataatgagcaaattctatggcgagtctgaagaacggttaagagagatctttaaacaggctgaagaaaatgctccttcaataatatttatcgatgaaatcgattcaatagctccaaaaagagaggaagtctctggcgatgtggaaaaaagaattgtgtctcaattattgactctaatggatggattaatggctagaggaaaagtagtagtaattggagccacaaacagacctaatgctattgacccagcattaagaagaccaggaaggtttgacagagaaattgaaatagggataccagacaaagacggaagatttgatattcttcaaattcacacgaggggaatgccattaacagacgatatcaaccttgaacaatttgccaaagtaactcacggatttgttggagcggatctagaatccttatcaaaagaagctgccatgaggtcacttcgaagagaacttcctaaaataaacatggaacactcaaaaataccaatagaaatccttaacaaaataaaaataactaatgatgactttgaagacgcattaaaggatatacaaccttctgctttacgggaaattcagattcaaagacctaatgtatcctgggaagacattggtgggttatcagatgttaaagaagaattgtctcaagtagtagagtggcccattaagtatccggatctgtttacagaaggagacgttaaacctccgaaaggcctattgttatgcgggcctccaggtactggaaagacgttgatagcaaaggctgttgcaactacttcagagtccaattttatcagtatcaagggtcctgaattactatccaaatgggttggagaatcagaaaaaggggtaagagaagtatttagaaaagcaagacaggcagctccttgtattattttctttgatgagattgattctatagctcctagaagaagtagtggatcaggatcagatactaatgttactgaaagaatagtgtctcagctattgaccgaaatagatggtcttgaggatttgaagggtgttaccataatcggtgctacaaatagacctgatataatagatgaagctttgctgcgtccagggcgatttgataggataataaaagttcctctctcagataagaacgcaagactccacatactgtcaatatatacaaggaaaaagccattagactcgacatgtgatctcaacaaaatagccgaattaacagaaggatataccggcgcggatatagaatcactagtcaatgccgcagcaatagcagctatcaaagagcacatttatttgattcaaaaatcaaagggcactaacgtaacttcggaagttaaagagaataataataagaaaacatcagcagtagcagtagcgatagcagataatactacttcaaaacagattggattaagaataggtatgagacatttcgaagatgcgctgaaaaaggtaaagaaaagagaaacattatctacttttgttaagtagacttttatttgcccattcatctatttcacttttttcatttccgattattgtacttaccgtacgttggctaagccaaagtgtacaaagttaatagaagaagatagatagactaaaacatattatatttaggtaaaatattatgattattggaatacaatagtagaagaactatcattttacccatcgtgcttgcatcttcaatcattttggcaatattatcgtacaattattttacgcaaacagcgaatcaaatccaagagctcgctatagatgatttacaaacaaacgccgagatagaagcctatagcatctctaatagtttatcaaatgcaatttctgctgtaacatcgaatttaagactaattgctaattccccttcaacaatggaaggaaatatctctaaaattcaaaccttgtttgatcttggactggaatctactagtaacctgactgacggctattactttttggacaataatggaagattgaaaactttcaccggaatagagaaagaacaaaatgcaaaatatagggatattgacttaagtcatagagaatatttccagattccaaaacaaaatgaaattccctatatcagtactgtcatagattcgaatgataacgtacctcgaatgtatatttcgtttcccattctcgaaattaatcaaacaaggttatcagaatcagtggaatcccaatctaatctcaatttgactgactttaaaggagtgatggttgcatccattgcagcaaaaacacttggaaattttcttgaaggccagacacatcctaaatttagtggtgatatagccttcatggatagagatggcactataatatatacacaaaatcaaacctacattggcaaaaatttctttggaggcgaatttcaatcgtatttgaaatcaattttgaaggataagactgcagagtttaataatataataaataaagcacttgattcggaaagtggattaaatgaatttaactttgaaaatacaagcacaacaatagcctacgaggcagttagaggcctcaaaatcaatgaaaatggcgaattcgacaatagtattggtaccttatttattacaattcctcatacactggcaggtgatgtggcatctataattgataatcaaaagattatcaatttttccacaatagcgttaattgctgcaatagcatcagcgataaccgttgtattgttaaaatggaataaaactctccaagaggtagtcaaacagaagacctctctactacaagaaacagtggataaattaaaaagtgctaatgaagacttacatcttcatgataaaatgcaaaaagaatttatcaatgttgccgcccatgaattaagaacaccatcccaggcgatatctggaaatttagaattaattgaaatggcttatcttccctcacttttcgaaacacaatcagaagcagaagaagcagaagaagaagatactgctaatgaggaatttgagaatttggttagagataagaataaactgcagcaattcaaatctgtccttgtttcgacgtatcgaaattcacaaagacttgataaacttgtaaatgatattttagatatatcaagaattgaaagcaacagactagagctccataaagaatatttcaatttaaatgaaaaaataaagaatgtaataaaagatattcacagtagacaatcttttaatcctttactgaagaacttacaaaaaaataacataaacatagatttcgaagcctgtgaagaccccataacagtttttgccgacaaaatcagaatatttgaagttataacaaatctcttaaccaatgccataaagttttcggaggacaagcccattaccatttcagtcaaaaagattcagaaaaataccattgaccttaaacatcaacttagtagaaataatgaacaagtcgatagaggcgatacaaaggaaaacaaaaatgaaactatgaatatgacgatgatgatggctgtagtttcaatcagagatagaggaaggggaatagacccagatatcctgccaaggttatttaccaagtttaccaccaaatcaaatcaaggtactggattaggattgtatatagcaaagagcattattgaagcgcatggtggacaaatttgggctcaaaataattacaatggtgaaaagggagctacatttttatttagtttaccattaaacaggtgatccagttattcaatgccaactgattaatatcgatataatgctactactctctagtgacaacaggctcgaataataaactgctactattcctcgttttcatctagtgtgaacgcatgggaattggtgctgatatcggtattttaaaatagattcaataagttagacaattagagaaataaagattttagcgtggtttcagatacaaaatctagaacacgtgttctagattttgtggttaataggatataatgaaaaaatatttacgaagatagattgaataactgtattttaatcactatgttagttttcacttcaactactgtcatcaccgttactatcaatttgttcattactaacttcatcactattgttgttatcgctactgccatcttcaacggaatcaccttcattattaccattctcattttgctcctcttgttgttgttgctcttgatcaattaagggttctatttctgcatcttcattctgattactgtttccattagtttcttcttcactaccgttagcactagtgccattattgttatctgaatcggtagtattgttttgactacttgtttcattagtatcatctggttcttcaattacctcaaaagttgttcgatccgtttcttttacgtatcccgctgcatcgactgtggctgtaacatcaaaattaccagtattagatttcggaccaatttcaatctcaaatgttgctattccattattatttgtttgaccactttctactttatcaaagttagtggtgtaaaatatcctaagatcagtattggcattagcaattttttctcgtgtattttcgtcactaactatcacatcaattgtttgaatatttcctctcactagaggaactttcttaacatctatttctatatcaagttctgcacctgtaggagaaggaacagaattaccgttactagaccctgatgaagatgattggccagtgttatcatcgtttacaaacccctgattatcgcttatgggtggtggagttgtaaacagacttccaccactatcaataaatcctgtatcgactccacctccacctccaccaaaaccatcattattaaaaagaaactttgtgttggttggaaaagccattgaactttgagtagaatccatgtttagggaatagaacttgccttgagattttgtcttgttatcaaagatagtgatatcaaagggtgtaatctgattttgagataagttgccaacatttaggccaaaactttgagtccctacaactcccagacttgaattatcatagaaggttgcaactagatttaagaattgctctggaaatggtccttggttgattatattaccagtgatgtgaggatttccaatattgtctaaaaaggcgctagttccatttaatacaaggtttgctggtttctctattgcaggttgcgaagtagtaaaaaattccataaagttaaacttgcctaatatctgaggatccggtattattatatcaaatggagaaagttcggtttgtctaagagttgatattgatgaaaacgcagagtaatttccaactaaaacgttgttgtttgtatcagataaaagagtagtaattatgatatttgtttgtggatctatcgatgtgttatttacctcacctataacatgaaagttaccaaagtcatctgtataggtagaagtgcttacaatctggataatattgttattagtaagttgagcaaaagcagatcctgtattccacgaatcagattctccagggtaagaaactgtcatggaagccaaagatactgtggatactgtcaatattacaatgattgaaaatgattgcataagtttagaacgtaaatacaacagtttgatattcgagaataaaaagtataaaccttctcattaccattgctattaaaagtaggggaaaaccctggaattgaatttataacaaacatatcaagaagaattagcacaccagatggaaatgccatggggattaggttccttatggtagcatggttctattactttgaccaacggggaataaactcaaaaaagcatattgtgaaacataggaatctttttggcaatatacaaaatatgagagtagttatccatcgttaagttgtaaaatttattaatgtagtctaagattattagatatcaatcaagtttaaaatcaaaaagtgtagtcattataagctttgatatacaaaattaaggaagtagtagaggggtgttgttttatcacgactaaaaatactataatatctatgtatccagaagatgcagcaaagactattagaatacgattatggcttacattgtttgctaatatattctgacttaactatgttaagggaattttactctcgctatatacccgaacaaatcagatacaaagaagaaatgattcaaatcaacccgttctatgaaacagaagtgtctgttagacaagttctctataaaggatataaaggatataaaggaatgaacacggataaaattgaagataaagaagaagataaagaacaaaagtcattgatgattgtcgattctttaaggaattatagtggtcaaaaaaatgcagaatctatatggaatgccaatcaagagatggttaaatatgccattggattaggaaagaaggtagtttctattatgggagatatgggttcttttctttttgagaagcgaattgaggaacttgttaattatgaactaagtttacctagacggtttgaaattaatctaaaaggtatatgcttgtatcatcagaatgattttgatagattgtcagaataccaaaagcaaacaataataaatctacatgaaatcgccataaggttatgagtgacttagatagaagattatctatttttatttattatatttgtcataatattcagagaacggttgatttgatcagggcttatttatcctgttatcctaattaagatttccactacttgtttataattgttctcaattcagggaaaccaataggtttttgaagcagtttgtcgattcttgcttcgatatagttaggctgcgtttccaaatctcttgcatcacatgcagcgctcctaatattcttatactctttgcaaggtctattccacatagtcgcggcattcttaaatcggtaattattagagaatgtttatcacaagtttgcttaaagtattccaatgccagcgctggattattaataaaatatgctttaaataatcactttatcttctagtcaatacctgatggtttgtagagggatttgtattagattcaaagcttctggaaagagtataaacaaaggcagatatataaaaggacaaaaacgatgtcaacgttgcgatatttatattacttggaatgtatctgtattttgtccctgttgtggtaccagattacgattcaaacccagaaacggtaaattaaaacttaaatttgaaaaggctaaaagcgatagagaacatacagaagttttgataatatgaatctaaggtgtcggatctagttggaaaaacattaactttattcacccatcattcaacgtttacaaataagaatttaatgaatctccattccaaaacttagtaagcttgactttaactatgccagatattgataacaggtctcatcggtggggattaagttccatatggtataagggtccggtagaaagagtcatacattagtgaataattcgtgattaatccatatactttcacgatattgagacctcgccataatctttaacaattatcaatattgctctggtgcgatataaaaattcaagacaaataagtttatgacaagtgatcaattatattttaattcagtaaacgttgtaagaggatttcttctagttttattataaaagactaaaatactatgcaattgcataagatactatgactctaagaataaaatgtcaactttgtgattttaaccatatttcaaatatctaccgattgggtgatcataatttcggtaagaatttttcaaatttagaaagctgtcctaactgtggacatgtatctaaatgtgtcgaatcagaatatattattaattagtcagagtattttattggcctaataggcaatgcattaggaaagaaaataaaatagcgtagaacaaatgtataagtttctaaggctatctattttttctcttggccgtaatttttacaatatcttttataataagtcttgtcactcaacagttagtaacctattcgggtatcattgaaaaggcaaggaaatttgggaataataaatatctaaagaattaattaaacatgtattattttgtttcatatatcctacatgataataatatgtaatcccaactcaatcttttcatggacagaattcgactaaaacgctgaaagaaataaggagtaacaatgtttatttaaccttccttatgcgattaagcaagttactgatactgatcgattataaggtttactttgaaaatataaagaatcttgttatatgaaatcaatcgtaataggtctcttctatagaaaatatatctcgcgacatttggctatatactatgttatatataaaatagtgagtagaatttgttttggataatttattaaaatctgtattaaaacgtcaaataccctatcttataggtggtacaataactggcacaattatggcttattattatgggttcttgttcactattatagtaaatagtattatctggtttgctatttcaacacctgtcaacaaatattattggaaatataccggcttcaaagaagaatttcagcttgtctcgaaatatattggacgtataaaaaagagaaaactaaaaataattttatagtcaaagatgataaacacgctctctgaaggagtgaatgcagacaattactctgcctcaaatgatataggcaaaaataaaccgataatttgggaagtcaattaaaactctaaaagatagggtatgatactcttgtcaacatcaaataaattttccatcaagtccaaaaagtactagttttagaagaaggtagaacacttggtgcatatcagacaggtgttttcgaatgcctctatgaaaaaattaaatcagatcaacataataacgatatgggtgttccattaggagaatacaagcagcaggccagtggggattaagttcctagtggtaaaggggtcctaatacaacttgactagaatatatttaaagttgaatagattttgatcaatgggctaagggatgtagtaatagacgtagtacgagtctagataaccaatacaaatcctttaaattgatatctaaaaagaataacatcgctattttttcttgtaataaaaggttggattctcaagcttgatcatagcctctggccagttaatttctttacttgcggttgtccattcgacaaatgcagaaccttctccagcccattctgtgaactttttaatagcggtagcatgaggttcttttggtacaaatagtttgagtgattcaatatcattccaaatggataatgtccagaaatttttctttggcaaatcggcttttacagcatagttagcaatacccttgctgttttttatttgctttagcacctttcttgataatatcataaaagaaattaaatttctccatctctttagtggaagaaaggtggcaacacatacaaattcttgttgttctgtacgttttgcatctatctcgcctttcattatattcttgtattagcgatctagtaaaaattagttatggttgaaatgtatatgtcgtgtatgtgttagacgacagatagtacttaccaatgtgaccgttcctaactgactttacgataactagtaagatattgattaggcttaaatttgagaagatggttgtattttctttgggctatagagtgcattggtattcctggaagatattaaaatacttaactgtatcagaaacctgccatcggcgacaatagtgattgcagcactattattactcacgaattattatttttggcaactcttttccctttggaacaaaatgtagagataacgaattgatacattcccgagtgtttttatctgtcaaatgttctcccaggaattcgtgtcctaaatgcgcatcacaattttcacattgtatttctgttcttattccatcgacatcaggtatacgttttaatgcattttgtaaactttcatcaaagcttggccatccacatcctgcgtcaaacttacttttggatgaaaagaggggattattgcatcttcgacaaataaatatcccatcttcataaaaattgtcatacttaccaatgaaaggagcttccgttgccttatttacaattattctctcttcctctggtgttagcttattgtagctcatactctatagatttcttagttgaggatttaaggtctttgaatcttttacgcataatagttaccaaattattagtaaaataataatatttatataaattgttataaatgacattaaatgacaaaaaggatcaaacttagagccatttctcagcctcctgagggatcacgtacagtctttgctactcatgataaggacttgttagtcaaaggtatggaactcgaaacctacacttgtggacgctgtgaatttattttagcagaaaatattgttccagatacttataatgatatagtctttcagtgtccttcctgtaaatcttataataagatatcgaaagaatgactaattcttttttttgagactaatgcgacatgggattatctacacgatgttcaggccgcattaatcgcaaaaatcaacgccaccggtcagaaagggtttactatagcaaaacaagcagctatttactcatttgcaactgatcctactcaaatcaaactcgatcattctattactaatgtatttgaatagtgttcttcttttatttctattaacttgagactaacttcagttatgaagcaggcccatggggattagtgctgataccggtatttaaaaaggattctagtaatttagacgataggagagatataaaatttttttgggatttcaaatacaatttcacatgtcatagataattaaatagttaatataggcaacagattgtcgtaatgctaataaaaagtagaaaggagaggacttaattattatactagaactatggattattcaagttactcatttttggtagactaaatacaaaggtagatcctataccatcttggttattaaaagcccaaattttgccacccatagcctcaaccaattttttgctgatataaagcccaagtcctgtacccacatctgaatccgtattgaatttctcaaataatctaggcaaaatagatggagatattcctttacctgagtctgatacagcaatgtatacttgctctttttcatactcatttgatttagctggtttcacattcccttgaggaaatttacttttgtccttattctgaatcattttcttattttcttggacagcaatgttctcataaattagtatgtctaaactaccactattgttagaaaatttgatagcattatcaatcaagttgttcaatatttggtttaacctggaaatatctgtatgaatccaacagtgatcttctagtaacgagtcattgataaaactaactttgatattcttgtcttttatcttttgatcaagatgaaagttaacaacatcattaatctcttttaccaaatctactctttctttttgtagcattatcatattcttttgattagagtctattcttgcaacatctagtagattatttattaaattccctaaccttattgcatttctagaaatactttcgtggtggtcaaaaagttttttatgaattctttctaattcttgttgttgtagttcattactatattttagtaaatggttaaacagttcatcatccatttctgtatatcctgttatggcttgcgtaggtgttcgtagttcatgcgctgcagtgttaataaattctcgttctatttgttcactttcaactagtttttcattcgcagttcttaaattatgatataactctgcctgatcccaaaggctatcaaatatagatatgtacgataaaacggtgggtttactggtagaatatgtagataatccggaagcctctctaaatgtttgttttgagtcatcctttagttccacagtaagtaaaaactttttatcaacaatgaggattgttgactttatcctctgtgactttgctatttctcttacggcaatatttctatattgtttattgttttcttgattgtcagatagtgataaaaaattttgagtatctctgtttataggcgacatgatactaatcccaatatgttcatttctttgccgattcaataattcaataagtagcccctgtcgcgttaatgcaccagtagagggaagcattaataggatttcctcttttgccttatttaccaagtttgaaaatattctttctgcttcactgggatcttctatcactaaagtagattgagtaaattgataatgcattttttctttagagtttaaggctgtcttaatgttagatgggtgtgtatataatttatcttcttcttttgttgagaaggtcaaagaatcctcttttacaaacataggatcggtgttgttatcatgatcgtgtgaatgtgccaattcccatcaaacaattcgatatagaatttcatatgataaatgtctttattatatatcttgactggttcagaatcattaagaaattcaggatttatgattgttaatggccttttccatgaatatcagatgctacctcgtataaagtaagtattagagtcataaagtcaacagatttattgataatattattgacaatcgaattgagtaattgtcatgtttaaccatgttgagatgtaacgagttggatttgttgcaaaagacatggaacaccgattttgtattctgagattctgtggtaaataactatttgggtcagtcaatcttcctatgttctttttgacataactgttctcttacacaatttacgcacagttgtgaattagttagtgtctgtaactttctcttgcagtggggttcctagattgtttaaggtcgatgtggttgattcttctgcttgtgaaagagtttcaatagattcaccacgatatttgttcaaagcttcattctcagaaatactaaatcgcaaaatacttccatcaaaactttctgctttatcttgagggatcctgaacatttctacatctattaatccccttcgagtaaatacaaatccatttgacacaccctgcacttcccctaaattagcatcatttattccccttgcttctttttttactgtatcgttccaatctatatttgaaatcatggttttatttattaaatatactataaaaagtgtaataattttgtaacttcaaatagtaatagtaagaaagttgaaaagatatcaataagaattactattatgtaaattcaaaaataagtataaaagatttcaatataccaaggttttaggagagaagatttagatacataagcaaataacctaggttgctgctgaggcaatagatttgtatatacaagttatgaattgaatagaatatacggcaaaaatgacatagaacttttcctgtcatcaccatgtgcattaatcttattctctatagaggcaattaagatatcattgaaaacatcgcattgattaaattgcctatctaatggagaaggtgtaagtgatataagaggattgttgttcttagtaacttattttattaaatgcataatttctccacaaattgggattttaaaacctcattcacgttcgaagttccactacaaaaacaataacactagaattaaaatataaaaccccttgtttgacagatgctatatatgacgtataacggaaaaattggagatttggtcagtcatgtgatggttgtaggctgtccaaaatgcggaagaaaagataattttcagcctaccgtagcaaacagaattgttgatcaatctactcctgtggaaactatagaagagctcggcatgggtaattggtcaatcacttgtggtaatcctaaatgtggctataaaatatcaaaattagaagaaatttttagggattaacgttacaagttcaccggaaaagaatcacaatttgataacaaagatgatttaatagatataaaacccgggacttttattatctggcgtaatagctgttctcactaaattacagatattatcaagatcatacaactaaagtagaaaaattatttttcaatatttttagaatctctagaaaaaacaaagtaagcggtggaactatgaaaaagaaaaagaaaagttaagagaaatactgttgatcaattgtggaggctttgtgctttcaacgtatggatcaaaactgtattctaaatccctagatagtttcttttgcctcaaagattatagctgtgctcttctgtatgacacaaagctagtgattcttatactttcataaacatggactaaaggtaaatgatacaagcatgattcaaaatgaaaaaggtagaaaaaggaatgatgaagccaatatagaaaataatgaatcagacatcttagagcaaggagatatttacttcttttatagaccaaagaagaactcgtcaaaagtaaaagacattgatgatattcgacgtttttttatggttactgcacccgataaacagaacaatagatatatgtccaagactacaggaggaaagttttatagattatttgtaatagggaaaaaagcacttccagaaattagaaagagtgaagcgagagcctctgaaagatactgggctcgagtaggaggaatatttgaggaccaaaatgatcttacaaaggaactattttcagatgaatttagagagggtgatgctgcaagaccagttggagcgggcaaatatgtcattgtaagacatcaaaaacatgcagagattgcctatattttggaaactccatacaaaccaggaaatgcccaagaagaacttggaatagaaaaggaggcaagctatataatatctgtcataaatcccaaaagccctgtaccagaaggctttccaagtgcagaagaacatccaaaatatcctgaggaagtcttaaaagattttgatgaaagtgagaactttacatctctgtttgaggatacacaactgatagatttccctaatgcacaggttatcctaattggagccagagaaggaaaagacattattaaacacgacctcgggattgatattgatctagataatgacaacaaaagaaaaaaagatttagatgtattaaacaaacttaaaacttcctttaagaacgtgcctacaaaacctttgacagaaggcagattagagtaaatagtaattaggattatttttttattacttccttgagcaggattaaataatattaaaaatatttaaccaaatcctatttcatagtaactgtttgttttgttatacaatcttatattttttacaacttgtttaaaattatttaatcccaattgaaattaatttttaaatataaaagtagtaagtttgaattttacatttttttctaatatagttatatcctttggtgtaatattacttacatgtccgaagagccaactaatgatagaaaggacgatttcagacaaaatattagtaatactgcaggtaattctgaaaacagtttagacgaagcaggagataaaattaaagctggcataaaggcaataacaaagaagttaaaagatccggataaagacttgcaagcagagtacacaaaggaaaaatttaaagaagatacaaaggattattgagattaagatattctttttattatctgaaatcaagtcagatcctatacttgtcaaactttttactcgtaaattaattttcataacatcaaaaccacatcctaatggtcaaatttatcgcgggctcgttgggatacggttcaagattgaatatagtctagatgagaaaaccatattgaacatgggattagtataaattttggagtctattttcatcaaagttataacaatttctcaactgagatccaccttactgctgtcgatcaactatttttgttgatgcaactccagaaagaagggattaaaacaggaaagagattcaattgatttaggggttcaaatacatccaaagttatttgaaaaattttctacaatagataactatagccccggaatcggattaggattacgattatacatctcaaaatgcatagtagagattcacgaaggaaagatatgggctgaaaataacaaaaatgaacctgaagctacctttggtattagtttaccattattagaacaatgagttatttttgtaaccccttttgaatatgtcgtttcaaattatgaagatttacattagattcattatctctagttcaaaaaaattagtggtagtgaggttgtactgctttaatacgaaatcagattcgatgaaaataataggttaattgtgttatataatcaattaaagatcgtcttaaaatatctaaataattctagattcaacatcatccccaagtcctagggacagttataaaaaataagggaataataattaagagtttttttagtacagcaaatactgtcttacatcaggttattccaagagccacatatagtctgcaagaatggggcctgattcactttttgttaaaacgatactattgtttaaaatcgacaaagaatcactttcggtattattgaacaaggttatgccgttaaataaccatttatcatcaatctgtcttccaatatctgaagaaatccaggtgatattttgtccatccatagtttcaatagttccatttccttttcccataagtatatcatctgatatatgggcgtttaaatatgtctgagtattggttacattttctacactatttagtaatccattctcgatatacttttgttctgttataaaataaggtatcagtaaaatatttttattgctcaatagtttttcaccatttccttcatatatcgcatttgatgcatttaaaaaattcatttccttaacatcgcgaacaggcagtgcttgaatattactgatatagggaatgagaattaatcttgcgaatagaatagatgtacttactactactgctgttaaatattttgacaaacagatttaccttattttgtgtgtatatacttgttgatatgagtaatgtgatgagttacaaaataatttgattataatattgattaggtttataatactctagaataaaaaggaaaaagatttgagtttaactctgtgctgctgcattgctaccagagttctcttggttttggacgttgatgttgttaccagagcctattgtgtctccacctgatactacctgactgttttggttggatgattgtgattgactgatgctttggtctgcagagtttccaccgtttccatcatcactatcgccatcttgttgtgctaatgcgttgtttccagtgttcttttggttttgaaagcttacattattacatgataggaaagttgttccaccagatgcacacaatgcgttctgtactgatgcttgtgattgagatattgattgctgagctacgtttccacctttgtatttctttttggttgcaaaggcatcatccatcgctacaatgggacttgcgaaaagagctaatgcgaccactattgcaattgatgcgacaatgagtttcttgtttttattgttgtgaatgttgtttgttttattcatatatttagtaatatagaaaaaatatatggagattgctaactgggtgcaatactctaatattctagcacttttagaattaagttatgaaatccgaatgtggtaggattctataacatttagcatgaaatgaattccttgctctgattttacatattagtgcttaatatcgattggtttggtaggtatttagtaacagtctgggcgcatagggattaaggtccttgttgtagtatgatggtagtatggttctattaaatattgagaaactcatatttaatcacgtttataaatatgaggattaaaaagattcgagcatgaaagacagtaattattattactataaaaaggaatttattcaaaatggttctgtaaaggattatttgatagtgaatttgaatagcttctatatctttttagagaggtaaaatattcttcttttaacaacatagactagaaccatctcatttcttaaaaagcaagagaattaaaagaagaaagccttgtatctatattatcggttcgtgcaataacatatccagatccttgcataactgtcctaataaaatcatcgtcattatctactttatcatattcttttaactttgataaatcatcaatagtccaatatggtacttcttttccttgacctttgtctatgaacgttttcaccgttctcgaattattggcatctaaataggttactactttcaaagtcacattatcagtttctgtaagctcatttataaaaaccgggttaccattcttatccttattatgaaatttaaaactgtctcctgtcagttgctttatcatttcatagtcatattttacataatgaccatcctcacgaaattcaaatagattaggattactatctgcagaaacatcaaacaatactccaaatccatttctttgatcatcttcatcactggtgtgacgtccagtattgaattgaattgttatataggtttcattatcaaagtcatcaataggttctttaaaataatctccaatgtttccttgccattttattatctggttttttgctgctgacatattgggctcaccctctaaactctctctcactagttcaatacgtggagaatttagatcctctagacctccttgagtatgctcatcaaaatctagtgatactcttatcttattggtcggattcagagggtctagtgattcaaaagtatactgattattgaatttagtatctgcaattaataggccatcattgctaaagttgtctgtttctaattttttatcctcatcctcatcctcataatcaatatggcaagacttcttagattgattgacaaagtatgctatgcaggtagatggatcagatacagtataaactttacaaaatttactactattagtattgaaactattggttatactaatacccaaatcatctcgatcaagcttttttatatgcttttcatcggaatttgaattcaagacacttcggtcatttaaggaaggagaaaaacaattggaaacattagtagtatttatcagcaatagagggccttttgttgaactgttgttgttgctgttgttgttgttgcggtcataattgtgctttaactcgtcaattgctacactagacgcatcaacatttccattctttttttccatataatcaaaatatagggctacgctaattataataaccacaaacgaaatttctgaaatccccagtgacctagatttcattgtatcattttattcaagtatctatatatttgtttaagaagaatttaacggttataataaaattttaattcatatagatcaatctagctattcaaattccagttgattaaaaagattaaccaaaacttcaacataaaataatatagtacgaatcgatgggaattaacaatatcattgattaatagtagttctcaatcgcgtagatcaagttcccagaagtaaggttctatgacatctgatagcacggtgaattctttaatcggattacgcatatttatgcttgatatcagagtttttgaatgaaatgtagtaacagtctgggcgcatggagatatgaatcaagattgaatataatcactacccatgatagcatggacaggataaaataacttattgatgttgttatgcaaacttcaagcctaaatattgctcattttattaattaataatatataaaaaattgatggttttactctgatggtactatatcatccattgctatcttatgtaagttcttttatgataagttaatcattcgttgttgtcgctatctgatccatcgtcattgctttcctctttattgttatcttgttcttcactgttttcctcagtagattacccgtcatcctcacctccattgttggccgtatcctgttcttgttgatcattatttcctgactgttcctgttcttcattttgtttctcttctaaaatttcatctgtctcttcaattgtcaagtttttatctgaattttcgtcttgccattcaattgagtcatacttaggatcattgcgtggatcggttgtttgttgtgtttgcggttctacttgttgttcatcatcgtcattttacaaaacagctacgataaattcatttttttataaaagataatactaaaatttgatttccataaatgattaaaaattttaagtatctgattatttactcatttagaactgatgaagggagtattttttgacatggatggagtattgcttgaatcaatgccatatcatgcagaagccatgtaccaggcccttaaattagaaattgattaccaattagataaaaagtggatttttttactcgaaggtatgcctgcagatgagtttttgtatgagctttttaaaagtacttcaccaaagacaatcatcaataaagaaagaataactaaaatagtaaatctcaagaaaaaaatattcaaaaatattgaaaatataacactaattgatggagcaaaagaactgttagaagatctaaataaaacaagatgtatcaaagctatagttagcggatcatcaagaaaagaagctctgcgtatcatagagaaaaagattggaattagtaactttgatttaattattacaggagatgatgtaataaagggtaaaccagaccctcagccatttacaactgctttaaaaaaaacaaacttgaatagaaaagatgcactaatagttgagaattcaccctttggagtcatgtctgcatatcatgctgatgttagatatatcattactctaaacaatacaccattaacaatttcggatttccataattttctttcaatacctatcaaaaatgaatttagaaaatacatttttaaagatactaaactaactaaaggttttattctagattggattcataaataaagatgacaagttttagctaaatacttttatttttatggatatgttttatatacttctaaaaggtaaatccctggattatttaaaatatttagatataacattatatttgaggatctaaattatttgcagcaattgtaccattttgaagaacagaactttgagaagagtcaaaccggaacatggttacaacaatcgtgccgttcactccctgagctccgctatgtacaggaccccggtgttactgcctaaattcttatgacatttacatgaaagtgaatcgtttgatttagtgacagatcctgaactactatcgcttcacctattatgtatcaaaaattagcttgagattaaaaatactgtatttattatataatattattaaatatttttatataattcataatcaaaaggattaatggaaattacaatgaaattacttgtaatagcacttgctgtaatatcaatggccctggctccatcattggtaatgattaactctgtagatgcttcaacgcattattgcagagattaccctggaaagtcccagaattggataaatggatgtcaacaaggctggtgggatcataatcattgcaactcatattctcctgatggtgagtcaaatgacttctatagtggatacaaagtcggatggaataaaggacagtgcaaagcttccccgcattattgcactgattaccctggaaagtcccagaattggataaatggatgtcaacaaggctggtgggatcataatcattgtcaagactacagctcaggatcagggcaatacgcacaaggatataatgtagggtggtcaaaaggccactgtaagtaaatagcaaatcataattcattcttttttatttttgttataatttttggtaatatggatggttacatttgttaggaacaatttttgatttcaatatctatgagaaaatgataaactagaatagaaaaagtaattaaagatgatggtaactgtaattaagaagattaacaattttaaattaacaagcccttaggattagattcctagtggaagtagaattctaatacaaatgaaaagtctcctgtaattcatatctactacccaatcctcataaataagaacagtcaatattggtccatggattctgtgataatccgatcagcaatagattaaattgataattgacgagacgttcatacagtctaaggattgcatgtccttggatttttgaaaacactgagatgtattgccaaagctgttcatcatagtgtaaaatatttaattaatattaatggcttgatcatttttattgcaaagtatgtccttatcggctggtagatacttctttagatattctataggtcttgattatgtttcagatgcacaatattcatatttatgcaaatcaacggttaagctaatgaagctataattaaataatacactatcgaagaaaccgctagcacattataactacagcgtattaatactataattataactttaaatctatctcctattcccacaattataacattgaaattgcttcattgttatcttttgttattttaataggaggtcgctcctttactgtttttcttccataatattgccggcatcagtaatgtcatcatagttgaatgcagtagttctgtatcataaatgacaaatcattcattttctttctttctctttgctttatcaaacatttgtctagcatatgcacctacaaacgcacctgcaaaaatacctatgaactgtccgtatgttccccaaaagtctttaaattgatcgtcgatacccttgggtggaattactgttactgtcaagtttactggttttgttaggtaacctacagttggatactttttggacaattcaaactttggatctaccgttccaccttgtggggcgataaatgttggttttgttgttgtggccattgatggctcccttattgtaacgaccaaagggatcgtgtaaataccaacaggagtttggtgaggaacatctatattaattaaaggaggctgatttctttggatagttacatgaagttcacttgagttaaaaccggatctaacattgtaatcgtcaattttgctgttgaaattgctaataccaccaagtgttatgttaataatatcatttgaaaaaccagaggtggatcttatccgagctggaattaactgttcttcaccttgcctaatagatatatcacttggtgaagtagatatttccaggctgggcggtggtatggtaacccaattagtaaattgtctaacttcatcggatccgattgactctgcggagtagaataataaattgtattcactgggtgaatttatagaactcagatccaagtttaaccgaacatacccagggcctactgatgattcggtatgggactgcgtaaagttcgtcttagatcctattaacatataaccaccagtcgaggacaattggtaaagatagccactcaattttccagccattaattctacataaaaatcataatctgcaccattatatcctgtttttgtgtttgcatctgcatcaataagcattccatagcttaattttctagatgattgattatcagtagaattaaaagcagaagaatagttgccaaagccagaatacaaccaaatagtagtgtttaaattctgtccatcgctaatataattaactgccagtatgtctgtataactggattttaaattggcattactgttgccatatgtttgaacccaatcacgattttcatttaataattcttgaagctcaaaagagggcgataacgccatagccacgttatggaaaaaatccttgctcaaaaatgacaataacaatatgaatgatataacggcaatagaactaagaagattgtatttgttaaactgtatttacacctaatgttgtaaatggtagtataggtaactaaaaactttttcttatgatgatttttcataccataatggtaattcacataaaagatatggaagtagtattgttaaacggtggtgacaaattatagacattgtatctttgttattgcaagttataaacagcagcacttttactcttgccacctgaatatagatttttgacatggtatttactaaattaagttcctaatcataatagggtggtaatacaaatagataatttgaatgcaatctacaattttgcaattcaagtcggtattgggccatccagtcgtaattttttggtagaagagaacaaaagatggcagtttatatcggataggtttcttgccatactgcaaataacatcacaattagaagtataaagccagcagcagtaaggattttagcgatctttacacgtccagccaatgcgaatactgcggaaattgcaaatgataaaatcatctcccaggttatggcatatgcttcagatattctttgtacttaaggtatgtttggattaatagtggttacacctgctaaaatcaagataccaactattacgttgcatcaatttcatcaatatctctatcttcaaatacgttgaagtagatacaagattaaaaataaggatattgtttaatagttatttaagaatcagatattcaatctaacttattatatatgaaactaatttgaaaacagcactactgatttctcgcattggtatagggatgcatcaaactaagtttttacagctctaacttattatcttaatttattcgatatttatccctatataattgatattgggttttattagcaatatttttaatatcgagtatgtgtatatatggatatggtatttaaagtaataattaaacatccatcagaggaaggagacgaacacacgtattatggaatggtttttcttaaagacggcaaatccaatttaaaacgattggaatactctaacacagaaggaaatctacaagccgaatttgtttttgatggaaaccctgtagaaccaaatgaaaattatctaggtgtcttgtttcccgttaatgaaagtgaaactataaggaatcctgcttttaaaattcaattcaataatccaaagccgattgttgaagttgttgaatttccataactcagttatacgcaactgaacaactaaaagagagtcatgaattacttattatattcttgttcaatcctcaatgattattctttgtcaagcaacagataaaaacttgaaaattaggctggacgtgtggggactaagatcccagtggtatcagggttctaatacatttaatggttatgtgaatttaaatcacttttgacattttagtaatatatattaaaattaatattttagtggatatgaacaatctgactagatatattttttacatcatttactttggttgaagtaaaaacgtgttaagttattgtacggctgtgaggggattaaaagcaatagtttctttaatagtctaccagagaataacaaaagaagatatagtagtataacttatgagcaattttgttactcctacaaatatccgatctgcttattgattgttaataatatcagatattcttgttagaatatctacgaacttctttctgtcaggactagaattagtaaagacaatttcagtaaatccaatatctatatatggttgtagtttcttaaccccttcttcttcgtcagatataacaaataattttttttctaacgaatcatcatcaataacctgaccattttcttcaatctttcttggatcatgtacatcaacgtcaaagaatgctttaatcatagatcctctccaaaatcttattgactctattgccttttgtttattttcatcatatgaagcaggaataaataatatcttttctagttggttatagtctttttctgatttagtacacccctctttttacagcgggtaatagagtatcttttattttctttgtgtctaattcattagttacaaatccatctccctctttacctgctaactgagcagactgttctcccaagcctgcaatataaattggaattggatgtgtaggtttagtatacaatttagaatctttgacggaataaaattctccattaaaattgacccaatcttctgtccataatttttttatcagcctgatggattcttttagtcgtctgaatttttctctgtttgttggccaactatttccagaaggcacttcatttaatgcttctcctcttcctattcccaaaaacactctttgtggaaacatataagctaaggttgcaaatacctgcgcgactattgcaggatgatatcttagaataggagctgttactccagtgccaataaccaattttgtagtccttgctaaagcagctcccatccagggccatgcagcacccccggatgcccctgaattccaccaaggcatataatgatcactgctccaacaacgtttgatatcctttttatctaaatataccatatcatctaacaagtcgagaggattaatttgctcgtgagctgcttggatgcttaatcttgttttaacctctgttgattttgacacaaatattttagtatattatattttattaggttctacaattgactaattgaattatttttagatatagtctatcacgggttataactgtaggttatcgattgtatacataattattagtaacagttctcatccgtggtgattagtaacaaatttgactataactatggattgctctctaaggataaaataactaatagaccaaaaggattgttgaatctggcattcattaattaataattgtgaggatatagtattaagtatgtcaaatcaaataaacaatatcgaccttatactttttcaagcattgaacctatgatcagaaaaggcaattttacctgaaagttcttgtcaatttttctaaaatatctctctgctggttatcaagtgtattacatggcatcataagaggaacatattcatgtgctttgttaggactatttatccactctctgcaatatggctcgagagagaagtcaacagccatacacacagacctcaaagggtgaaacaagtcccagtctcgaagaatttcccatcctccgattcctttctctttatttataaatattttgataactcgatgtttatcattggtaaggtcataatgcagatcgtcattatatgttgctaactctagagataaacctatctttcccttgagtccattatggatatactcttttacttgagtagataattaataattatttattcacagaaatcaagactaaatttaaataacaattgtaaatagtgaataatattgataaaacttgctattttactaggtacattcattttatattttgcttttataagtatacaaaattcattttctttaaccaataatgatatagaaagagttgggctgtttgatgagctttgtaaagataatccactttgtaatctgtttcctcaaagcactccacctcaaacgcctctacaaaaagagaataatttaaccagtgacactgccaatcaaaccatgattgataatgacagattcttgacatacagcaacaagagtctgggattagagattcaatatccaatttggctcaataaaacagaacaaggtagaggagtagaatttgtattccctaataaaaatgcaggagcgaatttagtaaactcaagtattgaatctacatcaagaaataataattctgctatgagtcatcttctatatttaaacaaatcattagataatttatttatattaaatacgtcgaggtctgatgtaatggggtatccaacaccaacgatattgtttacctatgataataatacagaactctataaaggaatgcaattttggaagattaaagatgatcatgcacgccaatttacttattttgcacctgccgacggagtatttgatgaatttttaccaactatagatagaatgttaaaaacgatcaaagtcccataacgatacgttagttatgccttttctcagatacagttattctaaagcatgtatgaaattggcagggttctttgttgattttcataacatagaacaaagcctgatagatggtttaagctaattttttccacattttttagcattagaattagttctgacatgtgtcaaatgcatttgatatgttttttgtcatcgggttttacgaactgaattgcttatagatgatgcaagaccaatacttacaatctttgtaattcgtttggatttttgattatttcaggttaattttttttattattagcgtcgttgttattaattctagttttctttgctcacaattaattcactggaatgaaggtttgtaatatttattatttaagatatgtagcaagtgcaaaatccgcttattttaaaggagatatagttgtatagaaataatgtagtaaaaatctaaaatgattagatgaaagccgatctattttctactcataatataaagttcgatctgctgatcatcttctaatgtgatattttcataattggctacctcattaccattaacggtagcatatactaacttgtccattaaatcaagttcgccccatatctttaaaaattctccaagagtatactctctttctataactgaaccaattgtaattcgccctttatcatttgtagtatatagtggagccattcctggcatatttttttctcctttttcatccattggcatacccggaactccatacttatccaaagaacgatctttccataatgattcgtttatacctatttgactaagtattacaactggtttattgtcaagtatgatactcaaattagaatgaaaatagacagcaaaaggattcacattttttgaggttagactagtattttggggttttatagctaattcaatatatacactcactataataatcatcaccacaatcaaagcaataataaaaatcagttgtctcttattcattcttaattatttatttaatattattctgactcaaagttcattgcaattccttctaattgaaacaataaatttaatgcatcatttgagccattgaatttgtaatagatgaattagttgactcctctgttgtgcgaccattagctgtagtgttgttgttattattattattattattactagaattatctaggcctattccgctaattaaagttccatacatttcattagaacttgaaaagtgaccacgagttttattgacatcaatcatcaaacctaatacctgtttacccataagatgaatagttataggaacctgttcatattcggtcccattatcagtatagatatccgaaactcctgtgaccactatatcattgccagcaaaaatgacgttatcagaggttaaattagttacgatatggttatgattaaggcttccatctggtctaatcattgtaaaattggcatcaaaagttgcactcatatttgaattttctatatttttattattagagttatcaatttccaaattccataaaccgccttgaatccacgttactgtgccatcttctatctgattattggcaaaatgtcctgacgccatcacagttttcgactcgttttgttttgtagaattattactactgtcatcagaagtagatgaagaaacattagaagaatttgtaaccaagtttggaaattcttgtgcaaataccgttagcgaaaaagatttttcgtgtgtataacttgtggaagaggatattccaactactgtgacaaataatataattaaaagagagataaccgatattttattatttgactgcgaataaaacgtatccatttattcatatactagtctaacacataaatttattccgcaaaggtacttttgatatatatagataatgaagaatgataaagtaatgacttatctattcgtaaatccagtattagattacttttttaaattgttgtagaatatatttttataaaaataaattagttatgtttttttaagagttctggtttatatcttcccaataacaaagagtttgtgacaacggtaacagagctcatagccattgctacacctgctaagataggaagccaaccaaatactgaaagcccaaaaataggaaccagcgcaccagccgcaactgggattaatccagtattataagcaaaagcccaaaacaagttctgctttatttttgaaactgttttctttcctaattccagtgcagttataacatctcggatgtcattcttaatcaaaataatgccaccagtttctttggcaacgtcggttcctgatcctatagcgattcctaaatcagctctagctaaagcgggtgcatcattaatcccgtctccgaccattgcaacaactttattttcttttgtctttaaattagcaacaatctcttccttttgttgtggtaatacctctgctaatactctatcaattccaattttggaggcaacagcctttgcagttctttcattatctcctgtaagcattattggttcgattctttgattttttaatttctctatcacttcttttgctccctctttgattgtatcagctattgcaattattccagataggcgattatttatcgaaactaagacggcagttttaccttcttgttctaattgcgaaagtctcgtttctatattaacatcaatagatagccctctgtctagcatcatttttctatttcctatcaatatgttttggtttgaatatacagcctgaagaccatgtcctgctacggcttcaaatgaatcaggagagactattacttcagctccttctttttttgctttagctataatagcttgagccaatggatgttcagatccgaattctgctatagcagctagtcttaaaagttcgcgattatctgtttgatcaagtgctatgatatcagtaacagaaggttttccttctgttaatgttccagttttgtcaaatactacggtgtctaccttgcttgctatctctatatgttcgccgcctttatacaaaatcccattttcagcaccttttcccgcacccatcatcaaagctgcaggtgtggctaatcccaaagcacaaggacatgcaattatcatgaccgaaacaaatgccagtatagagtaggttaatcccgcatttcctataaagtaccatccaagaaatactccaattgctattattatgatagcaggaacaaaatacttagcaacctggtcgaccattttttccagctttgctttccctgttttagcttcctccaccaaagtaataatctgagataagacggtatcctggccaattttagttgctcttacttttagtaaaccgtttttgttaatggtagccccaatcacttcatctccctttattttgtctacaggtatgctttcacctgttatcgcagattcgtctatcgaagacgaaccatccattatcattccatcagtaggaactctttcaccgggtcgtatgatcatcaaatccccttccaaaacctcttcgactggaatttctacctctttaaattcctttgagaccaattttagtctagaaacatctgaagaagtattactatcttgaatatccatgccactttgatttgcattatttttttcccttatttcaggtcttaatacctgtgcagttcgcggttttaggtctaataactttctaactgcatcggatgccttttcttttgtctttgtttcaagcagtcttcctatcaaaataagtgtaattatgattgcagccgtttcaaagtatactgcagtaaatggaaagtaccctgggattatagtaactatagcgctatagacataggcagcagttgttccaatagcaattaaggtatccatattagatgctttagctttgataccatcccaaagacctctgtaaaaacgccacccaatccaaaattgtattggagttgccaaagccaaaagtatgtaattagtatattccatcatttccataggtagaagatggcccagttgtggaatcatatgaggtagactgagtaaaactatgggtatagttagcgctatacttattgcaacatgtttctttaatttttttaaagccttctcaggttcgagaaattcatttaaacactgagatgagcaaaaataataagtaattccatcttttgtatgatgaatcgagctttccgcttcttctacaaacataccgcatatagggtcctttgccatatcattaatagcagttagaacatatataacaacttggctttacaaatgtaaaattgatagtattgttaagaatgaattcttatcaaaagtgtatatgcaataacaatggtgataagaatggatgaaaacaattacaatcgatcattttctaggaatttaatttagtaatttctgacagttgattaaattattctcttgtttatataggttagtacaagaattacaacagaaatacttctcaaatgaatttgtatttaagatctttgaagaggaggaatgaatcggattaccacaataatcacaatttattttcaatgatgtttgttttccaatagaaatatcgtggctatcttttaatatttttactagaatttggtaattaatagaatctatccctttattttatagactctgaattatgtcatgtagatgagtattgtttgaagcaataacttgggacatcaaatggtattctccagtagtagagtatagcttttatttcaggcattactcttagctctagtattgccttatcaaaatacgcaggatttgttttgatgtatattatagcctgtactatattgtcaatcttttccaagtcaaagataagttgaacatttttaaccagtcccagttttttaacctgtcaaagcaaacaatctgtaattaaagtagtaggaaaagaagaaaaataaatgaagaatcagaagaaaaacaagacctcacattctggacatatgatgcctatagtcagcacatcagaaaaaaacattcgtgctcttaaaataacaagtatacttactggaatttaatttgttatagagctagtcataggtatttcgattggctctattgctgttctttctgattcctttcatactttttcagcagtaggtggagtattgtgtgcattggctgtaggtcgtatagcaacaagacctgctaatccatcaagaacctttggtcttaaacgagcagaagtaattggtgcactatttaatggattttttcttttaataatggctgtaatggtgctgtatatgggctatatgcgtttacagcatccaattgaagtaccgccaggccccatgttattggcagcctttggaggacttgttactgaatttattgcaattaaactcctccatagtggacagaaaggcgatttgaatttaaaggagctttctggcatgttttacaaacctttgtagggagtttgataattattatagctgcaatagtaatttactttactggatttttagccatagacccaatactaggaatggcttttggcgtagtacttatttatgcttcagtaggaattatcagagaatcacttagaattcttcttgaaacagtaccaaaaaaccttgatttaaatcaagtaaagaattcattacaaaaaatacccggggttaaagacattcatcatatacatgcttggactataacttcgggtgtaaatatattctctactcatattcagacatataacataaccaagtcacaggatattttaatggaatcaacaaaagtattaaaagaagagtttgatttttatttatcaacaatacaattagagaaagagtgcgtagaaacggataaatcagaagatatcgatataaccaaaaaaggagaagaaaaagaagatataagttaatcatcattgtctatctttctctatgtgcttgaaaagtgaattgataaatgatgatggtgacagaaataatagtaaatatctacaattggaaacaaaggagaaaaaggtaaagaggaatcaaaactatttttaatttattgtattagatattggtgatgattgctattgactcaacttgataaagtatcattcaaagttgtcggaatgtattgtactacttgtaaacccattgtagaaaaacaattaaaagataaatatgggataaaaaaaatagatataaactacatgacagatagtgtgagtgttgtatttgatccttcactaataaccaaacaagagattaaagaaagattagaagaatcaggatacaaattcgttagagtcgctcgctactattaactaaatataatttaattaggtttacctaaacaagatactaaagtctaatattatcaatctagtaaagaaatatttagacagcttttaaaataaaatctacagttatgactcttccattatgactaaattgtccccatactttgtacaagcctccattgctgaatctagttttaaaagaaactcctggaccgcctctccaatccgattgtacttcctggatcgggtgtacatgtaagtaatcctgtatattattgcttattattatgcaatgaccgcctgctcccatcaacggttctaaatctataattggatttccagaagcgtcgaatatagtaaaccttaggtctatatcttgatcaattctaattttattaggcgctgttaacccaatttgatattgtccttctacatttttaggtattgtctatcttcgattaatggtattagattatgaatagggcttcccgttaccttaagttcaaaggttacaagggtttgactgccctcttttggcttgaaatctatccaaactttatattctccagcttctggaaaattgtgataaattgcaaaggtattgttactattttcaaatgtaggatggatatgagcaaaataagaaagatccttgcttacgattatgagatgcatgagtttgtcatgaataggttcaaactcttttatggtattacctgaagaacgctctgttatagacacaataagattggtaggggaatttgcttgcaggatttgaggctcatattgtaaattgacattgtagaaaaaggccggcttttcttttaattgttctttatgattaatacttgtatgtcctgggtcttttgccctgtattattagaaatagtgttatatataatcataagactttacaaatgtaaagagtaatatatcgttattaaacaaaagaattggacctgaatgccgcttagtcttgataaaatcgacgtgtctattcttaagtcaatatcagaagacggtagaaaatcttttagacagatatcaagagacacaggaataacaactcctacagtgaaagccaggtatgaaagactagtgaatgttggatttattaagggagttttaccagtctttgactttgacaaagtagaatcagcgatgaatggagaaaagaatcctatccaattagatgatctgaaagaaaatgctaaaaagagaaagaatatccacaaaagcactcagaatagtaatttaaaaaaagagatagacaatattcaaaaaagaattacaagtggtctggcgataaatattgtttgcgatttttgcgagggtcctgtgtttgataaacctaaagttttaaagtttgcaaatattgaaagattcttttgctgtacctcttgcaaatcgggttatagtcaaaaatatcgtggaagaatagaatcaattaaaaaaagatatgagggtaaatctgaggtggatgagtaacgtcgaatatatatggtttgtattagtatccatattttgaaggattttgctcgaactgttgtttacagttagcagagcaaagatataccttgtttccgtttatgtctgatacatattttgcagttttttcatccacattcatattacaaaccgggtcttttgccatgtggtactataagtaataatatatttaactatgagagtttacaaatgtaaagtctctaaaattttagtgttttacatttgtaaagttagcctgttatatttgtctttattcaatgtaattatatgataacacaaattgaaacaaatggtaatgctcattcaagtcatcaacagcaacagcaaaaacaacaacagagacacgaacctgatcaaataccttatagtgtaagcctcagatacaatcctactgttccaaaactaggacaatctaccctaattactaaaagacaacagaaaatcaaacacagaaaaaagtaaaggagcttgatcttcttcatgagaaattaatgcatgttataattgtgtccgaagacttgtcctacttttcccacatacaccctgcctttgatataaaggataatatattttctgtatatcatgtatttccagaaggtggatatacaaaatatggatagacttcaaaccaaagaataagaatcatttttcctttattcctatgacagttgacattggaagattatagtgaacttggtcatctaccacgcgacttttcgatcccaaggaattcatttctatatcctgttttaaaagttggatattttcattcttcctactaggtttgacaagagatgattgcaagatcgctttcaaattccttttcgaatcaaattgttctgagtggatattgactgctcctaaatcccccatcttttctactatttcttctagtgttaacgctttcgtatatgaaagcacttgtattttctccatacccttgaactcatcttttatgttcttatccactgtaacatctgcaattaagatttttccacctggtttgcatacccgatacatttcctccataactttattaaaatcaattaggtgatgcaaacttcctctagtaacaactattgaataagaatcgtccttaaatggcaatgcggagatatccccaatcctccagtccaaattgtccaagtttctttctttctggataatccttgcatgttcgatcattgcaggggttatatctatcccagttacctgatttacaagctttgcatattcaaatgcaacagttccatttccacatgctacatctaaaacagtatcataaatagtgggtttactaaatcgaatcataaggtttaaaccataatcattaaaatgtcgggaagtatcatggcaagtaaatgcttgtcttgtaaattctgaaattacttcttcattatgggaatccattttatctctctatttaagatcagttatgcctctatttaacataaaaaaaccaattcaatatctggatgttattagatatctcattatggtgacagctatcgttaggattaatttaatgtattgcaaattctgtggaatcaagatatgattttatattaaaattatctagatctagaatatggggacacagttcaagattgaatataatctcagcgttattaggatgaaacaagataaaatttggatctggttttgaaggaataagagcggtattgattttctctatggtattaaaagcgtctaaccattactaatcacaaggctcttcaattcattccagtatttctcaaacaatacttgttggaccataattgcatgttcttcattagacgataaggcaaatacgttcccattttgttcttgttttgtctgcaatatactcttccatcagtcaagaaaactatttcgttaaaacaacaaagatttttaccatatccatattctaccttatttctccatttaccaggtttagctctgagatctgttttgaaaatatttcatttgcttcatctgtcaatattttgactaaaacgcctcattaggatcgatcgaattttatctaaattgttcttattcataaagaactggtttaatgatctcaagttcttttttttgggaaaaaaacgccacctttaagcttgctaacatttcattatattagccaagtgagaggatgcaggtgttgcgttgttacaaattttactatctagagttgctagtctcgcatctatgagctgttcgttgatgcttttagtagaattgacgtcggaaatattggttgattggcaaaaaacaatgccttctatctctttcaaatacacagattgattatcttcaagaaaatttgtagaattagctattggcaatacgatagccggagaacgaattggacatacgacggacataaagtgaataccgtcttggtggatagtttgatcggaagtggttgaatcgatgaaagcaagtgaaacgagtaaattgccgtttaattccactgtatagttattattgacttctgtaatatttccagaaattgatgttggtcgaaacaactctacagttgtttgagcccaaatatcagtagaataatttgagaaccatgggattgaacttgcacaaattaatacaaaaaaagctaaaaaaaagataaactctggtatcatattttttcagacatttatttggtaacttttatatccgatactacaaaaaaggtggattggtttagttgttctttatgtgggaattcaaaaattcaacagttttctgccatgcgtctttcagctcatttggagcgaaactctctcccgttggattggcaaaggcatgtccaactccttcatatatgtaaatgtcgttagtaatgttattagcgttcaatgcctcctcaaattctctaacttctgaaacaggaatagattgatcttcgcttccaaatatccctaatacagggccctttatctttgaaagttcttgtaggtcagttaccagattaccatagtaaagcacagttgctgccattgggcttgttgcattagcattcagtgcaagctggagagcttgacctccaccaaaacaccatccaatagagacaatctttgatgagtcaacattatctagggattttaaataatctaccgctgcaagcatatttgaattagattcattttgattttcccgagcaccacttaccaagctcatcgcctcatctgggaaagtggctacattgccgttatacaaatcgactgccaagacagcatagccttcctttgaaagttcatctgccatgtttttgatatggtcatttaatccccaccattcatgaatcataatgacacctggtagtttagagcccgacacattacctccctgtgttgatgcaatttctggatagacaagatatccgctagtatcattgtagtaaactacattttctttgtgcagtggaattgagttgtttgataaagatagtgatccatttgaagatacaaagttgcctgaagttgtgctatcatttgaaattgtgatggattgattgctactaccatcatcttgtgcattcacaatgtttatgcctggagcaattatcaacgataataccaacaatgtaaggattgaaaatctataatcggtctttttattttgttgtaagtccatgtttgataatagtctttgaaatattttaatattgtttaagtctgaatggcattgtttatttaacgaaatttgtttcagaaggagatcaaagcgatgcaaccagaaatccattagtctaggacggtatgtatcatgcctaaaagaaatcggtatgatagaaattatttgatatagtaaaacacgaacaaaatagtctaatcgaaggatcggagccgtagggattaagttcctaggggtaatggggttctaacacaactcaacaataatcaatttcagattctattagtttaccacatctatgaaattccctgacaaattgttcttgatgccaatatacaatttcttatttattcctactattacactgtcaatattgttaatgtcacaatcaatcacacagacaaaaccatttgcatctaacaaattcatattacagcatttttcagaataaataaatctgtgagtatatctgtaatgttattgactaaccatagaacaatatcattgtttttttctttgcttacacttacattcctatttacattcttctcctatttgtcagtagacaataattacattataaaagcacaacaaatggaacaacaaatggaacaacaaatggaacaacaaatggaacaacaaatggaaaaaacaagaaccggtgctccacttgctatcgtccctggtcttactagtaatattcttactggtgtctcttttctaataggaacatcgtcatttattttaggattgagaattcaaagcgcatccaaaacaataacggatatagatgatggtgcccaaataaaaaggccaataccatctccatcgacaacaattaccaagtattatgaattattgatactagcactagttttccctgcaatagtgattaatatttatggtatacttgcagttgcaagccatctatatttggaagatgctccttacttattactactctttgttcttttcattccgatagtggctattttgtttcttgtcaaaaagcttcattgacagatcctcaaatagtaaaaacgtaaaacaactattaatggaaattgattttttttggaataaattaacacaagataccgtataaatggatctaaagaataaatcatatacatttgctatagtatataagatattagagaattttttggagaggtaactttaatttgatagatcgttttaagtcaataaatataatatactcgattcaatatatttgatggcaacagtcctcatccatagggatacgattcaaggttgaatacaaccctaatattaaaaaagataagataatcaatatatgtatgtcatcgtattttgaagacataaaaattaaaatgtttgcgatttaaacccaataaatgaggacaatattttaggattactaacaaatactaaaactcgtgctataacattattacgtaataaactttaggattaatagttcatgaaaatgtacccgctatattgtcttcaaataattagatctttgtttgttactaattccttaaatgatttatatatcattatgtgtattactatattaggagagtgttacaaatgaataataataaaatattaccatattatcggtttaacagtttttttgatcaggttcctagtaaagaactctatgatagatacgaagtattcagagactttgatgatagttatagaggaatagatagtaagatcagtgtgttaaatcacaattcagtgaatgtaccaaaggagatagtaagagtaagagtaaaagaatatgaaacacaagaagtgccaatgtactagaataaaaaaataaaggacacacatcaataaactgaaaacctgtgttggtgtaagaactaatccaatttactaaactcctttgtagaaaagcaggatgcagaattttatgtgcagagtataaatatttctaaccttttaaacagtagagaagcaaataattattttacttaaatcttttggacttataataattttatttttatagaaaaacctttgtttggttgggaaactaagatcgttactcagaaaatgctaaactaaggatttatctcaagcaggtgggagtacggttcaaggttgaatataatcactctctttagtagcatataactagataggaataatcatccgcatacaaacagcaaattcctttagagtgaatgaagaatctttaataacttccacaagtgaacacatgttattgtatagtaaatctgccgtttttatagcgatagtgaccatagtcgtcatgttagtatatagtaattattcttccaatgtttttgtattaggtaaaccaatttcaggaggacacattgaatgcgacatagataatgctttccttgaaactataacatgttgatggtttgaagattttggtgattattccgcgtatgtatgtcagacatgtactgaagatggtgcaaactgtggtcccctcgtgccgacagatactagggacagacaagaaacaccatcacctaaacaaacaatacctcccacgattggtgataatgtcctgcaacaagaggatggagttttagaaacgcaacctgcagatgaaggtatggtacaggaaccatcagcaaatgaaataaaggttagttgaaggaatttaacaacttgtaagtgtgtaaatataatctatctccttgaaataaatgggtgttcatataggattctaaaaaataggtttaaaaaaaatagaattaaaaattctatctatattggcccgttataaagcattcatggagcattttaaagccgtgggtaaataagggtactttaaatgggtagtgaaaatgggttttattaagttatttggtcttacataatcggcttccttaaataatggcatctgttaaactcgataatgaatatacaactagttttaggtgttatcataatggtaacccttgcaatgacaacgacgtcgactgtggctttcgcagcaaactggactgaccctgatactcagccaagaaaagcacctccttcaatttcgggtgaaaatgtgtatgtagcatggcagacaaacgatactgcaaataacaatgaagaagtaatatttagagcatcaacagatggtggtagtacatttggtgagaaaatcaacctaagtaataccactaatgcagactcatggaaagtagagatagactcagaagcagatagcgttgtagtaacatggtgggaaacaaatcagacttcagatacaccagtaatgagaatgtcaacagataatggagcaacatttgggccaatgttaatgttgactactaacggaacattaggtgaagaagaagcagaagaagaagaagaagaataatctttcttttatttttttagcttattttgttctaaaccatattctatttacaaattagagtccatgtattttgttttataaaaatatttaataattaagatgatcctgttaaatctttcattaattatttctaattaatcaaggcacttgtaggcagaatggattcgataattcagtcggggcgtgtggggattaaggtccttgtggtatcagggttcgaatacaacttaatggtcatgtgaatttaaatcacttttgacattttggtaatatatattaaaattcaaaattttagtgttttacatttgtaaagttagcctgttatatttgcctttattcaatgtaattatatgataacacaaattgaaacaaatggtaatgctcattcaagtcatcaacagcaacagcaaaaacaacaacagagacacgaacctgatcaaataccttatagtgtaagcctcagatacaatcctactgttccaaaactaggacaatctaccctaattactaaaagacaacagaaaatcaaacacagaaaaaagtaaaggagcttgatcttcttcatgagaaattaatgcatgttataattgtgtccgaagacttgtcctacttttcccacatacaccctgcctttgatataaaggataatatattttctgtatatcatgtatttccagaaggtggatatacaaaatatggatagacttcaaaccaaagaatagaaatcagactcttgttacattcaaactcgataatatgattagagatactcataaaccaatacaccttgtaaaggaaagtcaatacacaaagcaaatagatgaaagccatcagaccaaattacctgtaccaaaagaaattgagtcaaacaaacctgttgacataacatttaacatattaggccaacacgcaaatccaattacagatttgactcctttgatgagtgctggaggtcatagcgtaataataagcagtaacctgcaggaattcttgcatgtccatccaaccaaagaggtaaactccaactggaaaggtggaccagtaatctcctttaacactgtatttccatatccaggtttgtataaagcgtggggacaatttcagcatcaaaatgtaataataacagccgactttgttttagatgttgtatgagacgtttatccccctcctctcttactatttagtcacaatgttaaatctgattcagatatatctttaataattatccctctttttctcagattctttttgctgatgttttctttaacatagctgcacccaaaagtatgatccaggctaagaaaattatcatcgatatacctcgtattccttcaaagttagggtatgcaaaagcagagtaagagacttcgactcctgccaccaatgtaataaggcctataataacacctccaactccgatccatctattaacaatgatgctctttgcatttgccaggccaaagattattgcaacagttccttgtaaaagtcgaaagacgctatttactccatattcagtccagcgaattccttctgcaaccctgaaaatggtatctttttcttcctcgtttgaagaagccatccaagaatccactgcgaattttaaagcaacaccatctaccgcttgcagaatagcaaaagtactggctgtaactattgcgagagcgaatccaatcaatcccagcagagacgtaatactttactctgcgtttgtgagcaaccagtagatagtaacaaatcctccaacaaaaaccatcatcgttcctacaaattggcctatatgtataccgacccaaagttcgctatgggcatattctgctaacactagtggatgattaaagggatcttcacctgaaggatgaatcattgtagataaaatcataattatggctccagcgataaacgaaattgatccaaaaataagtataggcctctgagacagattattagaagtagtagtggtattgttagtcatgttgtaggatttctcctttatttggattggatttaaactgcaagttttttattcctgtgctttggtgatatataatgctaatggcaaaacaagccatgatcgacaaatagttacagcatatacagttaatttattaaagtctatcgaaagacaacgttgttatcaaaatgaagttcacacaatcattagagagtaataaaagtgataatgtatcgtataaaataaaataatgatatttaaggagaatttttttgttatcgcttgcagcaacatgtattcgtttcttttactttcatgtttttatcttctattgtttgacaacatgttttttgtatttgattattcatcaataattatcaatgtatccatataattaaattccagcctttacaaatgtaaaatagtttgcgatatatatgatatttacaattgtaaagccactgtcttatctatctctttttcttaacaaactctagatatgattagaactaaaaaaatattatcgacaagaaattttgattcaagtacatttaggagggtcgctaattgacttcttcatcccctccttctccttcctcggtactagtatcaaatccaaatagatggaaagcattaaccattttgtcgttagctcaatttttgattattttagatacatccatcattggagtagcgctaccaaccattcaagagcattttggcataactcaaacagatttgcaatggatttttaatgcttatgtaattacttttggtgctctattactgcttggtggtaggttatcagacattgtaggtcaacgtaaagtctttactatcggatttttgattcttactggagcttcagttctggcaggaatagcaatgtcaaatgacatgctcataactgctagagttttacaggggttgggtgctgctttgattgcaccttcagctctatctatagtaatgaatctattttcagcaaacaaatctgaaatgaataaagccatgggtatatggggagcagctgcaccagctggaggtactgcgggagtttttcttggaggcattattacagcctggtttgattggccctgggtatttttgataaatgttcctattggaatagtaggtactagcattgattcccaaattaatacccaatggagtaaaaaggaaaggaagtattgactacctgggtgcactcacaatcaccgcatctttaggtctactgatatactcaattgtaacagcaaatgaaaatggatggacatcattacaaacatctttgctcttgtctatatcaatagcattgtttgttggttttgttgcgattgaaaaaagaagtaaagatccattaattccattacaaattttcaagacacctaatcttctttcttctaatatcgtgatgtccctattgggagcttcatgggtttcaatgtggtttttccttaacttgtacctgcaacaaatacttcactatggaccattagagagcggattagcattgcttccaatgacaggactgataatgataatgatgacttggttgatgcctagattaataggtaaattaggagttaaggaaaacctaattgtcggccttgggctcttaactgtaggactaattctttttagttttactcctacaaattctgaccaaggtaataacaattatatcttcttagtttatgtgctaccagcatctatcatatccgcaatgggaatgtcgttttcctatattccaatattggtttcggctatatcaaatgcaagaaatgaggaatcagggattgcttcaggtttagttaatacaacttaccaaataggatcggcagtagggctggcaataatggtttcactgtcgacctctcactccgacctcctaatcgatattgggacgaatatgatagaggcgttgaatcaaggatttcacttgacttttatcggtgcagcaattatctcagccattgcatcgataacagcagtatctttcataaaaacgaggtcaaaggaataaatcggaaacaaatcttcttcatctttttttaattggataaataataattccaataaatggggctttgaaaaattaatcgactgaaccaagataatttattcatgtattaactttctattactaacagtctgggcgcggggggatacggttcaaggttgaatagaatcctaaatactaattattaatactaaaggtagaacccttgttcaattaactacttttcagtaacgaaggaataggcgatcatgatctgaattaaagaaatactgacatgattaagattatttgtatattacaaaatacaacgtatatttgattttctgtcaacaagattcagagccacacacgactattaagttattgatactgattttatacctatgtatcgtaagtttaatattatcagttttgtgaaacagttcaaatatgttgaaatcctcaatactatcccccggaataattatcgtacttgttggattcgtgatttctcctatttcaatagcctggagtcaacaagctgatttgcctattatatctacgagagaccattatgacaaagcagacggcactcctaaatcaaattccacgctctatgatgttgttgaccataccgataaaatactctcatgcccccaagaaattgtaatatatgtccatggagtatgggttggaaataattctttagaaaaacctgtagaggtgtttaacagagttggattatcattgaatcagagcggatatgaaaatacattggtaggttatagttgggactctgacacccagatagataaagatggccacgggtggaatattgctaaattaattgcaaaacataatggcaagaatttggctaactttattacgaactataagaatgactgttctaactctgaagtcagaattctcgcacactctcttgggtccagggtagtagttgaaacaataaggaatttggatgaaaatttacagtggaatcagcaacagcaaaaaatattgtcggttgacttactcggagctgcaattgatgatgaagaggtttctaccaatcctgatgatcgatatgatgataactatcaaccccgagcagatgcttatgatccgactgtaaaatctatttacggagaagtaattgaaaggcaggtaatccaattccataattggtataatccagaagatgatgttttggaatcggaaccagattgcatatcaatgggattcttctgtcagcctatttattatcccaaatatgagggggatttagcattaggatcaaatggatctcaaccaactattactcatccaaataacttcaatgaaacaactatagaaaatgaaattgcctttgagagggatgctaacgctgaaaatggatgtgatctaattgatccagacactttagcatgcactatatatcgagaaggagataatcacttcggatatattggatttcgcgatactgatgatcgaaacaatctgatcgcatatggcgccatccccaaagttgttcaatcatggataacgcattaaatagaaacttgtgtttatgttcagtcaaaattgtttctattaacgttaactttgctaacaaacacaaagaactgttattggactcggctactaggaatagaaatgtctatcccccaaatctgactttttatgaatgtagagctcataggtgagggagaagctccttttggtagtagaattctaaagcgatatatagattcaatataataagagcaattgcaaagaaagataatctaatgattattttctaacaaaaagtatatttatttcattaaataacatcagctaaataatctagtctcataaataactatattattatttagataatgataattattagtattgaatgtaaatcattccaaaaatggcactaaacacattaacgacaaaaacaaaaataatattcgactagttgaacaaatcggtctttttggaattgatataaagatagtggttacaggagaaatgacaaacaacaaatattcattgatagaattatcttttcctgcgggtcctgaaaaagaagttgctttacataaacatagcaaggaagatgtgacaatatgtgtcatagagggagattttgtgtttagatacggtaatcaagaattaaagaaaggatttggtaaagatgacaccccatttaggcttgaaaaaaatatacctcattcatataagaaggttggagaacaacatgggattttgttaatgatatttaggccagcaggatttgaaaactttttccgtgatttgggacaatcttccggcatgtccgttacagaggaaaaaatagataaaaataaactacaaaatggaaaaataaaagaggatgaccgagtattgttacatctacttgaaaaaaaatatggaggaagatttgtgtttgagcaaggtgaataacaaaagatcatgaattgacctgagtacaaaaagagttcaaaaataccattccataagaagatatgatagaatatctaataccagattaaaaaagtacaagaatttgaataatatattcaaaaacagattaaaagatatatcatatataatatctggtttgaataggcagcccagaataatcaatatttgttaataatgaaagtaggtgaacattctaaatagatttttttgacaaaaataaatttttcaataataggaacaataatctagttattaaaactttccgaaaaagttaaaactaaacacctagaaacatggagtattgaattgaaattgccaatgattgtcaccacaagtattattaacaaaaaaacgtatttaatgacgtttattgtttgggcaataataataaccgatgtcatctttggcactttttttgacgttttaggaaaaccacttacttcttcttttggtgtaatattatttgtgataatgagcatcgttgtattttttgcatgtctttatgcactgagagattatatggttgcattgcgaaaaaactttgaggctccttcgttttttaataggctatacaaagcaactcctatttttctttatgcacttttagtcatttttggaattataattgttgaaatgatgttattttcacaatatagtacttacctgctgattctacttctcctcataagtacggtatctatcttgttctttggttttcgtacatacaaattcttgtcatggttcaatttgagtgtcaaaaaacggcataatataatgatattggcatttggtatatcatcgatgctcctttgtataagcacgacggttgctatcacactagacataaaacaactagtcgtttcaagaccacccactatagatccagatttccccgctagtaattccatggcaagcagacacttaactagtatagaacttgttattcatctctatggatttcttgtccctcaagttactgcaattgctatcgcagaaacagttgctgttgcatttttccttcgttactttaaggatcgaataggaaaaaaaatattttggatacttataattttaccccctacactttttttaacaggtgtatttggtcctcaatttttaaagtcaaccggcagtgaatttgtatatatggagtcaaggtttcttatttttagggtaataggtaccataggatggattacagctgattttgtaatagcttatgcatatattttagtagcaaaaacgcttagacgacagatttcctattcccctattattaactatttagttatagcagcattagcaacccttttaatttctccaacgaccaataactggataacaaacaattcttttcctccctttggagcaatccaacgtgcctttattgtgtttgcggcttttctttttaccatgggaatatacgctgtcgcgttgtcagtggctcaagatgcagaattacgtcagttagtcagaaaatatgtaaaggagtataatctactagatactttaagtaatgcagaggagaatgcagagattatacgaaatcttgtaaaattaatccatcaacacgcaggcattttggaaaaaaaaacaggagtagcatctacaatgcgagatgataacgaaattagacaatatttagtgatggtgcttgatgagactagagtaattagaaagaacaacggaaaaaaggaatgactgaacaatcagtgcgtaactttaatccatgtgtcttatgcttgacccaaagagggaattgattataccccaaaaagaagtaagcgtttggattataatagcatcactttgggctatcgccattacagagttaataagaaaacaataaacatagagttgcgaaaacttattgcgatattatacgaagatactacaaaactgttaaaaaattaaaataaacgaataaatttttggatttttggtgaaatctataattttgcattgtaatcctttaatgtttaataaatagcactatatccctaatctattgttcataaggagtatatctaaatggtaaaagaaaatacatataatctcgaccttatggtgtttgtaccattatcagctttgctaattttgattataccagttactatactaccgattgaactgaatactctatctacaaagtttgtactagcaacttcagatgatgtagatggagagggtgaagtaaatatagacactgaaggtgtagaaagagatgaagatcagcaagaagataatcaacagtctaacagtcaagagtcttcatcaccgcaatcatctacagactctaacactaaccttaatctaagaccatctccaggaaacgaagatggcatactagagtccaatggaggcgacaccactggggttgtaacacgaccgccgctttcagatgatatcgtagttgcccatgatcgggattctgatggtattgttgatacagaagacaactgtcgctttacaaatccagatcaaaaagatagtgatggggatggcttgggagacgcctgcgatccagatcaagttgatggggacaatgatagtgtaccggagtcaatagataattgctttgccatacctaatgcagatcaaaaagatagtgatggggatggcttgggagacgcctgcgatccggactttattgatcctgataatgatggtgtagtagacacaaaagacaattgtgacattaaatttaatccagatcaaaaagatagtgatggggatggcttgggagatgtttgtgatgctataaacgctggtgttgaaacatacattcccggtccttttggtcgtcaaaccccacctacttctgaaaatagtggttttgtagaccaacaaccgtcttcgtcgtcgccattgtcatcttcatcttctacatcatccaacaatttgaacgatgttgcatcgtcttccaatactgaatcctcatcgacctctacagataccaaaacagggatagcacaggaaaccttacctacaaacatggttacacaaaagaaacctgataccttctatactggacgcgataatgggcctattgacgtgccccttcctgatcctgtgcttgtaccaggaccaaacgaagagagagctggtgaagacgaagaagacaaggaagaatgcgttgttaaatactgtgatttacctcttccaatatcaaatgatgagatttgtagaaacggaaaagatgataatcttgatggaagaatagatgaagatccctattgtactgaagttccaggggagtctaaaccacgtccttctaatgacggcgtattaacaccggaaacatcaaaaggatcttccccttttggatctcctccaaaatgatgaaatgattcttgaccactattaaacttgatagacttgtaataaagtcaattcaagaattcaaaataaataatttttgatcccaacactataatagctttctgaaataactattagtaacagttctcatccgcggaagggattaagttccaagtggtaatgaaattcaatgcaataattaattatacttagaccaatcttaaagtaaactgaaaatatgaattcaaaaaaagataggtggttttggatttagctttgtgctaatgcgttgtttcctgaattttcttgattctgaacgtttatgttgttaccagagcctattgtatctccaccagaaactacatgactattttggttggatgattgtgattggctgatgctttgttctgcagagtttccaccttttccactcccaccttgttgtgctaatgcgttgtttcctgaattttcttgattctgaacgtttatgttgttaccagagcctattgtatctccaccagaaactacatgactattttggttggatgattgtgattggctgatgctttgttctgcagagtttccaccttttccactcccaccttgttgtgctaatgcgttgtttccactgttcttttggttttggaagctaaggttattacacgacacgaatgttccagttccagatgcacacaatgcgttctgtactgatgcttgtgattgagatattgattgctgagctacgtttccacctttgtatttctttttggttgcaaaggcttcatccatagccacaatggggcatgcgaacagagcaaatgcgaccactattgcaattgatgcgacaatgagtttcttgtttttgttgtgaatgttgtttgttttattcatatactggatactatataaaaaatatattgggtttgctaactgattgcaatactctaatattctagcacttttagaattaagttatgaaatccgaatgtagtagggttccataccctttaatcgtgcaataaatctcttgctctgattttgcaatttttgttcttaatatgtgatagattagataacataattagtaacagtctgggcgcgtggggtcactctcatgtaaaacaaggtgtctacaaaaaaaattaaagtatcatattataaaaagataggatggataaattatggaatatattgacaatccagaaatattgaatgaggatcttagctcacttgagcttgaaatctctacggtagacgcacattctgctagctccggtgatcttcattatgtaaatattgttttttccgatggtacacgcctttatgagccttttaatctaaagctctataatgaattcggactatctgaaataccaattcgtattggaactttgccccaccgtggaaagactaaaaggttccctcttccagtgccacccgcacttaaccgcaaactaattgatattgccgaggtattcgttcgcaaggacggtaatgacgggtggtttgtaggtagcatacttttatttgctaatggtcactcaatgcccttaattggaaatagtaacgtcaatcaattccttgacaacgataatgctgtattgatgcttcgagattggtcaacagggtcgttctgtgttgccccagccagccgtgctaaagatcctctgccacgatctgggtatcgggtcctgggtcctgtggtgggtcaagtttcagacacttctgcagttataatttatcggatggatcgaacgggctactatcgctttcgagcatttgatactatcaccaatcgccaggtacatgatgaaattcaaaagatagagcccactcatcgattcaatctaaccggtcttttaccgaatcgacgttatgaatttaacctcagttttttgcgcggtggttttgaatcttcagtgtctgatggctctggatccattcttacatatcctcatgaaggatctaatggacaatttacttttgcatttggttcttgtgtcaaatctaaaaagcagacagcacagggatcatggacagccattaaagcgttagcagaatcaccttcaagtgctatcagcccggtgcgcctgttcgttcatcttggtgatacgttctatttttatgatcatgtgactaaggagatacctcataatgtagaatcaatgcatgctgctcatatctcaatgcgacgccatttggaattcctcgatatggctaagaaggtaccatcatgcggtatctgggacgaccatgactttgcgggaaacgacaaagacagcaaagctattaacagcgagttacggatgcaggctgtatggacctggttacaatactggggaaatcaacccatttcacttgaagaaattggtaaaacaggactaaccaccaggatctcttatggcctagttgatatctatttacttgatggtcgatttaggcgtgataaggacagaggaatatactttggtaatgacataattgataaagtaattgatacaatcgatatacgtggtgccgaagctcctcgggtcgtaatactaggtagtggtatcagctggaatcatcatgcagaggatggagagggttatggtcaaagtatatacgatgatgagcgagagaggctttatagagaattggcaattcgaatgggtagggctataaatggtcttctgtttatctcaggtgatactcacattaatgaaatctatcatgttgatctaggagagagtcgtatggtccccgaatttgtttcatcgccgcttacccgtaacaccggtctaagaggacctcgtaacatccaatgggagcgcgtagctagtttctcttcaaaggagaatcgaggatttgcaaccctaacgattgatacgtcaagagagactaacgataactggactgcgaccattcgttattttcaagaggctgctgcgacccagtacgtgagtcgttcatatactctcttgaatggtcagttcaatcctgatccactttgaaccaaaatctcttagcatagtatagacaactgtcctgatcataagaaaacttcatgacgaaatagataaaacccttagctatcaatattttattttaggttagatatatccagggtattaataccaaattcgagatcatttagtttggacgcgtggggatacgattcaaggttgaatagaatccacttatacatagtgaagttttctcaagttcagcaaacaatcagtcgatttaagatatcatttgttattttttatttccatgcatttcattaataacatattgtacgtaatcgaccacttcattttcagtcaatgacgtttcaactccagatttctctttgatttcctcttcaaggttctgagcaatttttaacactctggattctaactctttatttctttgagcagtaccaataccacctagaaaattagcttgttcagtgactgatttcctaattgatcttaaaagtgcattatcctgagaaacggttagggcggccgaatataatcctgaataaataaggtagcatgagaatccgacaagagaaaccgaaattaggccatatggaggatatgcagcctgagaagcatatgctgaacccgcaagatagaaaagtaagaatccatatgcagttagcatcaactgatttcggacaatagaatttgtcttcaaagtccttgctattgataaaaatgagataccaaaaagaattcctgcaataatacctccaaaagagaatactagaatattaagcatcgcattttcattaccaaggggattaaaatatcctaggacaaaaagaggataggataaaggataataaattagagatataatcatcattgtccaaaacttgaacctcccaactctttttaaattctgataaagcaatcttacgctacccatccatgtcaacaaaaatgctactatagaagcggtctgataaactgcattaaattgatcactcatagagaaattactaaattcgggaaaatatgcaacatgattagaagttataatcggatcttgttgagtcagcatatcaatttgagtaatgagtccgaatactccattgataacatataggatcatagcaatggcaaatatcaatatcattatatttttgttaaaattcttataccataaaataaaagcccttgtcaatagtgccaaaataccaatccaaatcccataactaataatgttaatgatgaataaagggataatactatattcttggtatatcaccatttgagtaacaacaaaaagaagaatcgacgaaatcaaacattgtgatccgaatacaagataatagatcggtttgaaatgagcatattttcccgcagttaaactattaatatgtctcacataatttatcataaagaaagaagagaagatagaaaatactgtaaaactaataaataatgatataccaaaagaagaagtcaaatattcaggtataaaatcggcaataatcccgatttgagaatctactagaactgttataacagtggctataaagactattagaaatccgttgtttttgggcttcagagaagatgatacatcatcgacatagtttctaaagttcatgaagatgatccttagataatgttattgaatttaaggaattgtgcatcagtatttaatgttatactcaagatctcgatggaattagttggtgcatcagaagcaaatgtataataaattcttcaaaaaaaattgtccatacggtatggcatatgaaataaatcctaaataaatctaaatagtattttcaatttataaccaaaaattttaactcttgctgaatacatccatgggaattagtaacaaatttgactataattatggattgcaatgctgaggatactacaactaatagacctgaggaggaactgctcgggcatcctccctcaaactcagtcatcatcaagtttaattttcgctatctccactttctgattcattgtcactattattgtcttcattgttatctgattcctcagaatttgattcttcttcgataccatcattattctcgctttcgtttacatcattttggctgtcagtcgtaggattttcaccgttaccgtcactttggcttgattcattattttcttcctctactggtggatcggtccagtcatcaatttcatcattgtctccactactacttgtacaggtgtaatcacgacttgcctcttcagcagtacatggattactgtcttcgatgttgttttcattgtcgttattttcatcatttgtctcacaacctatgccatcgccatcagcatcaaggttgttcgggtcattgcttccaaccccaatatttgttccctcgacatcactgcagttcagatcgccgctcctagtaccattattgtcgtcaatatcgttagcttcacaacctatgccatcgccatcagcatcaaggttattcgggtcattgcttccaaccgtaacattagtttcctgaatatctgcgcaatctaagtcaccaccgttgctactgtcattattgttaacatcctcagcttcacaacctatgccatcattgtcaccgtcaaagtcgtttggatcgttgtttccaactaggaagtttctttcatcaatgtcttcacagtctaagtcaccaccgttgctactgtcattattgttaacatcctcagcttcacaacctatgccatcattgtcaccgtcaaagtcgtttggatcgttgtttccaactaggaagtttctttcatcaatgtcttcacagtctaagtcaccaccgttgctactgtcattattacttgatccagagttgtcattgtcattgtcattagatccttgattattatttaccacaggaagtagaggaggaagtggagctaataatccaccagtaataaattgttcagttgtagttccaccgccattgtcaaatgtgaactttgggttaaatggaggactcatagaactctgtattgagtccatattaagtgaatagaaagcagcttgagatttagttttattatctgtaatggtaatatcaaaaggggtcatctgattatttgcgagattagcaacatttaggccaaaactttgtgttcccacaataccaagacttgaattatcataatatgttgcagcaagattcaaaagctgttctggagattgtccttggttaattatgttacctgtgatgtgaggatttccaacattgtctacaaatgaactactgccatttaaaaccaaagtagagggtttttcagcggtaacaggttgagaagtagtggagaactccataaagttaaacttgcctaatatttgttgaggattttgtattacaatatcaaaaggagataactctcctgatcttaaagttccaatcgaggagaatgcagagtgattgccaacaacaatagcattgttattgtttgttgtgtcagacaaaatagctgtaattacaatattggtttgaggttgggttgaggtattgtttacctcacctatgatatgaaaatcgccaaagtcatctgtatgggatgatgtgcttgtaagctggattatgttattattattaccagaaagttgagcaaatgcagagtccatattcaataaatcaactcctggataagtgatcgttgatgatgaatacatggcaggaagagacattgtcaaaattacaatgattgagaataattgtatcgttttagaaactatacgcaatggtctgatattaacatgatgaaattataaatcttttcataacaattacattaacaataaatgaaaattttattggataagataacaaaaattggatcttcatagagataaacacctatctgtaaaatagacagacatgaaaaaggatttatttatcttaattttttctttattgatgaatccctttcataattaagacaaattgagatgcttatcttgaacaacctgttatcaagtttatccatgatgatataatttcactgataggaagagaacgatagatgctattgctagacacataaaacctgtagttaaaaaatacaacggatcatcccaatgatcattagttccaatcaccgcagaatagatatatgccaatccaaaaaatatcatgaaaatagcaaaaacagttcccatgaagacaattataattttaatgattttattcataaagaataattaactgagtgacaattacatcttgatttagtctttttctatttttgaaaaatgctatattgtgaaattcgtatgcaattataaatattaaaatgtgaagtcagcaccttcttcataaaagactatataatttacaccagtgaccacagcatcaaaatctttcaccacctgaatattaattatctttttatttcctctttgtagaaaattattgatttcatccattatagtattattccatcgaaatatttcctgttttatcatatgtattttgagaattttaaatataaaactcaatcgcaaaatgatgttattgagattacaatgccaccataggataaaattttttatattatacttcataaatttttttgcccaaaaataatagtcagatttgacgtgggcccatgggatgcggttcaaggttgaatccaatcatatttatagaatctcttgaaaagttggtgtgggttgagttgattcaacagggattacccctatcaaggacgatcggaatatacgaactgcccaaaaatattagattgacagatgaatttggcaataataaaattccaattagagcattcttttctgaaggtttaattactcggttagaaaaccaagtgtaaacaagcaagcaaatatttaagcaatttagatcgtttgatatattctattccttttggagagataatagaatgaggaacatcattatattcactatttattaaaaggttcttatcagtaactataggatttcttcgaatctagtactatattgttatgtgttaaataatttgttcatcattacggtatatgatgagttcgaatgataaaggatatgaagagggtgatgctggaacaaataaaaatagacaaagcgattcactaaaagaatatttagacaaagaacccatgacacatgttaaaacaaatgcggatgaaccgccgaccgtaaagggagactcagatgatcatcaaacaacatcagaagggcatactagaataagcactgaacaagcgagtgaagagtatcaaaaaaataaacatacaaaaatagaaaacgattcttaaacaagtccaataattcttatttttttattacctgtgtttttgtaattgtttttttatcctttagtattgatgacaatttgcaaatataatttaatgcatttcgttctgaaagtcaatatatcattcctgcacaataattgaataaaaaagtttacaattcataccttctcagaaaagccattatttgaggtaattaaacactagcatattgtacatcgacccaaccataggacaatggttcaattattttatattttggactacagaaaaaattgatactcggaacagaccataactcagttatatttactggattatttagcttgagcatgtggggattgttccttggggtaatagggttctgatacattaactagcctttataaaattttaaaatagcaaaacaatgaaactcagtagttcttgaggagtcctgaataaataattgaaaaaaataaaaaatatctgctgttattggatcgctaatttaagttcatcacctattagtttttgagtacacttgttgtctacgacctcgcccttacattctttgcttttcatggtattacaatccttgtccgatccattacagacacattttttgatcgaatcaaaacattggtatccatatccgatggtaactgtagtgagactcaagacagatccaataacaaatgcagtaataaaaaatcccgcaattgtttggaacacgcctttgaattttctaatttcttctggttttgaatttttattcatatactggatactatataaaaaatatattgggtttgctaactgattgcaatactctaatattctagcacttttagaattaagttatgaaatccgaatgtagtagggttccataccctttaatcgtgcaataaatctcttgctctgattttacatattagtgcttaatatcgatggatttggtatgatttttagtaacaatctgagctggttgggattaagttccttgtggtaatgaggttctacgaattaattacacctaaactcatcccattatttattttatagtcatcctctcaactcaaagtgctatttcttatacgattcataagaactagtatgtctttacttagtcaatagaattaccatcacacattaagttataggttatagataaaaatgaaattgaattggtcacagactttggttacgaggtaccagtcgatatcgtttaagaaatttttcatttcctttggttctcataataaactgttctctatgcaatttgagtggtctgtcttcaggttttgttaattcaatttttattctggaaagagcattaattttgaaaatcaatccttgagatggatcgatgtttattttgttggggacaatttccttcgcattgctttctacattaattggtgtaaggattttcttcatctttccaagttctggatagtttacaacaagatctgccttagcattattcattgtatttgttatcaaataagtgccgggtctgattaccatcgcagagaaaatcactccgtcctttaattctttgctatcaaatatttttatttgtgatcctctttcgaatcgataaagatctattgaatagccacctgcaccagtagagacgtagaaaacagcatagccacctttttttagtgtataaatgttcgtaatattgcttaaatctatgtttatctgattagaagtatcatttacttgtttattttcatcaacgtgttgagaagcctccctagagtttgtcgtagataaggatgatgatctattcagtggtctttcttcaagaatccttaatctaaatctactaactattcccgatcctttcaagacaacaccctgatactctccagtatctgcaatgttacaaacaagtgtagaatgcggagtgagggacccgctatcgatattagtttgactaaacaaaaatcggtttattttaatattcatatttaattacccacatctccttcgaggatcaactcattaccattactattaatccgaatatccaaaaattcgatcggtatctttactggaattaacggtatagcagaattacccttaagaacttctaatggatcctttagttccaaaattgttaaagcaatgaactgaaccagtctatcgatcaagtcctggaatagaccaacattgctaatcaaacttaaaataaattcacccacatcgtctccaatatctaaaatatttcgaattattccttctattccaccgagtacggtatctataaaagatattgcccaatcaggaagtcccaaagaactaagaagaccgacgattgcatttacaataagattatgaaacaaatctccaatcgtgtctgctatgtcaattatatccaagtcgattggaagtgtaggaactagagtaagttgccacctatttggaactccagagccaacaccataaaagacctttgggattgcactcaaagtaagttcagatgttaataatccgcccaagttaaggggtaaggatatgtcaggagttgcctcgaaaagatcaattgatggagcatgaatcaagcatcctccaaaagggtttggaacgagacaaaatccaccaatagtttgtgtcggaatatctatacctatgttaagctgcaatgtatcccatttcacgtctaactcacttattagaacagaaccattattacgcaaatcgattgtgccattctctaaatgtgctgaaactgtataaccaactgagaatgtaccagagccgcctgtgtctgataatgaaaatttaaatccttcaagaagagcaccatatatttttttgaatgtggtttcggatatagcagttgttagatcaaaagtgcctgttcttgatcgaggctttactgttcgtgtgatagttccactaccgccactaccgccactaccgccactaccgccactaccgccactaccgccactaccgccactaccgctaccacttgatgagaatacgatatccaagtctaaattgtctaaattgataaatgtctttaattgatcatcttcaattgctggattattaggaacagtcgttgctccggaaagttgtaaattccctgatacctggaagtttccggtggatggaggaatagtaattactccaaatgtcaatttggaaataatctcagcaatatggggaaatattccatgattaagaacagattttgcataacattcaattgcattttccagaccgtgaggttttagatctactatctctataccatcgactttaaaccctattttttggctttctgctagtccagagattttacatcctcctatagcatacaaatcaaggcaaaaacattctagtttggaagtagacggtctgacatttggtggtcttcgaagaaaaggtaagtcgcctagacaatccaagccagcacaaactttgaaatgagcagctaaacgttgatttgccaatggatcaagttctggaggtaaaggaaagatacctcctgtatggaaatctatttcagttttagaaagttgaattgcaaaatttatcgctaaattgtttgaactagactgatctaatggtaatccaatgacaggaattggattaagtattgttagaagaggattctgttgtctgtttacttctggcactgcaatgattttttcgcataatagattgagatttgaggctaaaaaagaagtaccaaaattaaaaagagatggacgttgttgcataagatgtttaaccaccctattaatccccgtgtcatgaatagcagcatatatatcacatttttctgtgagactcaatagattctacagtataaagatgtacttatcttttactttagattcaattaggaatgagttttatgatttcagaaaagatctgttgttacggtattagtataatagtatataattaattccgaaatgacgattaatttgatacatcttttagggcattgacaaaactatcaaagttagtatttaatgagattttaccattaattattctagccaaattgaatgccggatgtccgctgtccgttatgtaggaccactgccaaaacattactccatatggaaaaaacttcttgaaagttctcaaatatcttttgtgctggcttaaactgatttttaccccatctcctgtaccagagttatattcaccgaccaagatagtacctgttttcattagttttaatattaatctaaaatagagcattactatgtaatatggaggatagggatgaatatcaaaaataatcttattgcttacagataacgatggtttgattttggcttgtacccaaggaagattaaatgcgccaagatgaccagcatagctataacaatatatcattgctttatcagtaagatcagtaaccttacttaacacatagtcatgatattttgaaacctttttgaaatcactgtgtctaaacacttgaggttcatttagaagttcaaatgcaatagtcggtgttttgttattcacagtttctatcactttttgtataaaggctaactgcatatcccatccatcgtttccatcaaaagactttatcattctatcccaccaattattccaaaatttttctatgtcttctttagatggtggtttaaaaggatcatgattcgacgaattattttgaaatagcggagatataatagaattcggaaaacctataccatatccaatagacgaagagcacttccattgatgattatcatatatacatgaaatattgcttttatcagcctcgtctgagataaaatttaattcctgactaaaaccttgtggatctttctcgtaagactcccaataagcagggattcttactacatcaataccatgctcttgaaaaattttgaaggaatcttgtatataatcttgaggcgggttaggttttgtacgattttgggaatctgagatcttgaatccatcaaaatttacaccaatcttcaatgctacttaagcctcacctcgattatctataaacattttagcattcttgatcaggttatcaaaattatacaaattatacaataacaccaagggatgattaaagtcaattattattaatgattatatattgataacagttctcatccgtggatatcaagttcctagtggcaatagggttctaatgcagtattcaaagtaaaaaataattttaaagtaaatacagttaaagatcaacaactaaaatcctcgaacaaaaaagaaaaaaaatgaattttaatgatcagaatctaataaaaaaaggatgttatttttaaaataattttagttattgtgtagttgaattaccttgaattaccagccatgtcggtagaattatccatcatcatggtcatattatccatttgatccattggcatcgttgaattatccattgtcattgacatgttttcttgtgctactactggtgttaccatgactattcctgcaaataaagatgctgctgctacgatacttaaaactaagaatacattgaatttattcatgcaaagaacctttaattttatactatatattatcttgttagtatcagtaaatatattgatttttatatattaaaaaaggtttgacgaattggggacttattccaattaggtttcacaatcacaatttaacctttttttgaaaaaccgaaatatagacacagttaaatcattgtctaatatttattagtaacagtctgggcgcgtggggattaagttcccaatggtagtagggttctacacgctacagagaaaacatttctacctagacacaatttagattcatggttatggatgttaattattaatttaaaatgccttattaagagtgatttgaaagtaaaatatcaagatattattttgttataaaagaataacaatttcaaaaattaatacaaaaataagaaagagttgacagttgatctactttacaactattcttgttctttgtagacgtcttaaattagaaaagcggttcatgtcctcttacatagattgtataatggtcaataccatttacttcctcaggcattgcatataatccgaatcccgagaacaaatctattgagaatggagaattatcagatggtggaagtgattcaactaaaggtctaccttcagctattccaagaaaagttccttccttgtcaaaaaggaccgcatatatggatacagaggattgctcacttgtagagttgtttgtgacggttcccgttatctgatttgattctgcacggtatctaagatcggttactgtaaggttttcacttttgcctatagtggcttcaggagtagcagtagccaaggtttgatttgtagttgtatcaagatttgtggtagtatcaagctgttgtccataagcaagaggtattgctaggatgaaaacaaaagtagataatacgatagaaaggatttctttcattgtcctctctaattagaggatattaattaaattttctttgtaattgaattagaattagtaactatttgagttaatctactgcgtctaaaggacaacctgaagacaattatgagagtaacaaataaaaaattgatcattattagggctaaatgttttatttcaagagatataaccttataaggtcagggattgagatcccatagcaatattaatgcagttgttattctcttacgctgtttatcctataggagttcgcagccggtcttgttcacttgtttctgattttgattttagaaatggactgtcagtaatattcaaaacacacgatttagattctttaggataaatgcgaaattcgcaattactggtatcaactgtatcaagattgcttgaagcccttatttctattaagccccagaagcgacgcgatatgatacttatagaaatatctgacttgattgtaacaacaacttgatagccggcgccacaacgtattctgtgatcgtttttctttgtgtaaatagcttgaggtttgtatttctgaattcagttccagattgcttcatgactttttttgacgtgtaaagagcatgaagagtaaaatggacaacgttttagcgacattattggacgataaaccaagaaagtacaaatacaaatcacgaccaatgtattctgaaggtgttctgtccctatatttaacatgctaaaaacaaatctcttcaagctatttcattttcttaagttgacaaggtcaaaaatatatacaaaatattgttatgtttaattatcatataaatgagtttatatagctttgttagtagtaactgttgaatggattatttcattactgtaaataaagctttagtgacttcagctgtattagcaatatcatttgtactacttttaggaccaacttctatgaccatgaatgtatttgctcaaggcaactctgctaaccaaggaataggccaatcacaatcatctaaccaaaacagtggagtagtttctggaggcgataccgtgctatcaggaaataacttgaacgtccaaaatcaagcaaacagtggaaacaacgcattggcacaacaaggtggtagtggaaaaggcggtaacacagctaaccaaggcataggccaatcacaatcatctaaccaaaacagtggagtagtttctggtggcaacactgctgggtcaggaaacaatgtaaatgatcagagtcaacaaaacagtggaaacaacgcagcagctcaacaaggtggtggtagcagtggtaaaggtaaaggtggcggtaacacagctaaccaaggaataggccaatcacaatcatctaaccaaaacgcactatgtgtagcaggtggtagtataggcaactcttgtaacaacgttagtgttcaatcccaagcaaacagtggaaacaacgcattggcacaacaaggtggtagtggaaaaggcggtaacacagctaaccaaggcataggccaatcacaatcatctaaccaaaacagtggagtagtttctggtggcaacactgctgggtcaggaaacaatgtaaatgatcagagtcaacaaaacagtggaaacaacgcagcagctcaacaaggtggtggtagcagtggtaaaggtaaaggtggcggtaacacagctaaccaaggaataggccaatcacaatcatctaaccaaaacgcactatgtgtatctggctctggaacttttgtttcttgtaataatttgaatacgcaaagtcaacaaaacagtggaaacaacgcattagcccaaagtggtggtaaaggtaaaggtggcggtaacacagctaaccaaggcataggccaatcacaatcatctaaccaaaacagtggagtagtttctggtggcaacactgctgggtcaggaaacaatataaatgatcagagtcaacaaaacagtggaaacaacgcagcagctcaacaaggtggtggtagcagtaatagcggcgctaatgtggctaaccaagcaattaatcaggcacaatcatctaaccaaaacagtggagtagtttctggtggcaacactgctggctcaggaaacaatgtaaacacacaaagtcaaacaaacactggtagtaacgctgtcggacaacaataaacataaatttttttattagtcgttccctactactattatttagatctggtgacaggattattcaaaatttatagtttactgcaagatgatgtatcatcagctgtgcagattaataagacactaattaattatttgtaaagaatactccatcatcaagattgataaatggttcttcagggttatctcctctttggtttgtgaattgttggcaactttctgccgtattaaatccagcgtcttggggcgagaatggagcaaacacaacacagacagagtatggagcaccatccttaaagagccctgacggagtctctattggatctagcacataagtatcaacattatcattcacactaatttacatattttgaaaagacgaatctgacgttggaataatgcagaatgcttgaggatcattaactgaatcaagtgtaacagtcccttcatatacacaataactgaaagtcccttctaaattttcactccattgaatgctaggcgtaatctcaagaccttcgccagactgtgaattaacaagagtaatagaagcaatagcattcataaataatatagatgctaaagacagaacacataccagtaaggaaatatttttcatcaatatgatgtaataaacaaaatatttaagaaactaagcagactagtaaataacacttctttatcatggtataagttagtttgggcgcctggggattaagttccaggtggtagtagggttctacaagataagtaattaatcttaaattaaactgaaactataaattcaaaaaaagataaggtgattttggactcaactctgtgctaatgcgttgtttcctgtgttttcttgattttggacgttgatgttgttaccagaacctattgtgtctccaccagagacaacttggctgttttggctagaggattgagattggctaatgctttgttctgcagagttgccaccattgtcgtcatcatcgtcttgtgctaatgcgttgtttccactgttcttttgattttggaagcttacattattacatgataggaaagttgttccaccagaagcacacaaggcattctgtactgaggcttgtgattgagatatcgattgctcagcatgattgccttttttctttttagttgcaaaggcatcatccatcgctacaatgggacttgcgaaaagagctaatgcgaccactattgcgattgatgctactaggagttttttgtttttgttattctgaatgttttttgttttattcatatactggatactatagaaaaaatatatggggattgctaactgattgcaatactctaatattctagcacttttagaattagactatgaaatcccaagttagtagggttctataacatttaatcgcataatgaattccttgctctgaatttgcattttagttcttaacatttgataggttatgtataacgtttagtaacagtctgggcgcgtggggcttcataccgatatctgtattttaaatagaattctaggatttgttgcctgagggctaaatataaagattggttgaaggaatctagcttcttgtaattgctcaaatatgatctttctctttaaaaaaatgagtgttcatgtactgttctaaaaaacattattttgaagaaaaatagagtttttaattctatctatatttgcccgttataaagcctccatggggcatcttgaagtcatgggttgttgagttaaagaccttgtcaaccttataggtagttgcatttatttttaccaattgtcctgagtgccaatcttccacatagactatttttccatccggtgtggaatatattgtgtgtcccaactcgaaggtttctggaagatctggtcctgagctgtttggtccggggcttaagcgttttatcacttgtggatcaagtatgttggtaatattccatattgatacatagccttgattattaattttcatgtccatgctgtcctcttcggcaacatacaacttggttccaactattgcgatgtcagaggccggcttgaaaattccatttttctcggtgccgtttgtaaatgggatgatcatggtcgccgctgtgccggtatttgaaacaatatcaccatctcctatattattgactttctccgtatcgataagccagacgcttggaccaatgattttgacattgtcagaagtagcagaggtcggtccaagttgttgtgtagatgttattgcatgtgtgttatttatccaggtcacatgatgagggaatgctgcataatgtgtattatttcccaatcttatctccacggggttggtaagctcgcctgttgcgttgtctacatcaaatagatgtaaatggttgccttcaaagaagtaatgtggagataaagctttgtttccagaggggttaaagaacacgccgtgaagccacctggtatcattgccaaattgaattgggtctgttggcgctaaagtaccattgtttacatcaagtactctgatcgtattatttgtccattcggtaaagtatgcaaatttttcattagggtgtagagtaggaccatgtatttggacattgtttgggaaccacaatgccttgatgactggttgtgtgagatttgtcgtatgatttgtgatatccggaattacgggtttggtatcaggatctcttatcttaatcacatttgtaattgaaacatcggaatggttatttttccaatcgatatcaccaatttttaaggccagaatagtggctggagcggtactcgagctcatggtacttagaaaggctgtatctcccctcggggttatcagagtatgaagtggcatactatcaattggatattgatcaaactggcacagatctacagtgataatcttgtccattgtaggatgtatcaaatacagaacaggcctttgcatgtcagtgtttatgctaaagattttactagtattattgtgtgaatctgattctaaagaggtcgaattctgaccttcaattgcaaattgggtttttgattggttaccttctacattagttgaagaacatgttgatgatctatctagtgaaatatgatgtcccccaccagtgatactatcagaagggtcgggcttgctagcaaatataccagtattgccatcttgtgcaaaagtgaagtggatgttatcattaaatccgttgatcaggatcagtagcagtaaggtcgttagtacagtcattgaaaagaaaatataatgagttttcatacaagtttattcaatattgattattatataaatattgttataaattgcattttcattccattagcgtgacaggaatatttaaggtctccattggtacttttaattccaaatatcaagaacattaattacattgacaagtttctgtcgcatgaataagaaactataaatggtcattagttggatacattttgtcgattctatcctattcatgccaggagtatacttcatctttataatttatctaattttgaagatttgagatttgttaaaattagtctgagcgtgtgggaatatgattcaagattgaatagaatctagcatttacttgtattaagcgtctgttgcactttcacagacatctctgttattgccttctacaggcatgtatccttcaagaaatccttggtttaactatcattgttggttttaaaaccatgatgtatatagaactgtaattctatttagaaataaattaattttataatatttagtgactatctaggagtataaaaaattattaatgctcctaaaagaactataaagccaccgattatttcaaatctatctggtctcttcttgtccacaactaatccccaaacgattgccattactacaaaaattcctccatatgctgcatatactctaccaaaattcgatggctgaagagttggaattattccatatacaaatagtatgatacctccagcaagcccaagggttattttctttctctctcttagccattgccatactagataaccccctcctatttcagcaattgcagcaactaagaacaatccaaaggttgaaatgataaatactaaattataattatccggaagtattgattccaattttttcaccctctttacggggatagtaaaaaatgataatgactcctataccagcgacaatagttccaactatatcataaatatccggaattacttcttcgaagagataaccccagcataaagccattataataaaaattcctccatatgctgcataggttctatggaaatgagttttttgaaaagttggaactactccatacataaataatacaaatccacccaatactccaaacatccaactataactttctctcaaccataaccaaactagataacctcctcctatctcacataatcctgcaataaaaaagaaaaataatgaatataaaatgtcctttatcctaatatgcaattatcaatggataatgatttaactcggttatttaactattagactaatttttcatctactgctggaattaattgaatataactgggtggacaaggtcaaggttcaacagaatctaggatcagtttgaaatgagtctaaaaaagtttagaattcagatgaacgatattatcatacctaacaaagtaacatttagtttgggcattggggattaagttccttgcgatagtggggttctaatacttaacaggtaagagtagaaacaaattattgtgctatagactgataaaaaactatttttcaattctttatcttttctaaattatttatacccgtattctttgatattaatttattaaaattatatgattcaatttctttgggtatccttatcgtttgaaatctttataattatatttcaaactttgggtctagtttatcatccacattatacacaaaagatttgatcagggatttaaatagatgaacaaattatattataaaaataattgatatgtatatatgcctcatattataatcgaaggtaggaaaattaactttgaatccatatatgtaaattttgataaaatggtagaaagaaaagataattatatcataaaatttggtgatgtatttttaaatcaatcaaaagatttaatcatgataaaaacaacggttattgaaaacaatatcaatcaaaaatattatattcaattgatgaaaaaagaaaatcaactaacattgaggttagatcctataaccgatccatcagataaaaatagtagcgtaaaaaaatctatagcaaatgttgctagaattattatttcaaatcataaagacccattagcaatcaccaaaacaaatctacaagattttctaataaaatagaaaatgtttaattagagcataatatttggacaaatcgttatgtttattagcatttttttcatgaattcagttttgacccaataattagcaataaaaataataaaggcctaatatgaccttcttctaagcacgactattggaccttggggcgattaatcctataagtaaactacttgaaagtaccaagctcccgattgctatgggaatatcgataataataatagtaatcattgctctgttaatgacccgccaattattggattataaccacataaccggaaatattatgatgatcatgactattgtcatttgctacggaatcggatctttcattctcctaagctatgctcatagggtaagtagagaactgaggagtagatcacgcctaagcaacctaatgcactggactgtaattattgtgcagttcggaattttgataactctgatattcatgttattttttggtaatcctagctatatattatcaagatcgatatttgcggcaagttcgttactggctacagttattatgattgtaatcgcttttaaatttttttcatggtacagagccagcaagtctaagagtcccatagtcttattctatgcccttgccgcattgaccctagcttgttctatttttgaagacgcaagtacaaaattactaatggtccagatcatctacgaagaccccagactagataaccaagttattggatcatcatttcaatacgaaggatcagagaaatatgatggacaagttgtatttgtcgattcgaaatcagatgaaacggctctctttgtaatcccacaatcatacctagaattgtataactatcttaactctataattctcccagtgggatttattttcagatggatagcctcttcaatgctattgcggaatgtttataagaaaattggcactttaccaatatctctttggatcataatatctctaccacttgtactttatttgattggtaagatgccgggtttcttttcaggtgaaagtcttgctgggattgacgaagcatatcgatactattttcgaatattattcagagtaggtacgatagctggaaacatcttgtttggtctagcattcttcatcgttgcgaagaaattgaaatcgtcgaaagttagagattatcttatcttagctggtcttggtgatacgatagttggaattgctctttctacctcagcaatagaaccaagtttcggtgttgccgcacattcattggtccttctttctacatatctgtttacacttggcctttattcctcagctattacaatttcacaggaaattaaattaagacaatcaataagagactctgccattgaagagtcaaaactactagttagtatagggtctgcacaaatgatacaagaaatagaaaaaaaagtcttttcagtagtcgaaaaggaaaaagcagaattggccagaagtacgggattgcaaccgtcattcacagaactagaaacaagggagtatctaaatacagtacttaaagagataaaaataattcaaaatattgaagatattatttcaaaaagcaaaaatatcctatcggactctagagaatttattctgtgcactagaccttctggattgagattagcgtataataattattttgaaatctatcagcagatttgtggaaatggaaaaatgcgctcacacaagggaatcaagattataacatctattacagacaataacgatatcgagatagtaaacaagttcttagaattaggaattagtatcaagcatgtaaaaaatcttccgcctatcaactttgcagcttcagataaggaaatgatagcaacgatacaaaaaacagaaggcgggcaaatccttcaaaatcttcttacaaccaatgagccagcatatatcgagcattttaattcaatctttattgaattatgggaaaatggaattgacatcaaaaataggattcacgatattgagactggagtagataatggagggatagaaataattcagaatcctaaaacgttcgagaatttattctacagcctcatcacatcagcaaaggaagatattgtcggaatcttttcaacaccaaatgcatttagacgtcaaaaatttgctgggacgcttgatttgataagagaaagactagaaactacctccttaaatgtaagaattctggtcccagaggataaattgatttatcagactataaacgaactcgaagatcaagggatttcagacagaatcaagattagactaatggagcctagtatgcaaaccaaagtatcaatagtcgtgattgacaggaaatattcacttgcagtagaactaaaagacgattctaagaataccataactgaggccataggattagtaacgtattctgatagcaaatcaacggtattatcctattattcgatttttgaaagcttatggagacaaacagagttgtacaaacaattgcaattaaacgagagaatgcataaggaatttatcaatacagctgcgcatgaattgaggacaccaattcaaccgatccttggggcagtagatattctaagaaatagcactccaagttctaaggaaaaggagcttgttgaaattgttagtcgtaacgctagaaggttgaaaaaacttgcggaagacatacttgatgtaaccaaaatggaaggataccatttaaacctaaataaggaaaaatttagaattagagatataatactagagaatattcacaattgtgaaacaaatttcgaaaaaagtaagtttaaaattagatacaatggagtggacgacttacaaatttttgcacacaagggcggtattagtcgagttatctccaatttgataaacaattcaataaagtttttgccccgtgagggaggattcatcttgattactactaaactaacgaagaaccaaattgatgaaaaggcccgtcagatgatacaagtgagtataacagacaacgggagtggaatagatagcgaaatgcttcctaagctatttacaaagtttgcaactaaatcatttcagggtattggccttggattgtttatttcaaagagcattattgaggcacatggcggtaggatttgggccgagaataaccaggtgggacaaggcgctacattttcatttgttttaccctttgacaattttgagcagagtaacaacaaatatacacaatagggtggaattatgactagaaggaaaatactaatagttgatgacgaatatgacatcacctttgtatttaagataattcttgaagaaaaaggttttgttgcagatgtttacaacgatccgatcattgcgctatcagtgtataaaccatactattatgatttagtaatgattgatctaaggttacctggaatgactggttttgagttatacaatcaactcaggaagattgataatacaaccaaagtatgctttttgacttctagtgagcagtttcaccagcaatatcgtagcaatgaatttcaagattttgacccagaccttttcattcaaaagccagtcgagaatgcagtattgatagataagattaccaaaattatcgaaatgtaatctactgatacgattatctactcaaattctttggttaggtcgcaattttagctttaatgcaggtatagaattggatttcaagatgagatattttacaaatctttattatcatccacccacaatcgcaagtactgatcaaaaattatcgcttctttgtattttagttctaatatttgataaattatgtataatgtttagtaacagtctgggcgcgtggggattaacacctatatcggttctttaaaagagattctaaaaaccaattgcagccaggcatacttaaacctatttcacatctaattaaaataatcatttcaaacgatctttgcaataatattttttattagtctctaaaatatgatcagtacaaagtgcaataccgcatacctcacatgctgttttactcctttcatacaatcaggggtacctcttcttacatcaagttcattggactctatggggatataaataagcctatttgtgttttgccggttgattcatttatacctagaatacattcatagtcatatgtcaaccactcaatttagttcacagtcacatggtcagtatgattcaatggcctattcggctgatggccccaattcaccgcttattcagaccactattcctaggcgcgaacctggcgataatgatatacaaatagagatcctcttctgcggtatttgtcactctgatctacatcaagtacgtaatgagtggagtgcaatgcccactgtctatccttgtgttccaggtcatgagattgttggtcgtgtcacaaaagtaggatcagcagttacgaggttcaaaccaggtgatcttgccgcagtcggctgcttggtcgactctgatggtaattgtccccaatgcttgtcaggtcttgagcagttctgtccaaacatgaccttaacctataattctcctgatccgcatcttggaggcgtcacatatggaggctattctgatagtattgttgtcaaagaacactttgttcttagcgttccttccaacttgaatcttgccggagttgctcctctcttatgtgcaggaattactacatattctcctatgcgtcattggggagtaaccaaaggaaagaaggtcggtgtcgtaggtctcggaggtttaggtcatatggctgtaaaatttgctcatgcgttgggagcttatgtagtagtatttaccacctccccaaacaaaaaagaagatgcacttaatctgggcgcagacgaagtagtggtttcacgaaatggtgatgagatgaataagcatatagctagttttgatttcataatcgacaccgtctctgccgaacacgacattaacgcatacctacaattactccgacccgatggcaatctcacactagtcggcgcacccgacaagccttatgcagtttcggcaatggggcttttgtttaaccgtcgcagtctctctggctcacttattggcggtattgcagaaacacaagagatgctggaattttgcagcaatcataacgtaacagctgaagttgaaatcattccaatccagaaggtcaacgaagcttatgaaagaatgatgcactctgatgtcaaatatcgcttctccattgatatggcatctctcaaagccaagtaacatgtgaccatttatttcaaatttacctgcccaatttaatgaacaatgtaatattacgtccaatcgttctatgtggatatgaaataggaagtatacttacattagtctatatgcatggagatactgtttaaggttgaacatacattagatttaatttgaacatgggcatcaggaataggtccaattctgggtcaaatatagttactatacattataacaattagtttgggcgcgtggggatacggttcaaggttgaatccagtctcaacatattactcggagaggtctcaagtttacaatttattatgcaatcatatgcaaaatttattaactaaatttgataatacaaattctatacaatccttaactttgatctcttaaactctagatcatgcattatgattctagaattatacacgttaaaatggtaatagctttagtaaatatttagagtaggtataacaatcactttattcttttgcaaaataatgtgtcagtaaaacaacctatgcccaccaagaacctaggctggataatctattcagtattgaattaaagacgttgaaaccaccgctgatttaatccctcatttatttaacatgttatataaccctcatataacaagaatatagcaccattttaggtaataaatatatcaaataaaataccctttgaaccagtatgaataaaatatacttatttgcaatcgctactattcttgcaacagcgtctctgatggttactggaacatttacatctaccgcattttctcaaataccaactacttcaggtaccgaccctaccgaaaatactggaccaggagtgttaccaaacggtactgttgttaacacaacgacaagtaacgcaacaactggcgtatactgagaattcaacaataccaatgtagtttaagaaactacaaccaaccaagaattattcaatcccctctttattcttgacatttcttctttacctagtaatattctaatacattttaaatcaatggacacgtggggatacgattcaatgtggaatagaatctaaatacaatgacaattgttaggattaggataaatccattagtttgatccatcaattgaaaaaatatttacgatagacagataagcctcatcaaggcaactttttaataaaaagggaatttaatacaatacagtggatgaaataacactcaagcaattaaaagagtccaattattatcatccagtaattactgacgttattaatgattataaaatagtgcttgaaataaccatggacggaataaattcttgtgaaataggctttaacacagtatgggacgctgaaatgtgtaaatgggcgtctaaatattttgtagaaggtttaggtctcgtaaaacaaagggtgcaagaaaaaggtataagatgcaggttaataactcaagtaaatatagaaaatcttggttttcttaatccattgactttcttagaaattagacatttagagggcttgcgaggtaatttcgggatttacgatgaaagagggtatatggcatttattttacataaagagaatgacgaatccttacaaacatactttagcaattcaaaatctctggcagaagaacagttgcaattatttgaagaattgtggagaatggccatacctctctcagtgagaagaaaagagatagaatatgaagataaatttgatgataaaagaacgataataaactacgaaaatattcaaagtgaagtagaagtcttaaccctcacttgtaaaagagacttgacaatattttcttctaacaatattctatgttttcttttgaataaatataattttcataccttgttaccttcgattctacaaagaggtatctcaattaagattcttaccgtaaacgtagataaatatttgataaaacaaattgcatcgataaatgactcattaccatcgatcaaaccgattcaaataggatttacaaataagattggagacctaaatgaaatgattatgatattcgatgacaaacatttgcttcgtctcaactgcaaccaggataatttactggttgcaactttttcaaatgaagaacataatgttttagtccaaggattaatgtttgagaaatattggaatgaagtaaagagtcttgaattaatgaatagtaattaaatccgtaatctattccgattgaatgtctttcactaacatgattgactgtattatgtaggatacagaggttatttagttgcaactttaatacaaatcaagtggatatagacattgagagatccacatatagcacaaggtgaatacgtttgtggagacatgtttaagccagaatagactcgaattaatttgatgagtgctggaccgaaagttatgattgcgagaataataacatcattaccatacatagtatcattgagtttgggcgcgtggggattaaattcctagcggtagtaggattctaatacattttagttacaagaagtctcttcaagaaattgaagctaaaatagtagctacaaattatcacaacatagcaaaggctataaaatcaaggacgtattaaaaacgcattagtatgtctaatttacaatctgaccaaattaaacaaggccaacgtcaagcctgggatagtgtagcttacggatggcaaaaatggtggaagacttttgaaaatggagcacaaacggtaagtgataaattaattgagcttgcagatgtaaaacccaactcaaaggttttggatattgcaacaggcataggcgaacccgctattactgctgctaatcgtgttgtcaatagtggtggacacgtattggccacggacctgtcacctcaaatgctatctatagcaaaagaccgggccaaatctcaaaacttagataacataatagaatttaaagagggtgacgcagaaataatcactttacaaccatctgaatttgatgtagctctttgcagatggggattaatgtttcttccaagtgttgatttgggactctcaaatatttataaatccttgatagatggtggacgctttgctgcagcagtttggtctacgcccgacaaagtgccgcagctttccattccaatgaacatagctagacgcgaaactaatactccactgcctccacctggaacgccgggtccttttagtttagctgatgaaaaattactttacagtgcttttgaaaaagctggatttaaaaatattcgaatagaaaaggtcaaggtgactttcaagtttgatactgcagaagactttacaaagttcactcaagacatagcagcccctgtcaatgctatattgaaaaatcaatccaaagagcgtactgatgaaatatggaatatgataacacaagaggtatcaaaacacacaactactaaaaccgataatagtgataaacaaggaccagtaagtatcgataatgaaactatatgtatagttggtataaagtaaagttaaattgaagatattcaatctcactagaagtaacaattttcatccgtggggattaagttccttgtggtagcggagttcagttacggttttataatcttgaaattcattgcgactttagaaatgacgaaatcatattcctaacttgtatccaatattttctattatctaaatccttagatgagtgcattaacttttcaaaagcaattccattaaacaacgccaaaagtacttttgacatttcttcggtatttttcatgttaatttctgaaattccattttgcatagactcatccaatactttcttaattgatttagttactttatcactgcaaataattaattcgtccttgatcttattacttctccttgacgcacaccacatttcaaacaagaatgcataaaattcaggattttccttaaagctttgtatactgtccttgatgatattatccgctatttcttccgcagtttttcctctaattcctttaatagcagcccgaataatgttttcagagctataagccaagactttacttaccaaatcctccttatccgaaaaataataatgtaatatacctctacttacaccagattccgctgctatatttgctattgtagtattttcatatccatttttagcaagaaccttcaatgaattctttaaaatttcatttatcttttgttttttgctttcactcaatcaatttatttaaagtaatcgattaatataagtttagttggaccgccaaccaaacattaataaattagattatagcaaaataagttggatgactaaccaaattgtgaaaataacgctgaatgaatctaaagacaaggcaaaagagatagcaataattggtggcggcttagccggccttactgccgcggtgtatctttctcaaaatggaaaaaatgttaccatcatagaaaaatccagtgaattcggtggaagagccagaacatctatcaaagatggattttactttaatcagggtccacatgctctttaccttgaagggattgctccaaaaattttagatgaattaaacataaaatataaaggtaaaaaagttgactataccaaatattttgttacaaataaaggaaaactgtatcaatcgcctataaaattaagtcagcttttaacaacaacgctactaaagggtctaggcagtaagattgaaactataagatttttcattaagctaaacaaaatgaatcttgatgggctccacaggatcagcttccaagactggttagacaagaatttcaaaaattccgattctaaggattttgtgagaatgttaggcaggatttctacttatacttataatgcagaaaatgtgagtgccgtgttggcattaaatcaaataaaaacagctatttctggaggtgttgtctatatagatgaaggatggcaaactttagtaggccagcttgttgatatcgcaaaaagtaatggggtaaagtttgtgtacggaaagagtgtagtctccatcaagcagagttatgatactaatggaacaaataggcaaccagtatggaaaattagattatctgagaatagcgttctttctttccatgatgttgttattgcaaccaatccttctcatgtgtataatcttttaaaggacaacacctcaatcaatcctgaatttcttagtcaacttgaaaaaatggacagacctgcaagggtcgcaatattggacattgcattaagcagtcttcctaatcctaatgtttatggagcatatggaatggatgtccctctgtacctatcactgcattctgcgtttgctaaattatcgactgatagaaatggagtgctatttcatgcaatgaaatatttagattcttctgcggccccaaatccagtacgagataaaatggagttagaagagctcttagatatggttcagccgggttggagaaaaatggttgtaaggcaacgcttcctaccaaacatgatagcttccaataccttccttaataataataaagatatcctggataataggcccgacataaaggttccaggagttgataatctttatattattggtgattgggttggtccagaaggaattttggtagatacaagctttgcaagtgctaaagcagtagcattaaaaatcctatctgaaaataagggaattgaaatacacgaaggaaaacaataacatttgttccactcctaccattgaagggtataaaatatttttttatttattattagtaacagtctgggcgcgtggggattaagttccctgtggttgtagggttctatttcaaatgcggatgtcaatttgttcacatatgaagtttgtttttgcatttactttccatcaagagaaggaatttggaagatatccttaatttcatgtaatacatttgctgaatatgacactcagtcttaattgtaaagatgctggagaccctgtgtgtacccatacaatgtatggtgaaacagaagaggaactgattgaaaatgcaaaaaaacatggtatagaagttcacggctatacagaagagacattccaagaagaaatggcaaaaaatctagagcattttagaaaagtaataaaaagtgcttgaatttttaattctttatttttttataaacttagtatcaatttggaaagcatatctagatcgcgttgtttatattaaagttccctgtggttgtagggctatattacattaaatgaagctctcaattcatagaaataaatggattttttattatctattgcagatgttcaatactggactcattcaatccctatctcatgaacaaatttttaaattcaccattgataaaacccgtaccaggggttaataatttcataagatcttcatatatatccaaacattctttatcctttgatattttctctacaacttcggtgcgatgctcacgacctttatatgttaccacattgatccatatctcttcttcctcggcattgatgggaattatcttagttatattgatgaatccaggtatttcttcggcattgatgagaccaaagcaatcataaattacctcttctttcttaaatatatctatcaatcgattagtcagtgataacaatgcttcatgatttttcttcggaactcgataaaagacaaattccacatacttttgaatattttgattattttccaatgattccatattatacgtgttctactaacgaaataagtataaagaattgctccccaaggggagtttaactacttgttcgtcgtagatttgttaagccatctgtatctgagtttcacattttttggaaattatcttgacaggttgtcctaggcgtatgattcaaggttgaatagaatctagaatcaattttccaagacggtcttggaaaagatgtaaatctcagcctaattcatattatcattattgtgtacagtatatgtaagtttgggcgagggggattaagttccttgtgctaaacgggttctacaacattaataaaaacggatttaaagttaaaatcaaacctggtagcatatgttttgtttgaatatctatctttgtgttatcaaaaggagaagcttttctgttatcatatcaaggacagagggatttgaactctggcaatactcaaggaggtaaatacaaaaataatcattttatagaaaacttgttcaattttgcccagtaaataattcaaaaaaggttatgacatgggtatttcagttcttatatttctttattattcttcatcctcaagtagattagtatcaaatgctactgctttacttggttctgatgcgtagataacatagtgatgaactttcaaaagatcgtggatccatcttggcctcatcgatttttctatactagagatatcataaaaacacatttgtgaattattaaaactatcaaaattttcatgtccaacttcttccaaaataatgcctagtttcattccttcccttgtttctgtatctgttattgttcttcctgcaaatctaaatgggggtttcattcctatagtggcatcttttcttatatgcttaagtacttttaaagtatctcgtttattatcatccgatctttcaatggtatagatacgtaacaagttattatttttataatatcttacatcaataccttcatcgtttaatctattttcaattacatctagattatctgaagtaaagaagatacatgattcgccattattaagaccatttaaaaaatacctagatattatccgaaaggcatatttttggtcatcgtataataatacaatatgtttgtttttttccaattgatcgacaaatgtaagcgggcgataaatttcatcatcatcgtcatgcacatacattgttaatttctcaaccccactactttcgatgaatcaaagtatcttatacccatttctatcaaaaaggaagcaattcggtcaaaatcccttaaaaaatctctaccttttggagttatttgaagtggatcctttattatcaatttattgttctctaattcattaagatacttggcaaatttatcatatgcaagattgcttctaagttgtactcgtgtaggttttactttaccattaccatcaccactctcattgtcgactagctcatctaaaataccttttagtatatcgtgatataattccattttatttcgctttggttttggcagattaattaacaactttttttcttattaataaacctccccttggggagttatcctttttatttattccgtatagagtaattttgaaacattttatgaacaatcaaaaagggaatagcaaaaactataattattcagaattcatgattgtacaatcaccaaaaaataattacgaagcattaacagcacttgaaaaaaagtcatctgaaatgtttgaaaaagaggaaatacattatgagttatttcgacttgcagtaaatactagttgggaaggatttgaaaatatttctaaatcagtttcagcgagtacagatgaagatgtatggataaccattatgtcgtataaaaataagaaacatagagatgaatttgttgcaaaaatgtcaaacgatacggaatgtcaaaaaggttatgaagaatgggcaaagcttctttcccctcattccaatgtaataacaggagagttcgacagacaattataaatcaaatcagaaagacaaattattttttcacttgaatatttttatttattttagccgatgttatttgtcagtttaatcctatggattttacttgcattaaaacatcaactaaatttgataaaagtcttttgaatatggtatcaaataaaataacatttagtttgggcgagtggggattaagttcctagtggtagtagggttctatcacaaacttttttttatacatcaaaaatatagaaaaggatcctatttgtaagtggaatcaagaaataagcatagaatgaatccacatttaatgcagttatcattttatcatacatcacgctctgaaatatacgagtgtcaatcagtaacataataatgactaaatacagttctatctattattgtttcttaaacagtaaataaccaaagagaattgaagtatagaaaattgccaacataccaagttcgaaattcataatgaagtagggatttttccccttagttattaacactgtagttaatacaaaggtccacagttttatctactaattatccttcaattaatctttctcgattctagaatcttaataatttgatctactttttcctctaaattagatacacgcgattcaaggtccttaattgtagttaggttaattgaatcttgtaaagagggtacaatttcgtttagcttcacttgtatttcctttatagctttagtattttctgatgatacatccgatccggatgaacctgactctgtatcagtattgtaattcatagcatggttaactattcaatataataaagacttttcatgaagccataataaaagaaatagaaattctttaattctcttaattttcaccttttaataaatgcctagtcatagtaccgttatcatatccataaattcgaaaggatatagctctggtaacagttctcatccgttgggataaagttccctgtggttgtagggttctatttcaaatgcggatgtcaatttgttcacatatgaagtttgtttttgcatttactttccatcaagagaaggaatttggaagatatccttaatttcatgtaatacatttgctgaatatgacactcagtcttaattgtaaagatgctggagaccctgtgtgtacccatacaatgtatggtgaaacagaagaggaactgattgaaaatgcaaaaaaacatggtatagaagttcacggctatacagaagagacattccaagaagaaatggcaaaaaatctagagcattttagaaaagtaataaaaagtgcttgaatttttaattctttatttttttttatttattcaaattatatagatttgtcgattaaaaaaaagtaaaataactaaatattatgaatttcgattttaaagtatcttctagtcgttaatctgtgctacgttggatcatggatatagtagtgttacttgatttgcgattattgagtctggtcgcgtggggattaagttcctagtggtgaatggtttctaatataaccatatttaagcacaatacattatgagagagcatttaagagattcacagttaccacacttgtaaaaaaattttttaaatacctgggccgcccgccgggtctctagttgttatattaatatccgaatcacattaaaaaaacaaatcaaaaaaaatattgaaagtatattcttagaaagatattgatatttctattaagaacaaagttctattctggatgattttaatgactttggcggtgcttgtatgaaggttcaatcctttggaagtcttcaacgtgatactgtcacctagcaatctttttatttattcaattccagagttagtgaatgccaattaaaatgagtaagaaaggcggaggaaccaaaaagagatcatttgatgaaggtgttaaagacctaaagaaacaaggtaagtcagatgaatctgcacgaaaaataatgggatctataaagaaaaaacaagaaggcaaaagaactaccacaaaaaagaaaaataaaacctaagaaagttattattaattaaataatcgtaaatattaaaacagaatcaatataactgctaataatagtctgggcgcgtggggattaagttccctggagtaatagggttctaatacatcttcaggatatgttgtataatcgaataaaacaaacaaagatctaaaaaacttaaaaattattaaagttaatcccgcttaagaattgatactagttggtgagaatgcgaatacaatttagcatatgcaggcattggatcttggtattaagatctgttgacgcatctcaagacctttattggctttcgctaaagcctacatccttttgcagaaggaataaacatatatctgaaattataataaatcatttctaaagcggaatttttttactagtgtattgtaattgtttatttatcctctagcattagtggcaatttagagtagggatggagagggattaatatcgctatctctattggtatagaacggatgttcgacgaatgttttgattttacctgctaaaatgttttaatattacaagaatcactttattcatcttgaaagtcggcatttcactaccacaagctggttcacaggcaacaaaagagaatatgctacatatggcacaagctgcagaaagcgaaggttttgattcgatatggacatttgaaagacttctttggccgattaaccctcaaactccttaccctgcaactccagacggaagtcttcctcaagaatatcagataatgcttgatcctttagagacactctcattcttagctgcaaataccaataaaatttccttaggcacatcggtattagatatgctatttcataatcctgtaattttagcaagaagacttgctacgctggatgtgttttctgaaggtagagtcatttctggattcggaataggctggtccaaagatgaattccaagcttctaatatcccatttaataataagggaaaaagagccgatgaatacgtcaagatgctaaaaagtatatggatggatgaagatgttgaatttaaaggtctgtattataatatacccaaatcaaagattggaccgaaaccggtacaaaagccacatgttcctatctatcttggcggttttagccccaatgcaataagaagaatagttgaaaatgatttaaatggttggcttggcattattggtggtattgcaccatttggttatgttcaaagtgttgtgaataactttagaaatgaaataaccaaggctgataaagattccgctaattttaaaattattctcctagcttatccatatcttaaagatagtgctgttaattctgataataatgctgataggcccacattgacaggaacaattgatgaaattggtgacgatataaggaaaataaaagacttggatgtggatcatataatatttgcctacaacttttcacctattggcaaagatatagataaaatgattgacctaacaaagcaattttcaaaatttgctaggtaggtaaacttgatcaaaaagaaaaaaatcattcattcttccaaaatattattttctgtggttcaactattatacaatgatgaccaattcctactttttggtattgcgcatatttttgataaaggaatttatgccccttttttaatgaaggaattttattgttatcatcatcatatttacagcattcaccgttttcttctacatctttttctccaattagatatgctttaccttgaatcattacaaaaactaatttgctccaatcctcattatattcatctatgagtagtgcaacattggggcaatgttgaatgtttttaactctttttagtttttcaacagtttctttttttcttttttcatctaaaggtataaaataatggtggccatcaaatgcaaaaacgacaggtactatatgaggtatctttttctcataatcaattgttgaaagtctggcaactcttgctctatttattatttctcgaataacaagattatttgattgcataagttatcattcaacctcattattgccgtatttctatttatatatgggtttggatcagaaaaaaggcagttaatgatttattccatataaaaaaacaatgagtaataacttgaaggattttatctaaaattcagcggtagtattatacttaagcccaaagtaaagaacattcaataaataataaaagtttattcttgcactcagttcttcctcgttatactctattcttattactttagtctatattactaggatcgtagtaaattcgatgataacaaagtatcatttttattgtgaaatgataaaaagttccaatcggcagtaggatttgatgaaatattaattatacttattgatcttgtattatactgaaaagtcaaagcaaaaaaaaggcggggattttggacttagctctgggcagctgcgttgctaccactgtttgtttggctttggacattgatgttattaccagaacctattgtgtcaccacctgatactacctggctgttttggctagaggattgtgattggctgatgctttgttctgcagagttaccaccttttccatttccttgttgtgctaatgcgttatttcctgtgttctcttgattctgaacgttgatgttattaccagaacctattgtgtcaccacctgatactacctggctgttttggctagaggattgtgattggctgatgctttgttctgcggagttaccaccttttccatttccttgttgtgctaatgcgttatttcctgtgttcttttggttttggaaactaaagttgttacatgacacaaatgttccacttccagatatacacaaggcattctgtactgaggcttgtgattgagatatcgattgctcagcatgattgccttttttctttttagttgcaaaggcatcatccatcgctacaatgggacttgcgaaaagagctaatgcgaccactattgcgattgatgctactaggagttttttgtttttgttgtgaatgtttgttttattcatacctttgatactatagaaaaaatatattgggtttgctaactgattgcaatactctaatattctagcacttttagaattagactatgaaatcccaagttagtagggttctataacatttaatcacatactcaattccttgctctgattttacatattattgcttaagatgtgatggatttggtatgatatttagtaacagtctgtgcacgtggggatacggttcaaggttgaatctaaactaaatacaatgacaattgttaggataaggataaatccatcagttcgttacaccaattgtaaaatttcagacaagtcaaattaggcccataaaggcaactttttaataaaatcgggatttaatacaacatattggatgaaaaaacactcaagcagttaaaagagtccaattatcatcatccagtaattactgacgttattaatgattataaaatagtgcttgaaataaccatggacggattaaacaaatgtgaaataggctataatacagtttgggacgctgaaatgtgtaaatgggcgtctaaatattttgtagaaggactaggtctcgtaaaacaaagggtgcaagaaaaaggtattagatgcaggttaataactcaagtaaatatagaaaatcttggttttcttaatccattgactttcttagaaattagacatttagaaggcttacgaggcaattttgggatttacgatgaaagagggtatatggcacatattttgcataaagagaatgacgagtccctacaaacttactttagtacttccaaaactcttgcagaagaacagatgcaattatttgaagaattgtggagaatggccattccgtttgctacaagaaagaaggagttagagtatgaagataaaacaagtgctcaaagcaatataacaggtttcgaaaacattcaaaaggaaatagaggccttgaccctcacctgtaaaagagacttgacaatattttcttctaacagtatcctatgtcttcttttgaataaatataattttcataccttgttaccttcgattctacaaagaggtatctcaattaagattcttaccgtaaacgtagataaatatttgataaaacaaattgcatcgataaatgactcattaccatcgatcaaaccgattcaaataggatttacaaataagattggagccctaaatgaaatgattataatattcgatgacaaacatttgcttcgtctcaactgcaaccaggataatttactggttgcaactttttcaaatgaagaacacacagtcttggttcaacaattgatgtttgagaaatattggaatgaagtaaagagtcttgaagtaatgaataacaattagatcacatctactatattaccatatatagtatcatttagtttgggcgcgtggggattaagttccttatagtagtagggttctaccaaaaaattgctacatataatagtttattgaaatgaatgtttattagtaatgattagttttgttttagtcttgatatccacaaatatatattttttattcgtttttgaaaatacaatgaattgataataatctgtaattaattaatgacaaacacatcaaaaaggtcatagtgccaacatattcatacaaaaaggaatcacctatttatcatgtgataatctcttgagattgaatgatcaagattgacgctgttgatgttatcagtatacgcaggtggagcactaagatctcccatgatttgggcttggtaaatttttctatctgatatagagaaattacccgttacattatcaagatgacggaaaatacctttaattccagcaattctatttaattcttctacagaagagatatttgcttctgtaatttcaataattgctctcgcgttaactccatctttaaatagacgaaaaacaccttgttttattggtttaattcttaatagcattacaggataatttatctacgtaggaatcaatcgtatattttgttttattccacctatcaaaagtctgaattaagatattatccattccatatacaatttcggtcttctctttttcttcaattgctattttaattacctatttaatcctgaagtccatggaagataaactttcatttcttgatattactactattgtatattaggatcaataaatattaaaactgatatccttgaagccctaaaacacgatttaattataatagtttttcaggtaataagatatttggaataaacccattttgatgggcaaattcgactatttttttgggtgcatatcgtgcgtaaggagacaagaaaggtaacgtataactctttttatatatctatttttatataagtgggagtttaatgtcaacaaactctatttcaaggataaagccagaacacatgatttcatttggtgatgccatttttgcatttgcaataactcttatggcattgtcaatagagatacctgatttacctccaaatttaactgaacctgagttgatggccagactggcggatacgtacaccggattggagagctacctcattagttttgctattattgcagtattctggatttcgtatcaccaaattttcaattttattataggttcgcatatggcaattgtgtatctaaatttattattccttctctttattacgttattgtcaatttccacttcgcttgttataaattatgcaacttatcaaattccatttataatctattgtattgtcgtagtgttaacaagttcactacttgcagtcatctggctgtatgcaacaaaagattatagattaattgacaagaatgtaaagcccttattcataaagggggtgatgataaaactaatttcaattccaatcatatttgttatttccatcttcatttcttatgttgatgtgaatattgcccaatatttctggctaataattatacctgttagcatcactattaaaaggaaatatcccgctaattagttgaataaaatgaatggatcaagaaggatgactaactgacagaaataatttatagttgatagaaacaaaccaaagttttatcattatgaatttaaccattcagatgaaattgaaattacagtcatcactccaatgccattttcggcattattaaatctcttattcttgaatatatattagcctcaggagtttagcacatattaaaactaaacctgcagttattctaacacttaatgaatttgattatgaaatccgaaactagtaggattctataacattagacggtataactaatctttgatcggattaaacatattgttgctcaatatctgatgggtcaggtatgtttatagtaacagtctgggcgcgtggggattaagttcccagtggtaatagggttctatatcaatagcggatatcataataagaagacaaaaagtgcttggcatcatctagttcaataaccaaatagttctatggacttctggagcgtctttatatattcctaatttaccatttagaaatgatagtttttcactgttggtgttattaaatagaattattccatgaaagataagacctctttcgctgaggaccccaacgtccgaagatatccaccctatgctttgaccatccggagtttcaatcgtaccgttgcctctcccctgtattatagtagattgagcattgtatgtattgataaaggtcatattgtttgctacgttacctatgtctttcataatagcctcttcgaggaatatttcttctgttacaagcgtaggtgaggtagaaagctctcttgtatttatgaaacttccattaatggtttgatatatgggttctgaaatattaagagagtttgttcctgtttttagaaagctgattggttcagtattatcattaatatcaagattctggcctaatgctgcttgatcatagggtattatggtaaaaccaagtccaaagagcaaaattgtgtatgttagagtcttattcattctactctaaatatcaatcaaaaatattaaaatatacattacaaggccatgttatattatgtttaattatgtgtattcccaaaggaaaagtgctcatccgtagggattaagttcctcgtggtaacggggttcaaatacatattatgtgttttaaagtgtcaatccaggatatcaatcagtaaatatcactttgtaacataatatttaatagctataacaataaaaggagcaaatggataatcatacaagttcttcttggatatttgatttagatggaataagccctcaaaatgataatttacttggtagtatgactcgaatgaatgcagaggactttcccatattatctgggatgggtggctcattactccggctaaaaaagggaggcattcaggctccacactggcatgtgaattcaggggaattgaattattgtttatctggaaaagctaaaatgactatttatggaaatgctcaaaaatttacttttactataaattcaggtcaattgacttttgtgcccaagggttattggcatgacatagaaaatattggcaaagaagagttgaaagttattatagtttatgataacgaacgtcctcaggatataagtgtagtagaagctgttcattctttaccaaaagaagttttaaacagcatttttggtctcagatcaccaggattattcaatcagttagaaaccaaggaattttatgatgaaatagtaggtacacatcaattagatttatctgaaagtagtattgcagatgtaggaaaaggtgaaagtgtatcaaacccttatacgatgaatctcggggctactgacccacaagttcaaacccctggtggtgtcgcccgacttggaagtactccatattttccaattcttgtagggttatctgtttttgtattagatttagagccaagcggaataatagaaccgcatactcatccaaatgcaggagagttaaattatgtaattgaaggtaaagtacgttttacaatccttggacccaaaggagagatagagacaaatgaaatgagtaagggccaagtattttttgttccagcaggatattttcactatttagaaaactctgacagttcaaaaatgggtactgtggcttccttttttagtaatgaaagtcctcaatttttaggtctggtgggaggcgttagttcattttcaaatgtggcacttggggcggtgtttaacaaagatccagatttctttaacagtcttccacatttagtgaagaatgtattgattgctgccagaaccaattaactcctagacctatagaattatagacagaattctatacctttttttcttttccttctctgtaaagtctcgctaatttggttagggtattatttagcctgtttttacttgttcaagtattttttgaataagtaaaaaaatgtttccatagcttctagaatcaatttcttagttaatcccgttacataaatctaaactcagcttgaattaaatacaattaatagtaacagtcctcatcggtggggatatggttcaagattgaatagaatctctatctttagtagcctatagccatatagaaataagtatacacatacaaactgccaatcctttatagtgagtgaaaaatctataataagatctgtccaggtagaaaattatgatatttccaaagcgtctattttttgtaggtttatcatctgcgatctttgctctagtatatagttccctcttctcatccgcttttttgatatatgctgccacccagatcaattgtgatcgaactgggacaatgacggttacatgttgtcaggatcatgttataaaccagggtccttccaatcctgccggaactctggtaacatattgtaccgactgcgaagttgctcccggaggaccccatgagggggtgcaacccggctatacaaatttgaaccaactgcgcaattgcggtgagcgctacattgatatgaaggcagaggaaccaccacgtccatctctacctacagttcccggatccttgccagaagacggagtcttagaacaaaccgaacagccagaacaatcaactgaaccccaagataatcaagatgataaccaaggaggaatacccacaatcaagaacaatgagaatcttccgttagataatgagataacagaacagtcagatacagaagatggtatacaggagactccttagaaggggcggaaactgcaggtcctctaacttagtcactattataaaccacagtagactcaactacagaatatatctcaaagattatttgagctcacaaaacatttttttctcttatagagttattttgtttataaatttacttaggttcaaacacttgatatgtctctggtcgaatacatgcatgtatacatattcaaggtaggatagattcgaattaattagataagagcatttgaaggttcaaatataatatgtatataatatcgttacctgagtaggtatcatttagtctgggcgcgtggggcttcataccgatatctgtattttaaataggattctatgagtatacagagtgatgaaaaatataaagattattaaatataatatattcgaaaacagattaatttaaaagttgtattttggttaattgcggtacatcatcatctatcaaagaatatttatttctttttttgtaagaacttcaattcgttgttatgattcttcctcttctagtttgtctcttatttcttcctcctcttgttcatgttcttcttttaatacctctacatcttgatcgctttccatactttttaacaattaagacgatccagttaagtctttcattagttatttctaattaatcaaggcactattgctgaatggattcgataattcagtttgggtgcgtgggaattaaggtccttgaggtagttgggttctatgctctttctatttaatccttatagttgttaaatttatagattgaagtgtttgcaagtgtaagtaaaaagacactactatgtctaaattgtcaaaattatatacgctgtcttgtcatgtaacatcatattccatttttcggccaagtagcatgttagtgtaagcaaaatcgtttttcatgattgcgtcagtgtattttccgaacatagagctatcaatacatgatccatgcattggaaacaccatatttggatgaagcccagcgagtcttctggttgtttctcgtaccggcttctcgcttgcgaatatacctaccgcgctgtacagtccaatcattgtttctgaaaggtcgtctgacaagaccggtttgttaaatcctggctgcatgaacaaatcagaagtaaagagcgattttgtactttcctcaaaaatcatcatgctatcccagtggtgaacatggggagtcataatgaaccttaatgatttttttcctgttttaaggacttcgccatcccaaaaggaaatatgatccacaggtatgttataccaacctgttagattcagtttggagctgaggtcactacaaaccaatcttgctttaggactctctaggaattgcatcccaccccattcatcgctttcaaaatgaagaaatgcaacatatccaagcttgtctagtggaattatttcttttaccttttcctcaatcttgggatacatacccattgggccagtatgaatcaatattgggatatcatcattaatgagaaactggttaaaagtgatcccataggtatcgaccaaaccgcaaattctgtaaatcccatcggttatttcagagatggaaatatcgatgtcttttggacttaatgttgttttactaatttcaggcatagcctatattgttaaggccacttaaaaaacatgattaatcaacatcatttcaatcttttacttatgatacgcaaaagagtgctaaatcgtatttgatttaaaaattaaatctattatttgtatgtattctgaaaggggttcatgaaacttcacgcaatgccggcatgtcaagtaaaagggatctctcagcataacaatgactataggtttttataattcctgataatttgaaaatataatgataacaaaaataataactgtaaatgcaagtttgcttgtcttttctttttttgtaatatttggagtttcatcccaaggagaagccagtgctgtatcaagcacggttggtgcgggtggaaacggaacagactgggacaaatttaccccacaaaatgtgaccattaataccggcgaaagcgttacatggaccaatcctatgcaagttgcagaaccccacaccgtctcctttgttaaggataaggacatggttcctcctttatttgctccctttagtgttccgaacagtacagaattaactcctgcagtgccagctccaaatgttgaaccatctataatacctgataactcaaatccaaataacaaattggtgatagtagacaacctgaggtcatctgctcccgttgcagtcgacagcactaggacaaatgtaactcaccttcaacccaactcaaactatacctttactggtgatgaaagttatgtcaactctggttggatgtggccaatgggacaagtcccaccgggtgtcccaccaatcacctccttcacattgacctttgaaaatcctggcagttactattacatgtgtgtaattcatccttggatgtcaggtactgttactgtaaactagagatattatcggctccaactccatccaatttttttataatttaagacctccatcaagaccctagtcaaacctgtcttatttaggtgaaacatattcaacaaaatccataagactatcatgaatttaacaaacaaatattttttgagattaactcagtttaccaacggtaattgcagtagaagacagagaattattaacatatttgtagaataaattagtgtactctttcttttacagttgattattttttaaagttgcagtataagaaagattgaaagaaataaattcttaaagttccaattgctttcgtgaaggataaaccatttgattttcatggtgcaaagttcactatcaaggttctcagctccgaaacagactataaatatacagtactagatatatttcacccacctaatttgggtccatcattacatatacatccaaaaggttcagaaactttttacataattgatggagactatcgcttcattttaaatgaaaaatcaatcgaaggtaaaccgggagatacaatctttgttccaaaggaaactccgcatagatttgaggtaggtcctaaaggtggacacgcaattgtaattagtcccccggaacttgagttctattttttcaaagtcagtgaattactagttaaaggacaggtttcctatgaagaagagtcaatcatagggaaaaagtatggtcaggtgtttcttgatcatacaaaacattggagctaattaacctgtcatagcttcatgaattatttgggtatccgtatattgtttgaaatggaagattttgtcatctttaattgtatacaaatgacaaaaaggaacaataaaatttttgccattttgtcacgagcaacaaatcccgacagttcaaagaagaaccgccgagaaatgccggtggtcggcatgatattgttctgcaaaaacctcatgattgattaactctcccgccgtcctcccaatcgatcacacgaagaccataaggaggtagctgattcgccgggattaagttcctagtggtagtagggttctaatgcaaaattactatcaagttatctaaaaacatgatagaataattcacgtatgtttaccacatacatgtgattatttcattaatatctcgtcagataattgatattcttcccttccaagcaagtcctgatgacaatgtgtagtacttcctaggtgattaaagtatggcttagattccacgctccactgcggtactataccatcgtttggcaggtcccaacgccaatacaaataattataatttccaacatttaaccaataatagctgcatgataaggatggatcccaatccccataaatagtatgataatctgtattggtattctctcccgaatgagtaacaggagcacctgtttttagatcaaaaacagctggcttacaaggatcagctaaggcatagaaatcagcaagtgggccacctgcatttggagttccaatcattatcaagtttgccacatcaggggtctgagtattatataaatacagtctcgcatctaaaccccctttagaatgccctacaatattaacttgatcaacctgcattagcgttttgacatcatggataattcgatctaattcgatcgaatgctcctcagaactaccacattcatcataagaaggttgagaatcttcataatattcaaaagttaccgtacaataaggaatgcctgcattttgaagaaaaatttcccaattattccatacacccgagtcttctgcatacccatgtacaagaaccacagggagaaagttattttcagaagttgtttcgctaggtattaccactccattatagcaggacgaactttgagcatttgcaaaattaacaaatgattcattgtgcaatatacccgataatgatagagggatgaaagtcactgtcaataagatagaaaggtatttgttgatcatatcactctgtcaatcctcctatgaattcctacaagcataaaaactctagttatgaatttattagaatccgtattttctcttatttgttgtatattggtgttcatatgcaatatttatcttatacgatgcaatatataaatagattactagaataaactcaaaaaaattgttaactcattctgaaaattaattacgccttcgttaaactttggaaaaaattagcattattcaagaaattcattgatcatataggttttccgtgcaggctacttactttagcaattgaaacctatctaatacatgaatttctattgtttttatattgatatgaatttgtatttgatattttcatatgaacaacttttatgaaaattctatatctatactacataaaaataacaatcttcatatatggaaattagaaccctaatggcagaagaattctataacatctacaaccatggcaaattcttgaccttattatgtatattggtgattggtatgtaaagggtttgacataatacatagtaacagtttgagcgcattgggattaagttcctagtggtagtagggtcctataaaatttagacaattgcccaccatattctttgaagatttaatacttaccctattgaaaaaacttctgttaatagttggatctattaaacaaaataaaagaggaatatgaattatgtgttaataagccccaagaatacaaaaaaagagttgattcaatttccaaccttttaggtttaaggggaaaatacgaattaatttcagatcactgtcctgtttactttgtaggaaactatagtcaatctaacatcatattttttggattgaatcctggtcattctgatgtgaacagtccaattgaggagatggaagcaagaatatcatgggatagatatcaacaactttatcgaaatttctttgcgtattttgaaaagatgggatttgaatcatcatattatacctcattatggtatctgttaacaggattaacgaataatccaatagaacataaaattaataacaagtggaaattttttgattcatacttaacaaatatggagctaataccttatcattctagaggtatagccctacctataatactcaataactatcaacctaattatctatcagaacgactcgatgaaaatattaatttcatcattcatttcgaacccaaattattcatttttaatggaagtacttggtatacccttttaatcagaaatggcattattacagattttgagaaagtttcaataacagatagatttaatctaatttttttagaataaaagacattccttgtgttttgtttgacaagtttattcaaaggcatttttggggaataaccaatgagcatcgaagaattacaatacccactttaattaaggaaaaatacccatcgataatatctaaatgatcgattgatcattccacttatataagtacaaagtattatttctagtttaattattagtaacagtccgcatccgtggggattaagttcctagtggtaatagggttcgattacaacacagtaataatcaattgtaattttattagtttacgatatatgtaaaaatctcgaacaattcgttctgatgccaagctaaaaattctttttgactagtttctactattgcagtgtcgatactgtgaagatcaatcaattacagaaacaaaaccatttgcataaaacaaaaatcataccaggatttttggattaataaatctgttggtatatagtcaatgttgttgactatttatataacaataccattgtattttttggctctgttcagttaaggattttaccatctattcatcttattctatttttacttcaaaaagaggttctgcattaaaaatcccgaattttgagtataaactattaccaaattattgacaaaatcaattttagattcagatctcgtcgttctaaacacttgaattattttcttaagtgaacagagcctatttttttctttgctaacacttaatcctgtattaatttatcttccattggtcaggagacaataactatatcataaaagcataataaacggaccatataacaaccggtgctccacttgctaatgtttacgtcgtactagtaatcctcctactgttgcctctttcaaataggaacattatcattaattttatgattgaggatacaaaacgtgtacaatgaataacgacataaagttattgtgtccaatcggtaggtctaaaaaatcacatattcaaaaaattagctaataagctgacgaagagtttgtattagttgcgagagggttttattatttgaattgacagtaggattatcgctatcagaaatattccctaatattctgttttcattattttcagattggttatttgaaattagattagtactttcctgtgttgtatttactgcatcgagcaggattgaaccatcggtgatttggactggtgcctgtttcacaaacacagttcctttcagattgtcattaattttatcaaagtaatcaaagcgtccaggttgattaaaagtgtacgaaaatttatcaccggtattcatatagtcagaatcaaatagtggaattcccttccctcctgtcgtgatgttactgctgtttcctagagtattattattaacagaagtgattgtgtgaacggatgagtgattgttggtccataccacacgagtattaaaattaacaacaatttcttttggcacaaaatttaccatttcagaggctccgttcttctcagttgtagttgttatccaaatatctattgttttatcattttctgacgactcattctctgaatttaaaagtggtaaattttcctctcctgttgctatagtcaaattaacaggtgcagattggttagaatttacttgactaaacccagtggaatttgaaatagtttggttagtatctattattgtagttgctagtaagggagggataaacggaattaaagtggaatttgaaatagtttggttagtatctattattgactcttctaatccaaatgtagagttagtattatttgtagaaaagggaaacagtaacttgaatgaattaatcatttgctcaataattggcatatatgtatcgaatcgatcttcatgtccaatgtatgcaatataatatgcggtattgtttaccaaaattccagtttcaaagtttttgagcatgataggttgttgaccactttcatcactgagggtttgggtataagtcaaagaataagcaggttggcccgagagagtttctgaagttgaagattcaattaatgtaaagttatttgtagaatctgtgtaagcattgattgcctcttgtaaatactcatttaggtcagcttcatagaaaatgccatcatctctatttatctgcacgtattcaatgtatgtatcattgaaggtttcaaaaggtgatacaagctctgcgatcaggttaattcgatcttcaggagtcaggtctgtttcattcaccgaccaagttgatggatatttcattgttacattgtaatcggaattaaaatattggtacatctgggttgcatgagcaccatttatagtcccctgattctgtcccagaacttgtttctcagaaggatttggtatcaataataaaatcgatggaatcaatattaaacaaattaaatttcgataagtgatcaaaattttccctattgcaactaattgtctctgactgaaaaagctttcgtgtatatttatgaaatgtaactaatcaatattttaatttcttctgtttgacttatgtatactaattatctgagtgtgggtcataattgatcttggtaatttattctagtttcttaatagattaacagcttatcatgtaattgatatctcttcttggattatcgctctttagtacattgtagttataacagactactatttggtacaacaataccgataacagtaagatactccataccttgtccagtcctgttgtaggtactgggattattctaaaggtagattttatgtgctatataagcggttctatgaagatctttctcctagaatataccacctgtcccaaagccgactcataaaaatcaacagctttagcctttccactgatgtattcttgtatctcttaacagggcatacaagctgaaatccccttttgaggctcatgtcatacagattcttcttaccgttgaatccagggtctgcaccacataataaattttttctaatgtttctggttataggcttgatactgtatctggataagcagtttgcatgatacattggccgttgtaacatcagccgaaaggggtgttactctagatgcaggatcagtactacatatcaggtgtagtttgtaaccaaatatccatttcttagtatgactgtatccccatctggcatctgtgtctattcccgaacgaggtaatattacttcattcatcgatgatgcatgccatactttgccttttgattttagaagagcgctatctattgcaaggatgtatggaatgataagaccttcaagaataaacagattccccatagttgatttcctttctattaaattgatagtgatggtctttaaccgtctatcaaatatacgtctacatggcgtgtatattaaagacaaatcacaagccttcattatctttctgttatttggtagctcgatagaaagaaagcgatacgatgacctgtttgaatcaagtctaaaccgtatgcgaactataaagtatcgtaatgtgatactagaagagtatacgtaaggactaccccttcttttttgagatttgacactactacatgaccaaccaatcaatcaatcaatcaatcaatcaatcaatcaatcaatcaatcaatcaatcaatcaatcaatcaatcaatcaatcaatcaatccaataatatacaaaatactaattagaatggatgacgaattacagtatgctagtcttttagttagtatctgtttcaatcaaaatttgatatactataaaactagttttattcgtttggaattatgacccagcctcatatatacagtaaggtatattagcatttacacatttgtaatctcaagatcaacattgttgtttttctttacatacattattttataactaggtggtttttaccggatatgttaatgaaccatcggatctagatagtctgtctagataggcaagctatctttcacgatcaataatatcatcatttgcctctagtaacgtcaagaaatcactattttgcattgtgaatatcataatttggcgtcggtaaactccgttttattgatttatttattggtcttgtaaatttcctccggcagaatcattacaaataatctagaccaattaataattatgcaaagcgttcgtattgcaagagattttcgttaataaataaaaaatactttacgatcacaacactttcaatttctttaaattcttttaaaaaaagtgattgagacttgccaatctcactataccattgctcatactgcttggagtaactgtgtctgaggtcttggttcagagtgaaaaagggtaattatcgtgagtattgtgacagggacgatgttctcctaaaacggtgcttgccccatgaagttgccagcagggctgtagcgacacaccagaatgttgaatggatgaccatccccactgccgataccacaacctacctcctgtgtattcttccataccatctgagtgtaatgaccggttgaagaccaattctccggtgttaatacgccgccgtgccaatccttcttttcgttgacccatagagactgtccctgccctacccccatggacggactaaagcctgcaatattctcacctacacctctaggcgcattggggtcgtgggcaaagttgcctgtcgtagcgagattctgagcccaagtctgagctccagcggcgagtgagttactccacacgagcggcggaactccaacagcagcacgctcttggttgtgcacggtcaggatactgttaaccagatcctccccttgcacatttccaatgttgttgtttacaggaggttgaacatttccggtgttgttgtttacaggaggttgaacatttccggtgttgttgtttacaggaggttgaacatttccggtgttgttgtttacaggaggttgaacatttccggtgttgttgtttacaggaggttgaacatttccggtgttgttgtttacaggaggttgaacatttccggtgttgttgtttacaggaggttgaacatttccggtgttgttgtttacaggaggttgaacatttccggtgttgttgtttacaggaggttgaacatttccggtgttgttgtttacaggaggttgaacatttccggtgttgttgtttacaggaggttgaacatttccggtgttgttatttattccggtgttgttatttattccggtattgttatttattccggtattgttgtttacaggaaattcaccgggaaaaatgggattattttccgtaaatgttgttgataagccagcattatcatcggtagatccgctatctgatgagtcactattatcatcggtagacccattatctgatgagtcactattatcatcggtagacccattatctgatgagtcactattatcatcggtagatccgctatctgatgagtcactattatcatcggtagacccattatctgatgaggagccgtcatcactagtatctgtagacccgctagcatacatgattgctgaagcgggtaaaatcattgaaatcattattaaaaatatcaatgaaatagttattcgattcatagttgccattgaataaccatatatataaagtcaatgttattgttcaaaatagaaaattgtggatgtatcaaaaaacaaagtttctcattcattgtcttgttatgtcttaatttttttggtttggctatattgctagtcccatttttggatttgatcaaagcgtttgcttatgattaggttatagatactatgacgttgtggggataatccagtgagagtggcgtacaacccgggtaatgattacccgaatgttattaacaaagcctcagacatagtctcgatcattggaatcgtgccgcaaccatttgtaggtatattggattttggtaacaacacaaacatagatgttcatcagaattcacgaaataatgttgactgaatattagaaaaaaaatcatagtttttggtttagcaattgtaacaagaaatactattactcttgtctttttgcatagtctcccattcctgtaaagtctaatgaaacacatggttcatctccaactacccatgcgtcatgtcctggtggtattactgctgtatctccgggttctccttcaaattccgtaccatcatccattctgactttcatccttccagagattataactgaagtatgaggagcctgacaactatctgttttcactagtggttttacacactttccccaactccaaccaggttcaaatgttgctctaccaattataacgttgcccaggtttacaatctcaacctttcccttttcaaaggttctcaattcgtcaggtgagtcaaaactttttgctaatatttttgttgttgacattattattatcaaaatagaattacaatactttgattataagcattattccaaatcttatccaaatctattccagattattgaacaggtcaaattatttgcatattaattaatctcctgttaaagcaatgtgtatcaaagtaacatttcccctttagaacaagaatttatgaggtttgataatcacaaaaaaattttagatgttgttgttctcaaaaaaagaaaaagaatgactaagtcctttttgactatcgattattgttgttgaggtttaagctcgacactaccaaatagaactgaaaatgccttacaccatatcaatacattatcatattttgtcaagtcagttccaggtaggatattgtaattttgatttccattattagctttgagttttccaaggttgacaaaatcagatgcactcttatctgttgacaaatagacatatagatctggtccgtttgttaccttgaggttttctaacctaaggacatttgcatcatcttgttgaagtggaatcacttttgcaacgccttcagcattatgaattccatcattaacgccaacaaataatcctgaaatgatagaattattgagtcgcgcagatgtcgacgatgataatgatgaaaaactaacagtttcattcatagcttcatctatgacgttagtatcgttactactactattattattgtctaaattggcatatagaatcatcaattcatttttttgagatgcactcatattttctgcaactttggccctctcgtcttcggtcatagtgttaaattcctcaaaagagactgattcagcagaatttggaggaaatggctcatttacttctgttgatatgaacaacggtgaagctaaatacaccgttaccacagcagctacaataactacagctgtaagagtgacttttttataaaggttcttgtgccctatatctttcatgagaagtagattagaattgaggattataagcgattatccacattatatccacattatatccaaatctggtccagatgcattgaccttttttctcagctaaacattacattacattttattatgcttaattacaaggcttcaaaagagaatcaaaaaatttgtggtaataggtgagcatatatcaattgtgaaaaagaataggaggaggaggaggaggtgttttagccaaaggtaaatgcatagagtttgaatccactgccttctatatcaattactacagatcttggctgatagtcatcatacagaccaatattgtataatcgttgcttgtctactattacactgccctttttgtctaagtcaagagcatgattagtattgtttagattttgatcctctacgggagtgctgatgttattgttttcttcgccgccgctgctgctactaccgttaatatttttgtcgttatccggttcttggactgtagcgttctgtccgtttcctgaagcaacgatgttaattgacttggcgtagtatgtaagaacaattttaccactgtcactaactagctccacattatcattgttatttttccaaattccatccaaatataccaggtttgatataaatgatatattaccactgctactgctactgctaccacttgtattgtttatgtccagcttgtaatttacattcgtgtttggttggaatccttcgctatttcccaatggagatcttgcattttggtacccaagatatatttctggggaaattttttggctaaagtctacatattgaaggctctgcgaagatggtgaggaagatgtgtttgtcaatcttcctttatcaagatcaaatgaaatctcggttctattatccaaagctgctttttctgcaagaagagtctgtattgttttttcggtttcattataacctccttctccgatatggtcatctcgaatgtatccttgagaatctatcaagtagtgtcttggccaatagttattattgtaagcattccaggttttgtgatcactgtcaagagccacagggtatttgattccaaattgttttactgcatcctgaacgttagtaggatttttctcaaaatcaaattctggagagtgaacacctaaaattactaatccatcgtctgagtaccaatcataccattcgttaagatatgggattgttctgatgcagtttatacaagtataggtccaaaagtcaaaaaggacaaccttttctttgagatctgccaattttataggatggccattttcagtattaatataagaagcgattccttgtaattcgggtgcttgtggataaacacttttgtctatattcataaaggcggtcttgtttaactttattgtcagaaagtttccattgttggttgacgattgaatgaccgaatcttctagctgcttttgttgtaaatagctctcagatgggttactgtaaaaattaaaatagataccaaaccctactattagagacatgacagcgactgctgtcaatattgcacttatgttatctttgtttaagtatcgataactttttttactatggctcaaggtttacatcctcctcctgctaacctttatccctagtttccaactaattgtcctacaaaaggaatgttgacaagtaatgataattgattaaagaaaataagtattcctacaactatcaaaatgcttcccattataagattaaaatactttaggtgttttgtaatcttcttgattattccagttgcctgagaaaaaaatgctccagttattagaaaaggaattcctaatcctagcgaatatgcaagtaacagattatatgcggtacctggattggcagctgccaaggtaaaagtgcttcctagtatgggtccaacacagggcgtccagcctgcagcaaacgcaagtccaaatacaaatgaagtaatgtagcttgtcttaaacttgggaattttggtaaattttttttcaatatttagccgagctattttaagagaaagaatgagatttactccaaaggctgctataatgatgcctcctatatacgatagatattgttgaaaatcggttccaatagatgtggccaaaacgctgtttagtattacacttaaaactgaaaatactagagaaaatcctagtacaaaataaatagtgttaataaaaatatttactcgagctttttttgaaataaaaactacttgattacttctactactaccacccttttgattctcgtttacttgattgttaccttgaacattgtaactgtcaccttcattacttgttgcctctcttattgatgcactagaaagataagacaaaaagccaggtataattggtaaaatacatggcgatagaaatgagccaagacctgcaagcgctgaaattagaatgctaatttctatggccaatctataatctcaccaattcttctttttttaaaagacgtgttgttgcggtagcagtagtattcgcaattacaaatgtcaaaacaatacaagccacaaagtttttgtccatagaaacgttagtcataaaaaagcattaatagttatttccagatctattccagatctattccaaatttaaaattcgataacaagatttttgatcggtctagatatccacgagtgttatcattttacggttaaagaaaagatttaccgttaaagaaaagataatgtattataaaatgactggttactgcagctgttctagttgttgttgttgttgttgttgttactactaagcaatttacctattattctagagtaatcttgaggaatacaataaagcccgccatctcagcaatggaaatagccaatagatacggtacaagttggtctgaaaacaacatcgacatggtaatataggaataaacagaaatgatgctgtttatcattagtaagccacaaaaaaagatcaaacctaaggtaaagttggctctgctggttcgatatattttagcaaacgtaaaaaccaaagcactcagtaatcccaaatttaccaaattaatgagtgcgttgattgtccccatccaaacatccattttaactataccacatgtaatttcaaagtaagtatttatttacttatttccatatctgttccatatcctaaactttagttttatttcttttttgatttttgaattttatctattacttctttaaatgcttccatgtttacttctaaataatttgatataaaatacaaaatgccatatttttcaccttcctttgtaattagattatttttttctaatacgtgtatatgatgctgtatagctttgtagtcaatttttatgataccggacaattggttgatattatatggttgctcgattagcaattctacgatggatattctattcatgccgcctcttgaccctgcaaacaagaaccaaaacagtttcttcgcgttagggtcagccattatccatctaattttatgtatccaattaatagataatctagataataagtttgacattacaactatttgattatccagataggttcagaatgatcctcagtcgtagggattaagttcctaatggtggaaggactctataacatctaatgttatattgaattctttgacctgattatgcatattagtgctcaacatatgatgaatttagtatgattcttagtaacagtctgggcgcgtggggatacgattcaaggttgaatagaatcccagcatttaatgaaatgaaatgaaataaaacttggatcagcctctggaggaataggtgcgttaggagtgatccggatcagaatctttaatctgtagttttatggaattgaataaacacaaaaaaataataattctttcttttatttatttacatctaatgtttttaatttctcctctttactccatagtggatcaaaactattccagagtcaaacgtgattgattcaacaagggataatttacgaatctcctttagatccttaaatatggtcttaccattgccaattgcaacaggattgataaacaaataatattcgtcgatcaagttttctttaatcaaagaagaatcaaatgacgcaccaccataaactatgatatcgccaccaccttcttggctctttaactttgtaatttcatctttgagatcgcctgttgctattttagtatttggccactctgatttattgagcgtcttggtaaaaacaatttttggtgtttccatcatttttttagcgaatgcataccaggagtcatgtgatttgttggcaacttctgtccaataggaaataaattcatcagtcatttttcttcccaggagaatggtatcaactggctcaagtaacttgtattcatattccttgattttttcatccccaaaaaagaccatccagtcctgctcattatttggtcctgctatgcaaccatctatggacatatgtacctgtagttttaattttctcattgcttttttgttatcgctcatgtatgtttccctactattttcatttggatgatcccgctgtctcttctgattaatttcgttgactcaaaaaaatattcatgcaaataaggattagtcatgggggatagaacatacagatacctaataagtatacaagggatcgaaagtatattagaattgtattagttccttaattttatttatgctatcattgcattttgatttttttgaaaccccctataattaaattatctctattctctcgaactgtttggttgagaatagtttaatcaaaaacataaagaaaatggttaatcttaatctttttaatgtcataaatactagaattgagtttcaaatagaataactattgttaatcatgacttttagattaagcagattaatattatgatagttttatttgtcggaaattgattaaggagttagctatatagggaaatcagataaactagattgatgacgtccattggattgactggaattgttttcgtatcgctccaattcagtcttccaatctatttcagacatatccatcagcttcaaaaaatcgttaacggattgaggaccaaagccggcaaaatgattgttaaaggctattaatacatcatggatgtttgaattttcattttgcgtttctctaatcttttttacataatcgagcatctcttttcttctgtcctttaccatcttaccaaagtctttttctggtatgcttctatcacctatgaatctgagataaatctgatcggaagttattatcgatggagtttgcagtttgtcccgtatactccaaactaaggaaatgttatcttccttcattaaattgtatacgttatcattaaaccatgaagagtgtcgaacttctaaagaatatctgaatcgtttatctagatatctaaccatggcttgtaaaggaccaaagcctttcttctctgaaagaaaaggtggaagttggattaacaatgttattgttttttcaatcaaaggctctagcgagtagaataatattgaaagaggtttaacgacatcctctaatttcttttcatgagttattactttgggaaatttcaatgaaaatttaaaatcttcaggggttttgtccttccaacctctaactgaagatctagagggaatgtgataataggtagaatcgacctcaacaaatttgaagaatttcgagtaataggataaatagtctttactttccatatcttttggataaaaattatctttccagccttcataactccatccagaacagcctatattgaaagtcaagtttacttaagtaaatagatcaagacagtagaaaaactttcagtgctttcaaaaaacttaggtagagtctatatcagttgaaaatttgcagatattgtgcttgccgttgatcatttctgtatttttaatatgctttctaatcctcgaccatgcttgctttgtttcatagtccacaggtcgaatatctgattctttaagtttcccatactgctcaaattctcgagcaaatgctgattgtattctatttagaacctctagtctatcagttcctacaatcacagattcagtagtatttatcccaaaatcatctaaaatctcttcagtagggatttttattattcctaaatgtatgtctataggaatgggattaaactcataaccatctattgggtctggttgaaataagaatctcggcatggtaaaggtaataaccatactagaatttaataattgcaacattcaaaaagatgagccaaaataatatgtatcatatagatgtagaacagcatccgtggggatatggttcaaggttgaacataatcacatggtgcagtagcataaaactgataaaatgattgattggttttggacggtaagtcacctatgaataatttattcagtattcggtaataatatagaaaaatttgatgatttggttttgatggttatctcagataatagtggagtaaacgcaccgtattttttgaaataagataaaaaatggagcagttattattgttgtcttctgaaccattagtattttcctatgagttggttttattctgttcattgttactactctcatcctcaatattgttttcttcagactgtgcactaaagtcattattctgtacattatcagccacattgtcaccgtccaaagtttcagaagatgacaattgttctgtaaattcctgttgaggaggaacattttcgttaatatcgtttggattctgttgtgttagcggttgagtttgctcaataacaccaggcggtatccgttcgccaaatggaggctttggtggtggcggttgatttgggtcctgctcaaacatctgaacgtaacgttcaccacagttacggagaggagcagggggatcctgcccaccgggaccaacttcacagtcagtacagtaggtaactaaagtcccagcaggattagaaggactccgatttataatatgatcttgacaacatgtaacgataagtgtcccagtccttttacaatttatttgaccagcagcctctgcccaaaaagcatatgtggtgtagtaacttacaaaaactaagaaacatagcaagaagacagaagtatgcctgataaactttgtaaacaagaaattatctattgattgaatgctattaaggatatttattattatgatgacaatagaataagcatagatttcaatctaatattttcattttatggggaaaattttttaaaattttgaaggattggtttttagaaataaagtgattaatgcagtgaaatattcacctggatacatccgtggggatacgattcaaggttgaatataacccgcaaacaaaatattatgaaaataaatgaaaaatttcagtcgggatttctcatcttgacattaagaatggtctaaccatttaagttctcaaggctcttaattcattccaatatttttcaaacaatactccttgcactaagactgtatgttcttcattagaagacgatgcaaatattttcccatcttgttggtgttttgtctgtaatacatgttttccatctgttaagacaaccatttcattgaagcaacaaaggcttttaccatagccatatgttactagattatcttcattttgtagatttaatgctgaaacttgtttcgaaaatgtttcgtcggtttcatcggttaatattttaactgaaactccccttttctgagcggattgaattttaccaatattactccgattcataaataactgatttaatgatctcaaggatgaaaaaattagaggttcttttctactttgttctatcgcgtaatcaagttcatccttgaattcatttaggtcagtaattaacttttgatactttggttgatcattcctatctagttctcttattctaacagaaagtgggatactaatttcccataatttttcaaataaggtaatttgtctttttaccaagtcaggactattactaaataaagtttgatcaggtagatcactatcatgatggaaaatatataccatatatccgagttggtcggctatagccatgtttccacgcaggttatcaacatgacgtagatttggaaatattaaagatcttactctgtcaatattttcaggagtagtttcaacgatcaagtctaatcgaatttcttttttttcaatctgtttctcaacaactctgaatccgtcttgaaaatatttatacgcagaatcaaatattgcaggatcccatactgtttgatgacctctttttatttgtggtaaacctctacggacaaattcaaacatcaaatgaggatctgtgattatatcagttattacggggtttcgcatttttgaggcaagcaattgattaagcgttgattcattcacaaaatcatatagtatcactatttgttaaaaatttcgcagttattgaaaaatcttgtttcctttactgagtattttaaaaaatacgctaatatttacaagatattaaaactttttatggtttcacaacttatttgctattctatttgacttctcgagatgacccacctgaagaaaaaacagaagttatctatggtcctgaaaatattataaaaatcaataatgaattatggtcagaattaagagaatatgcagatatttgtgcagacaaaaatgttccctattcctacactgctattcctcaagttgctgttgcctttcgtaaacttcaagccagaggtattaaggtcagaataattactgagattacaggagataatatccaatactgtaaagaattaatcaaactatgtgaacttagacatttagatgaaataaaagggaattttggaataggagactggatatattatagagcaagtgcgaaatcaactgaatcagcccctcccccacttcttatatgtagcactttaagagcattagcagaacaacaacaatatttttttgatatgctttggagaaaagcaatacccgctaagagaagaataaaagaaatagaagaaggactgaaaagggaatttattgaaacgatccaagatcctagagaaactcttgatttaatccttaaactacttacttcttccactgaagaaatccaattgataatctcaaataatcagacctatcgactatttgaaaatgaaattggattaacaagtttactaaaagaacaactaagagaaggcaatcatatacaggtaataattcacgtagagaaaattacaaaggcacataacactgaagttcgatttaaaaatctttacaatttgcaaggagattatcctagccagttagagatacaacatattaccagtgctgtttacgataggctaaatgttttcatttcagatagggaaactatagtgatcatagaatcaaacaaaactgttaaagaaaatgttgattatgctgacgacctggttgatctattaggattagccacatattcgaatagcgaatcaactgtttcatcatacgctacaatatttgatacactatggatcagatcaggtatatatcaagatcaacaaaataagaatagtccaaaccttatgtgaagtctaaatatactctctctatttgtatatatccgtggggatacggttcaatattgaatagaatctctacctatggtagtgtatgatttattgaaagaatatagacatcataaaacaaatgacaggcataaaacaaatgacaggcataaaacaaatgacaggcataaaacaaatgacaggcataaaacaaatgacaggcataaaagaagatatgatataacacctatagaaaagatgaaattattaagatatctacttatatattcagtttagacttctaaaatctgaaggccaatataataaataatgctatcgcgtggtggataaattaagaacataataaccgaaaaagtatcaaaaaatatgatatgatctctatattccatatttcgtatatgtatgtcgtatttacataggaactacggggactgcatcggttgcattttcggccggtaaggttttatttaatacatcaactgttgaatttgtatttgtttcgttaatcgtagtcataggtagatctgaagttgttggtgtttgtgtttgtatcgaagttgtcagattgcctatacctaatgctgcacctgcaattgcaatggtaattatgaatagggttgaaatactcatgatttactaacatgaatatcatagtatataatacatattcttaatattgaatttctagttgatttgttaacagattaactatttaaatcaattctaaatcattaccatataaagtatcattaagtttgggcgcgtgaggattaaggtccgagtggtaataggtttctaatgcaatttatagatatcacagttttgaactcaaagtagatgaataaaactcaagagctcttctaattgtattatgggtttaactatcgatttacatattaaatgtaatcaggttatcttttagctattctccatatactgtcaaaatagtttataaaaatacttgctatttcactagaagttatcagaatacctgttattgttttccagtccactattagaagcttgttcataagcatatcaatagttcctggtaatggaaaattaacataacgaagttttacatcctttggaatttctttaaaatgcttagagtttttaaagtctatggtaactattcctctttcaaccaatccttttgatttttgatatttgtagaatctagaataaaaaggagacgcattctcatgagcattaggataaggataaaaatatcttagcatatctcctttcttggcatcacttaatagggtcatgtatgctgaacgcaatgacctctctcctacaaatatttcagaagtacttctctttgttgcatagatattcttggtcaaatcattaacgagctgtgtaataccttccttctgtctctttatttcatcttcttttttatgaatatattcatgtagccgtgaaggctccaatgactgaaaatgtttgatattgtcttgtatattgtaacttgccaatccctttagaacaagacggtctaacacattgtaaatcttggattgagatacaccagatatttctacaatttttcctacccttgatggtccaatttgtatcattgctaagaatacttttgcttcaccttgagtcaatcctaaactagttaactgctcaacatagtttttgttcacaatcatgcgatcttggttgtcctcattataacccctaagggggtaagtgatacttatgtattgctcgtagccaattaatgatatgagttctacaattcaattagagccaaaaaaaaccatagtgaagattatggtatctcagaaaagtaaagatactgtgtttaatttttttgaagatgcaaagaatttggagataggaggtgctatcagtaacattatcaaagacatggatgattggtatacgtttaatcatgtagttgcaggcagtgctcgattaaagatcgtagataataacagacaactcggaatactagaccatttatttgaaggtggaggtttatcatggacagtgtatgttaggataatcaataatggttatggtagcaccacgacctggacgtttcttaggcccgatggacttagggacgcacaatttgaagaacaattaaagggatttgatgtcgaagttgaaaagtggaacaaacatttatcaactaatacatcctgaaatgctagtcttctagattgaaggtatggatataataattagcacctgttcttatacttgggatagggtcacggtggtagtagggttctataacctctaatatcaccgagaattatttgatcatactaactatatttgtccttaaatacgcagaattaggtacaattcttagttacagtctaggcgcgtggggattaagtcccttatggtataagggttcggttaaactgccctagtattcctttgttgttcgattaaccctcaaaattgtaattaggtgagactcaacaatatagaagtcagagacaaaatttgtttcagatactgttaatggagtaggttgatttgtggacttgttagctcaatttatcgagacattactttcattaggatttattggtttggttatagtcgttctaagcatcgagcctttacctattaggaggattagaaaatcgtttattcaattctagaagatgaatagaaatattggaaagaaattgcacgagagaagtgtgtgaaaacttaaatctatttgtcaatacgtttttgatttcagcatctaccaaaagacttaatatcttataaccattaaagcaactatcgcagatctacgactgcgagtcatttgttcatgcaaatagtagattaggactgcagttgagaatctctgttcgcagacgatttctcccctaatctattaaatagtccagtctttccatattgttattgaaacaagttaagatatcttccacataaagccataaattttattatcttcagattttcagttaatatgtatatattttgttccaaattaaattatcaagtagtaacgccttgttataatgtaaagatagagcctatcttctaataaaaaaataaaaattttttatgttattttagttaacggccattgttgcattgtctgtcataccagtggaattatccattgtcatggtcatattatccatcggcattgtgctattatccatagtcattgttgcattttcatgactcattgcaaagactgaagtggccattgatcctgctgcaaataaagatgctgctgctacgatacttaaaactacgaatacattgatattgttcatgtatctttagatagatttttctagtataaatatctttgataaatactttatgatattgttaaatttctcatattatcataatttaaatgtcaattattgattttagcacatatctatatattttctaaagtattatttcgtaagcatagatgataaggaatttatcaatagtccttgtttctgtatttttttatgttatttacactttctctatattcaactaaggctttttcacgagatgcgactactccgtccatcgtcaaaaatgatagctggataagtgcagggaaaaatcgaattttttagtttatataaaatagaacaaattgcctccgaagcctccgtacttccgaggtttgaattaatactgaaaatcaatatactacttttcattttcaaaagggctaaccatgattgacttatgatcataactaattgctaatccggacccttggaaccagtagacacattttgattcattacgtataaagagaaaatatgcattttacgatgacttgttgtatagtctacctagaacaataacaaaaagaataagttaatcatataaagagataaataaagatgcttgggcattttgcacaagagatctatttatttgactaatcctttcagaatgctaaactcgtaatacctcgctatttaatgattaatcttcattgaggatctgagataattcacttcaaacttgaaaagtagagagctaagcatttttaccaagaattgtatactgtatataagaattccagttataggtacgatgtttcatatctaaagaagaaggagggatagaatgaggtttcatactgagaaaagaggcattcgtgttctaggaatagctgaaagttttcaaaaaaaacaatacttgttctacgcttgcaggagtggtaatgtgccgtgatttgataattgatggtatggtttttggaaatgtaacgattgaaggaaatgattctacgcaaaacatcctgtctatgtatagatcattaaatagaaacgacatcaattgcataatgcttgatggtctgataataagcatgtacaatataatagatggaaatgagcttgaagaaaataccaatgttccagttattgcaataacattcaatgattcagaaggactggaaggcacaatacgacatcacttttccaatgatttcaatctgaaattagaacaatatcgtaaactaggacgacgagataaaatcctattaaagacgggtaagattctgttcgtaagatactggggaatgagttcgatggaagcatccaccatcgttaattactttacactccaaggttctattccagagccaattagaatagcaaaacttgatgcacgtgcaaatatgcgaagtaaataacttggacttttaatcaccttaatattctcgatgtttatcattcgtcttctgtaagtcatgggtaacagtacaattttacaagaacttatggttaatctaaaaaattaaagatgtctaataatataaagatcaaatgagaaataaacttggtaagatagtttttgtttcatcatcaactatcataacactttttttctgaaaaatgtaacatagagaaaaatgcatccggtgcttccgaacctccggaattgcatgaactaagccggttaagtatgaatgttagtcgacatataacaaaaagagcaagtttttcaaattagaaaaggatttgaaattataactaaaaaccggacccacggaggcttcggatacaatttattttattttgtaagaacaccaaaacactatgtaatttttttaattttatacctcatctctataacggatataaattcatactatagttttaagccctatgttgataagaacctaattattgattcttctatttaataattacatcagtacgatggaaataataacaatattaagaatagataggaaggaggttatagaattatagattcagtagttgaatacgatattgaaaataatggctctgttcacttaataatgtttaattcgctgttatgatagtttacaaatagattaagccaattcttcacatgctttaatttacagttctttagtctacatggaaagtaatcatcgaagcattctttggttctgtccttgatgtactgcatagtacgttctatcagacttttctccaaactagaatgtatgtgatgtcttaactttagaaacttgcaagcctgtggataccatgtacctccatctgttgatactggatgattgccatgaatcttgactagacctgagataaatttctctctgctacaaacatatttctctccttagagatagatagtgtatgaattttcctgttttctgtctggctcaattctaacccataagcaggtgtactctgttcaaactttgattaatgtctcatcaactatgtgtttgtcaattttctttctctttgatgtttttttttgagtttatatctttgtatccagttccatacagattgcaacatggcttctctttatcttgtgtaagaagagcattgctttagaaacgtttccggttgacaacccaagaaagtacaaatacagaccatcgtaaacatattctgaaagcgttctgtttttagtattcacaagagagataggatgttttcaaactatagatatctcgttaaatggagtccatgattctatcctattctcttttatattatcagatagatcatttaactggtgtctagataaaatgtcacgagaaatagaagataaagatactatcaaatcaaagcaacagccaataaaatcaatagagagtattgaaaatgtaatctccagatcaatagagttttctgacgactctatttcttttgaaaggatatcagataatgaaactcatttgaaattaaaaatattattgtccccaataatattaaaagaagtctttaaaaacatcttagagactcatgagtatttaaatgcaaatattgatatcatggatagcaggacattcaaaatcacaatttaatttgacatcattttttctcgcttttgttttgtataacactaactaaaatgactatttttatggatcatttttatttgtcagcaaattcaaactattcaacttgaattggaccagatgatattaacataaggatataaaatcgccataatccaataattgatactcacaaaatgattttaatctcatattcttcggtttgggcgcaaggggtttgaataaggtaggtaaatgggttcaatgaatttaattgaatattgtaattcatttaactgtatatatgaaaataattattttgattttatttcccgaatctataattctaagagattaagaatctaagaatattacagaaaattagtaatgctttaatattttttatagtgagtgaaactatgaataaattcaacaaaataaatccaaaaaacatatttctggcagtaggcatgatggctgttacggctctatttctgacaaatacttcagccttaaacggagtattcgcagtagataatagcggatacggttttcttgattgctcgtatgataatggcacgaataaagagacatgttgtgatggcccaagtgacaacattaaatgcacagagtgtgacgtaaatcttgaaacaggtcaaaaatccaattgtaaagaagtgcctaacgcgctagaagggaaaaatggccgaaacctaggttcagtattggatggcgatatggtattagaaaatgaaccagtaaatcaacctcaacctaaacttcaattacaaggtaaatttccttcatctctagccacctccaaataacatcctctttttttattatggttaggaacgagttcatttaacttattgatgattttaaatattttttatttaatgaaactaacagagttcaagaactgttcacattaaatctcaatatttctaaatattttttaaaaaaaggaaaaatagttcctaagttaaagttgtaaagtttgctgcgatggtaatgttattatttgttgtcaaatttaatagtttgataggactatcattccaaagtattattccgttttacattagcaattcctttgagttgtttggtaaataaatcctgaccaacaacgattttttgtaactcatttgttgtaagtttatcgacactagaaatattttgtatatcctttgtaggagctatgaccacattgtttggtatcttaaaattgccaacaactaatttcagatctggaattatctcaaactagttttaggatttagaaatagctaaatgaatagataatctcgataatgagtcttcttaaattatccttatttcatgtgaaaaacaactctacaaatatcttatagataatttttgtttcatactaacgggtataatgttttttatctttctgcatttccttctttccatacaatgtcgttataacccgcaataacttcttcttcctttgcaaatactaaaagatcgggtgtaatgtctaaccccgttacttttgctcctaatctacgtgcagttattgctgtgttaccgaatctacatgctacatctaatactgaatctgaagatttaatcttgataagcctaactagtttagcagatacaggtgaaagcattctaccaatacttttgtaatcacccgtgctccaaaccattttagtccgaatggtattatccaatagtgatctatcaaataggcctatcaattatactttaattttgattaacttgaatacatccgtggggattaagttcctcgtggaagtggggttctattgcaaaggttcaggtaaaaatcaacaacgatagaaaaaggacatattcttagtggcagggaaattgtagattcttgtacctattttcctactataactgtacaatgataaaaattatatgaaaatatccgttgactaaatgagtggatagcaattatttattgtattcatcatgacgacgaacccagaattgggcattttcatgacctgcctcatctcgacccttgggaaccaggtcaaggtagttgtatgctccattcaatatatctataccccgtgcatatgctgaataagtgtgaaaaatatgaccctcagggtttttataaaatacactgacgcctggcatctctgaaatacctgtgtcctgtatcatgtaattataaaacgcgttcttctttactacttcctcttcagtgaaagacacatgatagtcgaaattaaagtcattattataagaagagacccaactaaaatcccaccccatccgtttttggtattcagctattttgtcatatggtgttctcgatatagcgatcatgttcacatctctttgattcaggtgtataattatattattaaaactatcagcccaaaatgaacagcttggacatcctgcatcccagcttggatcaaacatgaaatgatagactataagttgacttctaccatcgaaaagttctgataatgtttgtttcccgtttgacccatcaaaaacatactctttatcaaccctaacccaaggtaaatctcgtctctgttgactaagttggtcacgtacaacggtaaactctttttctttggttagtaaatctttacgagcttttatccattcatcttgcttaacaatagtatggtctttcgagaggtctttatctttttttccagttctcttttcgtgctcattcatggacattggaaataagtataaccgctgttatttaaatatttaaataactgtacaactaatttattatagtaatggcgccttcggtttggaaagtactatctgaggacagtagaagacaaatattactactgttgagagaacgggatatgtatcctactgagattgccaagtattttgatacaacgttggctgcagtttctactaatctaagaattttaaaggatgctgatttgattcaagaaaccagagaagggcaaaaaaaaagatattcaattaatcctaaaacttcaatggaaataaaggatttttttgataagatgtggggtcatagtctcaatgatcttaaagagtttgtcgaggagacaagtaacaaagaaaggaatcatggaattagaaagaaatgaaagaaaaagattatgatataattaagaaagaaatagtaatcaatgcctcagtagataaagtatattcagctctaattgatcccgagctattaactcagtggtttcccaacatagcgaccatagaaccgtgggctggaggaaaagtattttttagattttcaaaggaggtgacaaaagagaaaaaggatcatgatgttattggaacaattattagtatcatcccaaataaagaactttcttatacttggaactttacaacgaaaccagaatataacaaaaatactattgttacttggaaacttgaacagctagacaatgataaaacgaaaattactttaattcatagcggctttacaaatgtagatagaattcaatatgatgaacataatgagggctggaattggtataccaaaagactcgagaattttgttagagattagataaataaggataagccataaggagtaatcaacctataagaccaagaacacatagcaatctactttcgataaatttgcgatataaattcactagcctgacatattagcacctttagaattagttcatggaatcccaaactagctgggttctataatatctaatatcacagtgaattctttgatcggactaatcttctttgtaattaatgtcgatggttttggtcttatctttagtaacagtctgggtgcgtggagatacgattcaaggttgaatagaatcttacgaaatgcagaaagaaatcggacagatttgttgatgatttggattatgttaaaaaatgttcaaagaattaatttctttcttattcaagtattatcgtcaatttttctttacttcataatggagcaacactgttccagagtcaaacgtgattgattcaacaagggataatttacgaatctcctttagatccttaaatatggtcttaccattgccaatcgcaacaggattgataaacaaataatattcgtcaatcaagttttccttaatcaaagaagaatcaaatgaagcaccaccataaactataatatctccgccaccttcttggctctttaactttttaatttcttcctttaggtcgcctgttgctatttcagtatttggccactctgatttattgagcgtcttggtaaaaacaatttttggtgtttccatcatttttttagcgaatggataccaggagtcatcgggtttttttgcaaaatcagaccaagttgtgataaattcattagtcattttccttcccaggagaatggtatcgactggctgatgcaacttatcttcatattctcggaatttttcatcccagttgaggttcatccagtccatttcattgttgggtcctgcgatacaaccatcaatggacattcctacgtgtagttttaattttctcattgcctttttattatcactcatctatattcaccccagaattcttaatttgaagatcctgttttcttttttaattaattcggttgattcaaaaatatattcttgtaaataaggattagtcatgagtaataggatattagcggtcctaataagtatagatgggatcaaaagtatattaaaaatcctttttggtaaagaattttcttcaaatatttcaggtttctaatccaatttgagtcgccatatctacaagttttgaaaataatgtaatgagtcagatcaaatagacgatagacggacatagagtcatatgtcatccaagttctgtatctctgtgttcgcttgaatatagtcctgaaaacaagtttcaaagtaaatagaatgtggaattaatttgacacgagagtgtggaaataggttcaaattcctctcaagtcataatatcattatcaattaaagtatcattgagcttgggcgcgtggggattagtgctgatattggttccttaaaatagatactaataagttagacaattagaaaaatataaagaatttatcgcgatttcaaatacaatatcatctgtcatcaataattgtagatcatttttacatattcgtaattttttctttattacttggaaatgcttttaaatttgttaaaataatgatggttgtatgaataatatactaatcgtatttggtatgacattgctagttgcgatatttattgcaggatcaatttcatcgggtgtaatggcaaaaccaacaaaaccatcctattggtgcgttccagtaactgatgggtatactgtaaaatgttgtgattatattccagatccagcagatccagagggtttaacaaaatactgtacagtgtgtgctgatactaatcctccaagcaactgtacacctagagaacctggaagagaagattcaaacaatcaagacactagcataccgtctaattctggagtagaagatgatactaacaatgaagatacaagtcctagcatgccacccacttctggagtagaagatgatactaacagtggagagaacactagtccacgtattccaacaaaaggtgatgggcttagcacattagatggtgataaggtcttgtcaccattaccataagaaagagaatttcttatgcaacatatactttgtttgcattgcgagattcatctttgatcacgatcttgtaggataattagataatattgaaaaaccaagtatcattaagtttgggcgcgtggggattaagttcctagtggtaatagggttctaatacattaaaactaatgttaatctttaatatttcactcgaaaataatcaacaatattctgttttctatcatgattcactaatttatataaccttactcttattttttgctatgtctataaaagaaaacaaagttgcagttgtgacgggtagttctagcggaattggatatcaaactgcactcatcttggccaggaatggattttcaacatttgctactatgcgcaatattgagaaatccaaaaacataagggaaatagcaaacaaagaaaaattacagttacaaatcattcagcttgatgttaatgatgattccatagttaagaacacaatagacaaaatagttgaagagggtaagagaatcgatgttctggtaaacaatgcagggtatggcatttttggagctttggaggatttgtccattgaagaaataaaggcacaatttgaaacaaacttttttggggctataagagtaacacaggcagttctacccacaatgagaaatcagaaaggtggtggtacaatagtgaatataagttcagttggaggacaagtaggtgttccgattctatccgcctacaatcgtactaagtttgcattggagggtctaagtgaatcaatgtcatacgaattagaaccttttggaattaaggtaattctaatagaaccgggttttatcaaaaccaacataatgaattccagtgtcttggctaaaaaagccctagatcaaaaatcaccatactattcactgactcaaagaatagaaagctattttcaatcaatggtcaataatccagaatcatcaccaccagaagcagtggcaaaggtcatattagaagcaattaattcagattatacgcaactaagatttacagtgggcaatgatgcttcagctataatccaagcaaaaagaaaaatgtcagattcagattttactaatctgatcaaacaacagctcacgtcaaaatcatgatgataaatttggtcaattaatgaaaattgaaactcaaatcaaatctatttgtcatttctttgatacattttctccataggattaatgaagatatattcaaaaccttaacaacaccttacttccgatttgataacaaaataactctgttagataatgtagtcttcattacaattttacaaccgttgcatgcatctgtagaatatagttccttgcaatggaagtggttggatccatagtaatttgaggatatcacagttttaaacgacaacgacaaactggatttttcttaaacgtgatttgtattcttaatatgctttctaatccttgaccatgcttgtttagttttataatccataggtcgaatatctgattctttaagtttcccataatccataaattctcgagcaaatgctgattgtattctatttaggacctctagtctatcagttcctacaatcacagattccgtagcatttatcccaaaatcatctaaaatctcttcagtagggatttttattatccctaaatgtatgtctataggaatgggattgaattcataaccatctattgggtctggttgaaataagaatcgcggcatggtaaaggtattaacaatactagaatttaataattgaagaatactaaaagatgagccaaataagaaatgcattatatagatataggaaacagcatccgtggggattagtaacaaatttgactattatttagggttcgtataatcgtcgactacaggatctggaagggatcattcaaactggctttatccttgggatacctcgggttactaatcgccaattaataacaacatcattcatatcacaaaacaattttacaggtttgtaatagttaggaatagtggattcagatatctctcctcttctagctctatcattttgaaagaggatatagtttaaaaacgcattttgaaaagtcttaggatcctgtataataaattcgtaaaactgattagccttctcatcgatagtagatccttgtagtttcaaataatctaaaaaaacttccaatcgcttaggatactgtctttttgtttcaggagcctttaatgcataaataaatctaaaatatggagaatttaccatacgggattcgatttcgctatactggaatggctgcaactttattcctacgatatccttcacattgggcctaaaaaaggattcagttatgaagggggcccgtggggattaagttccttgtgctagtggggttcaatgcaatttagtaataagaattaagagtagagcagatttgattaaatgtcaccggagggtttgataatagatatattttacttgtttaatttatgttgtatagaatatatcataattgttaaacatgagcattctatcatctatatgtccaaatttagacgcttaacgaaccacgaaatcctctaacgccatagtaagaacatcaatataataattgactaaagataacaaattattttatttcaaatgcttcagatgcagatataatgcattttattatttaagaactaaaagatatatccataattcatctcggtttaaaaaggtattgtaaatctaaaggctgcaccatgattatattctttatcaatccatatcttaccaccgtgtgcctcgattatatctcgacatattaccaaacctaagccggttccaccgtatttccttgcaaaagcggtgtcgatttgatagaacttgtgaaatagtttatccattttatctgctggaatacccggaccattgtcttctactgaaaatatgagatagtttttaccaggagtttgaacattatatgcttcctttaattcctctacttttaagataatttttccagatttatttggaatgaaatcaagagaattcttaattaaattggatagtacttgttctattcttttctcgtcacaaacaacgttttgtactgttgttgtattaatttctgttactatggtagcctgcttttcttctattccagtttttagatcatttataacgttattaaagagatgcaatattgggacctcttttctgttgaggtttattatgcccatatcaaatttataaatatctagtatattctctacaagcgattccagttttttttcatttctataaattatttgaacagccttcgcttgtttttcgttcaattcaccaatcttttgaggttttaagagcaattcagtataccctttaattggaactaacggtgtccttaattcatggcttatcatagagataaattcattctttgccctgtcattgtcttttaactgtacatttaattttgtcaactggtcggtcatttcagattgttttttaacatctcttttgatagtagataccatagaattaaatgattcagtaagctccgatagttcatttccacctttgtagtcaactgatacctccaaattgcctttttttatctcagaagtagctcttgttagtaaggtaatgggtttaagcaaacggtgtaatataaacaaaatgaaaagaattaatattacaatcaaaatcccaaaaataatctgcaatttgattaattcatcccagttgctttcaactttttgacctatttgggtaactaaagcatccgatgaattaacgagattaaaagcctttgaaataagttcttcttttaaagaattatctaaatgggtgcctactgtttgattaattgctgtgttaattttaatattctctgttgcgaatttatcatagatttggtcatttaatattgttttaaaatctgtccagtgtgaatttactttgttccaactattcaaaaaatcactgggaagcggttttaactgtactgctgaagtaataccaccatcttttaaaaccatgatgttagatgctagttgttgttctgcattactaatgcgagaagtattgtaattctcgagacccatggtagcagaaggagatttactcaaaaattcggatatttcgtaaaggacatttagtgtaagaaaacgatttttacccgctatattaacagtatttcccaacaaggtttgctgtgactgaatatagattaatatactgaaaatggtaataataaaaattatttgaataagcgataacaatccgatttttactattgttttggagagaacgttttttaacaccattttctatagatgcctttacagggatgtagatataaagatataaagatataaagatataaagatatcaatttctctaaaatcttatttcatcatataagaagtctcctccttcatttaccttctttctgatatatttcttaataatagaaccaactacattgtatttcttcattaagaagtatccgaatacctcttcgaatattttcgtagtaggaagataattttaatcacatttatcctgtgaattttgaatatgagaaagtgaaaatttagttaaactgatactcaagttttttattgaccctttaattcactattctattaaattcatattctaaataggttgagcaaaaggatgttgaaatccatctggtttacctatgtaaaaatatcattcattccatgatgtattcgtaggttcattttcgagtaaaattaaatttgaaattgatttattggtattaaaatgagtatagagtctatcaacgtcacctgtgttaaaataatagggtttccataactactaatataacagcgaattctttgatcagattatacatgtttgtgattattatcggtgactttagtatgacgtttagtaacagtctgggcgggtggggatacgatgcaaggttaaatagaaatatatggtagttatctagaactaacttttaatactcaaatttgaaggctcggtacattgttgagtatttctttcagtttgactaatacaaatcgttagaattgtaataaattcacatgcatacacataatcctaattaaagttgtgtgaatcataaagtttggaaattatttaaatattaagtttttttaataagtattgattaccgatgagcgataataaggataatgaagtatattctcaaaattataaatctattgaacactataacctaaatggaatactttacagaattattatatcgggtaatcaaactgagaacaaatactccataattgaaattacttttcctgcgggggaagagtcagaaatacctttacacaaacatggaaacgaagcattggtaatgcatgtgattgaaggcaatttttcctttagatatggaaaagaaactctcgagggaaacaaagataccgtattaaagtttgaaaaagacgtgaatcattcttatagaaaaattggaaaagatcaaggtaaactacttgtaacttacactcctgccggattggaagacttttttagagaattaggaacatccaaaatagaggattcaaaaaaatctatacaatttgatccagttatagttcatctattagagagcaactacaactggagattcatttttgaataagtttgtctttattcttgtgaaataacaacaattgtttttacatatagttaaaaggcatctctattgattaacctggattaatgcattttgataagaaatacaagtgatcggtatctacaatctcattatcagttagaaaaaattcattgtcgattgttgactctctgacaacaacttttactctgtttccatttttatttacatagaaggagaatctttccgaaagaatttaaacaatgaatatctggtctttgaatcccaactgagttataattccactattatccttcacaacacagcttatttcatattctttcacaatatttcaattgcatgtggatagataggaagtaatttttatttttctattatgacatattagttgattccatttgtaaatggtatagggaatcaatgcactcttacattcaattctaaatacttttgaagacaagtgttacaagagggatcagatgaaatagatacaaaacatatcgctgcaattttcatttagtctttatttcgctgataatctcatctaaatacttcctgagttcatcgtcctgagcagagggagaaattcccgtatcattttgcatttgtatttccctttcatatgcttttttcattactatatttctagcatcttcaatatccttttccatttgcgcagttcctatatcctgaacaagttctaacattgattttctaacagtattccttaatgcattatcatgagataatgagattgcggaagaatacaatccaatactaaaaagataggagcacaataatactagtgaatgggcagctactccatatgtttgttgtaaagcagaaatctcatttgcaataccgatcgcgctaattccaatggctgctatagtcaaataatccttgacttttggagatttcaaatctcgagtaattaaataaaaagccaatccaaataataaactgcttgctatagtacctgcccgaaatatcaacctaaaatcgtacttgtaaggaaaatctgctggaagagaaaatattaatccgcttcctataagatatagaactaatggtgcagctaaaattatccagaatttgaaatcaagcttatgagttttcttgtaatagtaaccgagcaaaaaggcagttccaatccaagtcaaaatatatggactgagagaagtaagataaataatttggttatatagtgccaggtttgaatttggtaccaagtaaagagtcgtataatcaggatttactgttttgtacattatagcaccatcatattcatcaaaaaccttgtaaatgaaagaggccataggaattgccccatcaggggaatcttctttaactagttgaacaagtaaaagtttatcaaaagcatctcctgctatagacatcgcaagtgctgtggcggctagaccataaaataatacaacaaaatttcttttgtgtaccttgtaccaagtaaaaaatttgtagctaattattcccatgattgcagcagttgtcaaagaggccattgcattaaaggcgatgacaaagtattcatttccaccacatacggtaaagtattctggacagtttgtgatattattatacaagataaagagcaaaattccaagtaatgagaactgaataacggtaaccattatgtgcattattcgcatcaaaacggaccgttttaagagatccttagtaatatatctagtaaagcccaaaaggattaaagatccaatgccatatccaaaaacggttgtaagtgtaaaaagagcaatctcaccagcgttattcaaataaatgatttggcgggtagctaatagatttaatattattagaacgactataactgctgcagtgattatggttaatttgcgattattaaagagaatttcgtttagttgtagtatttccaaataaatacaaatttctacagtattatataagggtacttaaacatccacccaatttatcagaatagttctgaaagctatacccgaatccattgcttgaaatattatttagtctttatgccattgtcattttattgtctttgtgttgtcaaatgcatcctatcacgatattggactaatataccagtaatgttaaatatccacatcttattataattgcatgtctaaaatagatatagctatgcccaagaaacgaggtggtctataatgtcatcgaacaatttggacagataacgcttgtactttatactcgtgatagacaatgtctccaattgtctatcgtggccaattcttactgtagcatagagttttccatatcggtctttaaacagcttttcaatattgtctaggtttaacgccaaatgtacttgtttttccatggtgatatattcttcttcttcctctgagtcgtttgaaagaagaaatggcaaaaaatctagagcattttagaaaagtaataaaaagtgcttgaatttttaattctttattttttttatttattcaaattatatagatttgtcgataaaaaaaagtaaagtaactaaatattgatgaatttcgatgataaaatatcctttagtcgttaatctgttctacgttggatcatggatatagcagtgttacttgattcgagattattaagtttgggtgcgtggggatacgattcaaggttgaatgcaatcctgtcaacaaaattgatgaataatacactatatggattagtctcagactgtggttgacagtttcaaaacgacgcctctggtgaactcaagtttttattataataatcagtatttacaatatcagagaatatgactacaataaaggtagacaaggatattatcactttgattaatgtattcaccgttgatccgtcaaaacaacaacaactagtagatgctcttgttgaaaccactaagcaagtatggcgtctgcaggatggatacatatcagcaagtattcataagagccaagataggaaaaaggtagtaaattacgtccagtacaaagggaaagaagcatttgataagagactggataatccggaggcaataatccgcatgaataaagtattgtctatagccaaagcagatggtcatttgtatgatgtagtttttacagataaaaaggaataatatcattaccatatacagtagcacttagtttgggcgcgtggggattaagttccttatggtaatagggttctattacaatttgaatagaatagttttgatcaatgagcttgtggggtttagtaataaaatatttcaagtctaatttgcttggttttttcgatgttaagagagatagaaaaattataacattatagaggttacgaaggaaaatgattatctgcttctgatataacaagaatcgcagattatttcaaagaatatctgaaggaattaaaaaggtgatataagaattcaaaaactatgggcctataaaactccttaaccatagtaaactaaagtaaagattacaataaaaataatatcaaaggaaacagatttggtttgtctatcacggtgtaagacgataaaatctccataggaaatgctcgattggcaaaacatcaacttttgaaaatccagattcaattgcatatttcttaaaagtggaagtagtcattgcagctccagtagctacggaatttgcatggttgacggattgtggaagacaaagcaatacactgaaattataatatagtttgccagcaaaatcattcttctcttctaattcgtctttcatactaacatcacctatcaagattgcaccatcaggggaaacaaagtttctcattttttgcaatgcctcaatgggatatggcatatcatgtatagattcaaaagtcatgactaaatcatatttttctttaaagtttactttctcaataagggactggtataaagatattctattttctaatccttcattaagaacattttgtctagcgttatctatagattgagaatctgcatctacagcatctattttagtcaaaggaaaagatttagctaacgaaatactagcccatccgtcgccacaacctacatcaagaactcgtccaccctttgaacttaatttatcagctatatcaggcatagatgaaatccattttgcaacatcatttacaaacattggtctgtttccttcaccttgtgcatatatcatatcaggtccataactagagtaaggaacaccactaccagtcttgaaagattcaagtaacatgtccaatgcagatgataaactcggaatccagtaaataaaaggaattgtatatgcaatattctcacgatcgcataatactactgcatgctcttttggtatagagaacctgtttgttgaggaatcgtgttccaaatattcattaaccgtcatacactctaaccattctcttaagtatcgttcagaataactaatcttttttgacaattcctcagaatttattggacccagttccttgattgttttaaaaaggtcaagcttgtgaccgatatacaaagttagacaacttaaggcagagttagtatcgttcataattcgttctgaaagtttatcaattttttcctgattcattgtataccattctccttcgcacttaaaaggttgagtcagatggatattcatttctcaaaataaaataactatcaaattttcatattcgaatttttaaattactagtatatggggaagattaagttctctagtttcaacaacaatataagttgattctccaaaactatgtatgattaatatttatctctcggtttattttaaatatgtcagttcctgttatagagaaagtatcaaacgaaggtgcagagatctattgcgaacatagaggtaatggtcctactcttttattgatccacggcgctatggaagatgccggattctattcttctgcagcagagattcttgcagatagatttaaggttgtgacttacgataggcgctgcaactcgcgaagctcaggggatcgaaatgctgacatgtcaatagctcagcaggctcgcgatactgcttctatcatcgagatgattggagacggaaaggccattgtagttggtaggagcggaggtgctgttattggtcttgaacttgcagcaactagacccgagctgatcgactcactaatagtgcatgaaccacctttgatcgaacttttacacaaaactgaaactgaaagatggcattcttttgtcaaggaggtatatgaaaaaaatctgaacgaaggatccgatgcagctcagaatgaatttatgaaatctcttgtaaatgtgccttctagtccatatccttcagatctcaatgaaaggctctcaggtaacgtagatttctttttcaagcatgaatttagagcattctttggatatcaacctaaaatcagcacgatcagaaacaacaaagtcaatatagtaacagctactggaattgaaagtaatgatgcatattatgttaaggctacaaaggccttagcttctaaacttggttgtaaccatgtagatttcccgggtcatcatgatgtttgtttctggatgccagaagaatttgctaacgctattcaaagtacactaactcggtatgggcatgccaaaacaacagaataaaaaagatatatggctagtgcatttacctacaaaagtaatatattattcccattctatttcttctatttaatcaataaagaatattaccttgtattttcttgtagtaattaaatgaccgataacaaaaatgatactacaattaatagagtaaatacacaaatgctaaaaaccatgtatgagtctcttcagaaaaatccttctgaaatgacaacagcaacgttttatgtgaaatcgaaatggaatggtggttttggtgttacatccagttccaaaaattttagtcttggtggtaaaaccatggaaagaaatactgaatataaaatagattacgattttccaattcaattttcaggtgaaggaaggggtcccactgtttgtgaggcctgcatgggtagcttagcagcatgtttaacacaaacaattgtagttcatgctacatcaaggggtatccaaattaatagcattaacattgatgtagaaggcgatgttaatttgcgtggttttacaggtattgatacaaatgtaagacctggggctcaacaatttagagtaaatctaaaaatcaatagcagtactgcatcaaaggagcaaataaatgaactatatgaaattggaaaaaagttttcacctgcatttgacacattgactaatggaacttcagttgttatagttggttcttaataaaaatgaacaaattgtggaagcatgatgtgaagttgttgtatgccggtagacatatttgatcaacagcgactaattttcaggtaacagttctcatccgtggggattaagttcctggtggtaaaggggttctaatactaagtaaaagtagaaacaagctattgtgctataaactgataaaatcaatttgttgatttttaactactatgaatattcttgattcttcataatatggaaataactatgctacttcaggtggagtctacaatgtaatttctgtagatgtgtatattccagggtgtccgcctaaaccagaagcactgatctatggaatatggtgctccatgaataaaacaagagggtaaatttgcctcaatctagatatttataaatgccaatcaacaatcagtaatcagttcggactactattaatcttcatctcatggttgttgtctagattattatacaagactcaaaggacgctctataagatcaatcacatccctgattggctgttgacgtagttttggacatgattattgaatgtgatgtcaaaatgatcgttaccccgtcacacttacataagttgtttgatccgctcttatttgttgtcagtaaaaactacttcatataaatgaccatctgctctggccatcgacaatactttattcatttggattatagcctgtgggtcatctagtcttttatcaaaggcctgtctacctttccactgcacataatttacaacctttttaccatctacacttttatgaatacttgcagagataaatccatcttgaagatgccatacgcgtctgatagtctctataagagtattaacaagttcttgctgtttggatgggtctacagtaaatacattgattaaggtgacaatgtctttatttatttcaatagttgttgtcattgtgatgttaaattgaaataacaggagtagaataaaaataagatcgtaacatattgtttgctttcttaaaggagcatattgattctttttggtctccaagctgaaaatctataataccctttggatgataatatgacgctacattctcttgttttaggtcacgcattttgtctatctttttcaacgctatatcaattgcatgtttcgcatcgcctgttctgtttacaatagacaaaacatgggcaagattgttccatacatcagaatcattattattaatatctaaagcttttcggtagcatactatagctttgtcatattgtttaagactaaagtaaccattgccctgagataatgtaattgtgatgatatcattactgcccttagatatttttaaagcatcttcataatttttgaaagcgttttcaaaatgtcctgctcttcgattggcatcgcctaatcgacggactacatcgatttcttttacatcttaagctgtgtttttgcatccaatattttctcgaaaatgccaatcgccttctcatgatttttgagaagttcgtcttcatcgagtcttctacaatggtcgtctttctcataatatagaaaacataggccaagataaaacagagagtccatataatattgatcactttgaactagtttagacaatagcaatttggcttcagcgtacacaccatcttttgttaattgttttcctttctcatagatattgtgtgctccccctatatcatcgtgtgcccgtggggattagtgctgatatcggtattataagcaggattctattaatggataagagaatgttcgatttaaagattatgtgatacatcattgtgatattagtttactgaatatgttttatttttgtattaactcaaaaaactaagaatatcacaccaataaaatatagatgattttttatcttttgtggtccgttgaatgttcatctttagagaaaggaagattaaaacacaaagagatattttagattaaagaatggattatggtaattacagactcggactacacactgttcgtttaactaattcttttatatttacaactaatgctatagtaatagaggtttgtattggtagtagaagaggcatatatttttattgttcataaagcagatctgtcaaagtatcccaagaccgaagagaatttattcggactaaagagtcgttctggtctacatcaaacctattctggagtatataattttgaaacaattactaaaataataggtggatataaacccctaaggattgtggtttattgtaatgaaatgcatgcatctacaattgtaaaaattatttttactttgcaaatgagaagttatcgattacgtatacataaagttatgatcaactttgacagatctactacactaagaactatgatcctgcgattttggttatcgttataggaatagctatttaattctaaaaatcaatgaagattgttttcgtaaggaaaactccaatccttacgcatagagttgttgaagtgcagcgaacctgaggtttgtagcttgaggagatggagtgatcatttttggctacaaaggacatcaaatattggttaataaattttgaatcaaagacatgcataatagaccgtaaatctaaaaaatgctaaaataagtcaaactaagcttaggcatgaatttacgttcagcggacgtagctcatattattaatggtcaattaacagttctgctttcaacctttgctaggaatcccaaagctaaatgtacatcctccttcagatttattatttatagcccaaattcttccgttatgagcttctacaattctcctacacaaaaaaagaccaatacccgcaccgtagtatgaatcagaagaaaatttggtaaataaccttgataacaattctggtcttagtgcttcaccattgtcagctacgctaagaacaactatctttttggaatgcacggttttatgactcaaagttaaggatattcttcctttgtttcttgtgtaccgtattgaattatctatcagattttgtatcacctgagaaatcctgaacttgtcagcgtaaactacatatccattttcaaagtctttatattcgaatgtgattgatttattgtattctatatgggttacataatctgctacgattgactttaccaagtcattcagattaaattcttccttgttcaaatacataatatttccttcaagacgggtgatgtctaggatattttcggataacctttgtagttttctcgcattagacataactaaatgcaatataaaatgctgatcactatttttgatatctttacttagtacttctgtaaatcccaagattgattgtaatggcgtgcataattcatgagctactaaacccataaaccgaatttgcatcttatcatgggatttgagttttttatgtgcctccttaagcctgctatggacttcagattggctccaaagactattaaaaatagatgatatggtctctgaagttttgttaccttcaataaatatcgctttgcctaatgcttctgtgaatttgagttggtcgtcatcctttacttcccaaataactgtattatctttatcaaatacaaggatccgattaaacgcagccatggtctgttctaaatccttaaaagctatattttgatactttgccttaattttatttatttcagaaatgttttcttcgtctcgcaatgtcaatactctaattttaattcctttgttacctagcctgtttagcatattgaagcctccagatatttctgtgcggaaaaatccgtttgtagatgggagtatgatcaggatctggtgtttcgcaaggacaaaaagctcaaaaagcctatggagtgattcatttgaatcataaactatatcaatactgtcatctactcttctttctatttctttaattctttcttcagcatccattgccgaattccagagtttctcaaaaatcatattataaaatgtcaagtttgctcgatcatcgtttagtaacatattatcaaggatcattttatcttcttcatttctttcaatggtgcatgcaaagtatttgtcagatatggcaaaatcaaatggaggtcggtcaacacaatgacgaatctctatgcctcgttgaaccaggtctcttaccaatctcaaatcatttttagttctgattgatgtaagccatctaatccctttatgcttgttaagtttatgcttatttagaatttcttcaaactgattagaataattgtgatatcctaaaagcattcctccaatcgatgaataaatataaacaaactcagaattattcaaaaaatgaactatttgatctgagaatctctgcatctaccttaaacctgagtgctggaggcaatattttatattcatcgtctgaatgactagatgtctctaaaaatgaaattgaattacgaaataaggtatcaaatgatttctttactgcagaccagacaatagggttattagtactaaatgactcttgtacttcaggattaacagaacaattacccaaaaagaaatattctgaatcagatattgctgatattccttcaataccttctaaatattttaattctgaaactataccggaaagaagcttgtaatcttgagtgctctttagaggagcttgaagtatacatcttattctaacgttcttttctaataaagccttacaactaacaatgaagctagtataattgataaggaaaggtaacctttcattactgatggagatatctaaactcctctttacattcttaacaaggtctaataaacgagcggaagcattttcatcatcttggaaatattcgacagtttcactcatgtatctgacttatcgatcttttggtaaaggaagtatatatagatgacattatactttggttaaaccctttgatcagaattttccaatataattgctatccgaagggttaaaaaacaattctaatagttaagaataattttattgccattattaaattggctatataatggtcagtcacaggttatcgtagcatcctgatggaatgtttttgatatcagatctcgatgaatatttcttttattgaactatgtctatggccaatttttaatatttatggattattacaacagtaaaagaggtttattttggagacatgataatatttggacatattttgtgttgtaataaaatagaagaaccaaaatagatccaattacgttttttgtcaacagtattcatttgtgagttgccagttgatttagggatcaggattatgtttgatagtggattaagtcaaggaatttaaactacagtatagggtctaagagaaatatatggtaaaaacaacatgataggcacaatcagtatgccagagatggaagaaacggtattgttggttctacatacggtcccaatgtcattagattggccggccactgtattttaaatccgcgttcaagtaaccatgtcacaatttctctatttcttgctggcacaaaaaaacctggtcctgtaatagcagatgatcccgcaattagtgccttgagattctcatttgaggaagcgacagaatggccaaagagtcccaaaccggcagaatatccatgaatttttcctcctcgctctatttctattgcaacgccttggctcattgcttgacgtaactcaccttctctcgtgaatccatgagcctgaatagaaagtttgttacattccataatatctttatccgtctcaactttgtgcaactccaaaccttttatattttgattttcgtctatcgcatttccttgcattaaaaatagcggctctcgtagagtaaagcctgattttgtatatagtacaaaggaacggatatggcttggtgattgtactaacctaacttggttacaactttgactgtaagcgtgagagattgctgcatccattaatactcgaccaatgccgccttctgcagaaggatctacagttagcggtccaataaccgctataggtgagggaggaaatctatgaaggaaaatactaccaagaatctgtgtgtctttttcagccaggaaaccccatgagttaggattatttaggagcatctcaagtaatcctattgaatatttctcagatggttgttcagatggaaatccaggagcagatgaaactgttttatgagccttaaacccaatttttccacaggtctctgaatctgctttttcaattgatctgacccttactgacatgataaatggctttatgtagtggttattaatatttttgaaactacattccatcctacctttgttttatccacgagtttgtaagaaaattcctccctagggatgtagtgatatgagacaaggttgaatattacctttaacactgttaatgaaaatctaaaatattgatcaataccgacgatataatacccttagtcattcatttgttctgcgttggatcatggaatgtaatatggttaccatcctaaataccattgggtttgggcgcatggggacacgattcaatgtggaataaaatctatctgatatatgaggtggttaatacagtcttgccttgataaaaaaaataagaattcatcctaaattcgaaagggatcatcattaaaatgcgtattagaatagagcaaatgaatgtactctttataataagatcccaagattattggtgatctaatccgttaatttgtacattttgtgttgattcagctaagtatacttttgttcccttatctgtttttataatccaagaattaatactattaatcatgagcaaatctaatttaacagacgcaggtgttgtttcacatattgtctacagagtacccaaaaagaatcatgatgcaatgttacggatctgcaaagaggcttataatatgttcaagcaatacggtattctccactatgacgcctttaagcttagcaacacagacgtaccaatggaagggtttgctaatgttgcaagcatcgtttctgccaatctagatgaggaagtttggattgaatcaatttattataaagatcgccaacacatgaatgaagtaatggcaaagatggaaaaggacgaaaaagctggccaaatgatgaaacaatcaatggatctattgcctccgggtgctaagttcatcgtcggtgattttgaacgtctaagtgtctagatatgcggtagtcgggtagtaactttccttttgaaaatctagttactaattggatacgttagagttatacattttcttttgtataccggatctcttgcgtaattaatccaaacagctttattggtcaccttgattcattgaccagtttctgataactcgcaaaaattagaagttatttttcaagttcaccatctttgtctcgtttatatctcttaacgaaagtcatggaatgctctccctctgccaatcatattatcagtaccacataaggtatcagtaagtttgggcgcgtggggattcgtgctgatatcggtattttaaataggattctaaagttagttgtagcatggtatacttaaacatttaataaataaatcgaaattgtagataagaacagaatcacattttgttgatccttcctctatctaactaggagcaattctctcaacgtctctacttaacagtcaaggcttagacattttaccaaaatcccatgtagagaaaaactttggtgctatttcaattatgataccttctccgcttttagagcgttcactaatagtctttgccattggattatcgagtgtacccaaatatttgatgataatcttatcagatattgatatgactgtttgaacatcgtcggaaatagttgctacacctttaccttttacacctttatatggactgttaccatcttcgatacagaaatagatggtaggtctttctctgacattttgactcttattagtctttttgcccgtcatgatgaataatttttcgtcatttttatcgtagtagaaccataccggttgaatgttaggatctcctttattatcaacggtagcgaactgtaaattcaatttactttcaaggaagcgctcagcctcttccatagtcatgctgggaatctcaggacttgctttaaggatcttcatatgatttgaaatccttctagtcgaataaaaatatggtaggtttgagtaattatattaatcatgaactttttactctacagactaactgacctatttgatgagcaacaatatattatcacgtcagatcattctatgctgatttataatagaaaaccaatcaaattagtcttggtgcatagagttatgatttaagtttgaatagaatctcagttttgagaacatcaataattcagatgataaaatggttatatagctgtcaccttatgatttcattatacaatcatgataatgtatcttgaccgcaaaaatgcgtataagttgtattcgattataaatcaaacggcagtgttagaaaaacaagtgatgatagagatatgagcaatattgtacttttctcatcagattatgtaaaaatagtatgtgactataagtcaattttaagttctgactacaatagtgtgaagcaatagagatgaatcttaaagttgcgtctagtttcaccatagctttgacattagccatgatgctatctcctaacccagtcatgattatgccatctattatctttgctagtccatcagatggagatggtggtggtagttcagatgatggtggtggtagttcagatgatggtggtggtagttcagatgatggtggtggtagttcagatgggaatgatggttcaacagaaactgaaccgtcagaagtagaatcagaaactgaaatatcggaagaagaaactgagccccaacttgtaaattgtcccgatggtagccaggcagctacaacagaagaatgtccaacaacatcgacagcaccaacagaacttgtaaattgtcccgatggtagccaggcagctacaacagaagaatgcagtaccggaactggtacaagtacaacaccaacaacaacaccacaagaatttccaaatgttctgtggagagattatttctatactaatcctgtttgccaagctaatcccaacgatcctgcctgtaaatcatcatttaatactggtacaaccctaggagcaccatctggttccgtccctgctgatacgggatccgagaagaaccccatttgtacaacttctccagaagctccattttgtaaatcacaaacaactacgggtacaactactgatgtaccacccgcatctttacttttaccatattttgaagtagatttagataaagatgaaacaacacttttctcagtcaataatcctgcttgccaatctaatcccaacgatcctgcttgtaaatcatctacaactactggtacaaccacatcatcgggagcaccatctggctcccttcctactgatttcgcttcgcgttatgtttgtcagtctcctaccgatcctgcttgtaaatcatctacaactactggtacaaccacatttgaagaaactcaaaaggaagctgactcacgtttcagcgttgattttggtcctgtttgccaacctaattccaccgatcctgcctgtaaatcatcaactactactggtacaacaacaacgggagcaccatctggtacaacaacagaactaacgacaccaacaggccaaataggtggcaccacatctacaggagaaccactaacttttcctaaaggacctgatggaaaatgtccaactggaactgctgaaacaagcgtaggtgtatgtgtaggtccaggtaatacccagactacaaatacattaccagggggaccaacaacgtcaacagcgccaaaagaagtagaagtacctagaaatgctgatggaacatgcccaccaggatctcatatcgtaggatttggtggaaagacaggggctcctagcggttctaaatgtatagcagataacccacctagccaaacaccagcgccaaaagaagtagaagtacctagaaatgctgatggaacatgcccaccaggatctcatatcggagggtctaataaaatctctcctcttggtataaagtgcatttctgataacccacctagccaaacaccagcgccaaaagaagtagaggtacctagaaatgctgatggaacatgcccaccaggatctcatatcgtaggatttggtggaaagacaggggctcctagcggttctaaatgtatagcagataacccacctagtaaaacaactacaacaccagctcaaactacaacaccagctcaaactacaacaccagctcaaactacaacaccagctcaaactacaacaccagctcaaactacaaagacagtcattgttactaaaacaaatattaacaatgatcaagtcactgtgagaaatgatggaggattgatagtacaaaagctggacggagcagtaacatccacgtcagattgtcccccacagtcggcaaatattgtcttgggtccatctccaatggaaaatgggaaagcccgaatacttgcagcatttgatccatgtattcttactagcgggaaagtattactcaatttaccagacgaaaaaggaattcaactcgtaggatctaaaatacaagatgggcaaacaacgcaatccgcaataatcccaatacagagaatagcacctactgctcccggtcaagcacaatatttcatagacctgactgaacaatctacaggtttagatctagtaagtggaaatcctgtgaatcttggtggtggcaatgtcaatgcattactcctactgaatctaggcggagagaatgttcaacttggtgcagacaacaaagtaaatatggatgcagctctcacaaaggctgctataccaacaacagcaacacaatcacagacactagcgtcacaaccacctacacctgcaggtggaggttagatatctagatagtcttgttgtacattgataacttcaatttttttagcaatggtagtataaacaagataatgtaaccaagatctactatttctaaaaacaaatcgattattttagaagacctttaagagatatttactccttatttgaaccgtagtattaccaaataagatatcaatgagtttgggcgcgtggggattaaggtccctgtggtaccagggttctaatacaaacgggaaatttttctatccttaagagatcgtttatctagaaaaatgataaatgcacctacgagagtcgatccagccaatgcaatgaggatattagcccaaactggaagatccagaaacagaaaatagcaggacatcattaaaaactaaaatataataaaaaagattttgaagagaatgaaaaataatctcttacgatagtattttaagtttgactgttcaaaaagttatcaaaagcggcgatatatagggcagcagttccgttattatattggtcaaaaattgttagtacatttgaatatgatgttccattaattgtaatcggcaaggtattccaaccgctatatgatacaacattgggtagagtttcaatactttcaacagtaacaaattgactaatttcatttactctttcaacggtactgttacttcccattgggactctaaatgaaaatgaaggatagatttgtgtgtctgagacagatacttcatttgatcccgaattagttaaatcaagccaataagttttgaatttcccatcatcgttgacctcgtatgtaacagaagtatatacgggtgaatatgctttaccactgtatgatattccttctgggtcttctaccaaatctagaatcaatctggcagatggtttgggataaatctcatctcctgcattgtattggatatgtgtcgagttctcaaacggatattccataggtatgatttgcgcatagacaatattatttaaaagaaaggatttgtctaaatcgattgacgtattactaaacactaagaaaagcaaacaaattgacatagcagtagaaaaaactgcaattgaaactctgttacgatgctggctgaatggtctctcgtccatacattatagttaaatcacttttaaaaaaggttatccaaagaaaaagttctatcagattatctagaccaaaagttttggtgacggcaatcctcctaatatatttcaacaaagaatattcaagagtccatactcacaatatatgatactcactgatagaatgagtttatacctttagcatattaagtgttaatccgatttctttataatgaattcatgattaatatataattgactattaagattttcatctctgctaaatagtagacaaaatagacattactgttacaaatttagaaaaaagtataaaggtaaatcaggatatgagaacatgtactcggtggctaaacatatgtacatggataatggagaagtagatacaatcggctttgcaattgataaaaataatcttcgggtattgagggttaagattgatacgatgttgatagatgatgataaaccaaatattaagaaaaaattaaacaaataatactgtcgtaacatttttccattgaatcaaaaagttataaagctttgtctactaatagcttctaactcattgtgattaaatttcgaataactctgagtttggactcgtggggatatggttcaaggttgaatagagtctgtcattatcgaaatttgataaatagttgattagatctcaaacaagaatgtggatttgctattgcatattacggagcacataatttcagtattgatttaaccacagaaacagatgtcttgatgattttaggaataagaagacagcatagagaagaaaagattatgcactattaatgactatgtgtcataatagtttatttgacaagtattttttggctttttctaatgcctttttttcattttcaggtaaaggtttatgatttatcatttctttaaattccaaggcgttcaccagtgctttaccaccataatgattattaaaatatacaaaaatggtatctgttttttgattcatttttccaattttttcaacccaaggttttagttcttcttgagagtataggtagttataccaatagtggccttgagttgtatttctaccatggagtcggactacgctagttgatctagaagttatattattttcattagatagaaactccaaattttctttcgcaggagaatcagttaaaacggaggcaatgtcataatgttgaagtaattctaatacaccttcggtattccatgatttgtgtctaaattcaattgcaaacttgccatcactttgcatatcagaattattcatcaatatcttaagaaattcttctagttttttagattcggtaattgtaaaacttgggggtaattggataattattgcacctagtttattggaattttttaggggagatattttgtcaaggaatgtcttcaaatcagtcattacatctttatttatgtctaatctcttgtcatgtgttattatctctggaactttaactgagattttaaagtctggaggcgttgtcctggcaattccaacaaataagccctgagtcatatgttgatagaatctattgtaaaaggtagcatccatttcaactgtgttgaagaattgtgaatagtatgcgagttttcgtgtctttttgtcaggataaaatacatttagccagcctcctttttcagatgaatcaccataattccaacccgaacaccctatgaataatttgggacacatttgctagatcctgtgattaatagaaaatgataaaaaagatttacgaagttagatagaataattgtgttttcattttctctttacttcatagtggagcagaactattccagagtcaaatgccatcgattcaataagagatagattgcgaatctcttttaggtccttaaaaatggtctttccattcccaattgctacaggattaacaaacaaataaaattcgtctatcaagttttctttaatcaaggaagaatcgaatgaggcaccgccataaactatgatatctttgccctcttggtcctttaactttgtaatttctttctttagatcacctgttgctattttagtatttggccactctgatttagttagtgtcttagtaaaaacaatttttggtgtttccatcatttttttagcaaatatatattcttggtcttcaggtttgttcaaaacattagaccaataagatataaattcattagtcatttttctacccagcagaatggtgtcaactggcccgtgtatcttgtttacatattctttgagtttttcatcccaatcccagaccatccagtccatttcattatttggtcctgctatgcaaccatcaatggacatttgtatctgtagttttaattttctcattgcctttttgttatcattcatctattctatctcctccagtcatctaatgatcctgattacttcttgcattcttgcttaatttcatcgactcaaaaaaacgttgttgaaaattagaattagtcatgagtaataggacattaagggtcctaataagtatgcaagggatcgaaagtatattgtaagcatataatattagtttcctaaatgcaaatacttcgatgatacaaaatgcattgatttgtaatctctagtaagttaaaaagaatacaatatccctaatctatctgtaatattttctctacggttgaacatatccgtgaggatacagttcgacgtttaatacaatttaaaattagtttgacatgagcatctagagaagggttcaaaccctagagaataatatcattaccatgtaaagtatcatttagtttgggcgcgtggggatatggttcaaggttgaatagagtctcaacatattactcggagaggtctcaagtttacaatttattatgcaatcatatgcaaaatttattaactaaatttgataatacaaattctatacaatccttaactttgatctcttaaactctagatcatgcattatgattctagaattatacatgttaaaatggtaataactttagtaaatatttagaatgggtataacaatcactttattcttttgcaaaataatgtgtcagtaaaacaacctatgccgaccaagaacctaggctggataatctattcagtattgaattaaaaacgttgaaaccaccgcgatttaatccttcatttatttaacatgttatataaccttcatataacaagagttgcttctgaatttctttagtatcaatattgtatttccgagagataccctcctgttcaattaaaaaattcttataaacctgtacggtctctaataaaaaataaagaatttttcatgtcacctttgctactcatattaccattcatttctaaagatcatataaataattcatctatgaaaaatattgatttatgaatcacaagtccaggattattttaataggtaacgaataaggtagttcatgatacgatttttaacaatttctccgctgatgttatgcaccaataacccttatcaataacaatcgactatatttcattatgtctaattcaaatattagaatatgttgtcctgcaatggaaaccatgattaatgatcagaccatcacaatcagcaatatgagcaatttaccctggatcaagatattacaacacaatggcacagaagaaataggtgagaatcctgtccgctttaattataataatataagattttgtcccttttgtggaagtgaaattggattgaatagatagtaattgaatgttagaaatagatgactactcatgtatgtagtaatttattaatttcggcctgttaacataagtatgcttttacagtgttccatatgtcataaaggccttaattccaactatattcgagttggcgccaaagagtccttcaagtagggttgtactgtatcgcttgcgatatctactattcacctaaccaaacaaaacagtatactgtattgcaaaaagagtatactactcaaaccggcccgtgggatacgattaaaagtatttccatactaattagtaacccttcatcatcttaaatttataagggtatcctaaaattcatttttaatatctcattgtgacttgctttagatatactgtttacatgaaccatttttccaaagatacagaggaactcgatagaaaaaattagtctgtcatgattcttattgaggatttatctagatgaagtaaaaaagctagagacatctatcaccaacaccgaaaggctcgcttgggaattccaaaactattccacttagtttctcccattgaaaacaaaaatacaagtggatcgaaaaaggtgaaagcagtgaaggcggtgaatggtccaataagggagcaatatgaaaattgaagagatgaattatctgatgatttttgccaattgttctattataatgcaactaaaaaactgattaatgacttaaaccaagtctaataaatgatgataatcctaccatgaattaatgtgtattattttttctatgggatctcttggtgcaggtttaaagtctgttcccttatagtatgctacaggaagcaatgccacttgcataactttttcatatgggatctttaataattcagcagcctctttttcaaacaaaaggtgaaaactagtccaagttgttcccaacccgtgtaacctggcagcaagtataaaattccaaactgcaggagcaatggatccccatatagcactttggactaccactgaaacatttgatccgtcggttctgccttcgatacagggaataacaaatacagggacatttcttaaattgtctaccaaatatttagcagattcatatattttcctctgagtttcactcttctttgggtcatcagaacttgtagaattggcaacagaagtcggtgaatttatgtaggattgccatccctttctaaagagatcagataatgaattctttattgattgatcagtgataatcataaagtgccagttctgtctattagaagcagtaggagcctgctgcgctatttctatgcattttttaactaattcaatttccacaggtttttcaagatcaagtctctttcttacagctcttgtagttgtaagtagttcttcaggagttaatgaagtcatacttatgaccctaaatcttgatttataagattaatgaaaattccgatatacgtataatttattctaatggaattaaaacattgatccatctaaacatgcagacatactggaaatttgaaaatagttattcatatactgactagagaaagaccaaactttcttggattgtctataaaagaaatgaaattacaaaatcaagatcacatctcaaatcgatcatttagtttgggcgcctgtggggattcgtgccgatatcggttctttaaaagagattctcatgttgtttatggtattcatctatttaaaattatctaagtttcataatatttgaactagggacagcttattgaatgcactttattaattgttactatttaggtaaatgtgcatcaatatcattattacgattcgaattgtcatcattattatttaattagctatatatgatttaatcatgaaaatttcaaagaaagggtcaaaggttccaagtgatccagcaatgccacctcaaactgaagagtcaaatagtaaagtagagaagcctagtgacaataaggctaaatggacataccggttcttgattgtttccattattcagggagcaatagccacttttcttaccattttacttgccgctttcataataacgacaccatatgcaaaacatttggtttcaatctttttagataatgcttcaacaggctttatggaaataactgcactggctgggctaggagtgtactttttaataggagtaataggtaatggggtttcatcttttatctaccactatttagaaattcatcttaaaagaagttttaacgggctattaggtattttgccatggtgtcatataataataacaaacataggaattacatcagttagttttctcatgatttatgcagggtacataggtgataccgcaatgttcccaacaaacattggaggttttggcatgacttcagaacaagtctcgcaaaatatactaaaccattttattattcccattggcgttctgctgatagtgaccaccactggtgcaatctgtggagggattggattcatcagtgcatttatcaaaagatagtgcatagagcaatccatttaattcaatcgcaattcattatgagttctttaacttataacgtgtaatagattttagtgttattataaaaactgaatttaatgtaggtttgtatctatgtgtttttcgcttattatcttaaggttacagaatatgtatttaacagaattgtgaaaaaagttaaagtaagatatagatgctttctagcgatctctatcaggatctttaagccatgtatgaagatctgctaacacatagtcttggattggacccagcagctcatttggaccttgttgaggaaagaatgtgtgtccaagacctggatatgttttgagagtatgatcagcatgtctaatctcggttagtttttgctcaaggacaaaggcctgctccaaagtggtttgaacgtcctcctccccttgcattatcagtatgtctttgtgagtaaggttacctgttatattgaccgtaggatttatctccttatgggatatataccaaggatcagagtctatctgtgaaagaagcatttgtacaaatggaaccatttcattttctatatctataaagttatcattattgatatcaatgcctgggtaccattgctgtggttttgtatatgaaaaatttagattcttataactagagagatttgacccgctaatgttgttgtcgttattatcagaattattggtgcttggatcaggtattgttaactgcgtatcggggaaaataattacctcctctatagacaatagaccatctttatcggcgtcccacaaattgtgagcgtcaaataacttttggtttgctttttggacaacgaggtcatatagtgtttgtgcactcgcaccaagcattataacgttctttatactatcgccatattcgccaaatatggccagtctaggagcaacgactgcaccttcactatggcctaatacagtgatgttagttttgtctacttccggttgttgcaataacaccttaagtgcagattctgcgtcccgctgtagcgtatgaaccgtggcgtttccaagcaaggacgcattgataaccgtggcgttttctcctactcctctcttatcatatttcaacacgacaaaaccgcgctcagcaaggtattctgcaatttgccaaaacggctttgatcctccatctactctcgaaacctctgggggtagatactcgttccgatccgctattcctgaaccaggaattaacaaaacagcaggaaatggacctttaccaccagttggtacaacaagttctcccatggtacttaatgtcccattttccaatgctatcaagatttctcttgactttactgtctcaagttgaccctcaactctattagtctcggtataaatgaaaagcactagagaaagcgagagaataacaaccaacgccagcgaaattacaaataatcctaatttactatgaaacattaatgaccacaatgaatttaagttcaaatatatttcaatttataggttcattaacttataacagatcctgagcactatccagactttcagcttgttttgatattctaaataagcttcttgatactagtaggtaccatgcagttcctggaatcaatgacacaatagaaagaaaaaaaccgatttgaggtatatacagtcccaatcctataacagctactagaattccgaacgtgcctgcgaccttgccaaatactttatccttaagcatcagaatcgacagtatcaatgtagcaatagataaaagtatgtagcttgagtgaaaggatgttccctgaaaagtagctaacattgactgtcctgccgccaacaaaagtgattgttcaaagtcggtcttagtaatatcatactgttcagatagatatagcatatcaaaagctgtgttggatgaaaaatatacgatgatacctataaaacctattaccataccgattgctgcaaaggattgatttgttttcttcttaagtacgatatagattgctaagaatataggaatcataagaacataatcaatcataagcaaaagatcaaggcttaatagacctaggagagcgttattcttaaatagattaaaaaaggctgccaccgtgcttggtggtggactaatcacaaaaacaagaatttgaattgggatcaagatgactatcgccatagcagaaaaagcggctattctgtataggtccttccaagacatgattgtgtaaggagatgtattattgccatcttctttttttccttgcatttctgatgttttctaaatattaatagtgatattagaatctgatgaaaaaatacaataatgaacgataaataaagtagcatgtattctatttggatcaggaacttttgtaaaccattttacttcttacaaaaacattacaattattcaattgccattcacaaaatcagtatttaacaggctcgtcgtattttatgtcgtttatcttaaacttggcataagtaaaattgcttctttctgtactccatgctacctcgatgtcccggggaactatcatattattagtagggacataattagaataatgaccaacccatttttccttaacaaaagaattatcaactgcacggtatctgtcagtattcattagcacaatttcaccttttttattgaaatgatagagcatctcaacattagtcccattataatcaattatggcctttgcagaatcagaatctactggttcccaatgtaaataattactgggtaataatgcagttggaaataaaggtgcttctgcaagccatctcattagctcactctcatccaattccttaccttttggagcatttgctattgtaaagacagacaatatttgtatttcaaatgtacccttaccttctaaatacttgtcaattccggtaatccatattaaaggtaacaatgatatttttccaatccatataaaccctggtgtctcggtagtaaagtattcttctcctactattggcatccatttttggttttcgctctgacggaactcccctgaatgcttcagtttaacataactgacatactgttggttctcctttagggaatatgtaaagtatctctgaacaggctctggaagcttctttatctgttccaatgaaaaagtattggtggacacatcttttgatgcagaaaacagtgtcttgaggtctccttctatttttcgattaagtaacatatcacatataccgactatagcttggtcagaaactattgcaacagagaggatcaagacttacttcttgttttagattctcatgcgtcagtatcatcttacctgccttcaccaccaatcaagtatggttttctttttcactaatcattttgattaatcatgaattgttcgattgatcttcttggggtgggcagtacttctctatcggaatagcctattcgtagtagtaattgaggatttgtaccactatggtcaggaattaaactgccaaggctttttctcaaaagtggaatttcaataggctgatttagataagaactccatatattctcggacattaggtatagaatggcgttcgataatgccaggcctgcattcagccatgaaagagtgttatcggagtttgtacctatcaccaacagaacgggagaacctatagcaagttccttgtctttggcagcttgtcctttaccaaagtcaaatgttcgtattacaaatggacctgctaaagacatgatatcaccaaatccgaacgcataaccaggcattccatccctaagatgacttctatttgcgtggacccatgaagctaattctcgtctcaactttttgtcggacatttggagaatgtctccttctgaaattagtttagcgagttgttcttttctttccctgtccttctcaatatgaagccagagaccctcgtatttttgaatgacagattgaagtttagagagaacctcttgtgagatttccttatcttcatcgaatctaaacctatttgttcttctcatggtaattgagttaaacaatctttttagtccttcatctttggttttctcgggcttttcatgaatgtttatcaccctaacggtagccaacaagtcatcactattacccccttcatctcttttttgttgtggtaacagggatgtttcaaatctatatccaaagtatgatattgctaactgcaaattaaacaaggcagacccacaactaatgatcaattctctgtcgtccgggtccacaacaggtaatgctctggttctgtcagcatagagacgaatcatgtcgtcaccagatattcgaaatacccatggttgagtattgtgacccgatggtgctaaaatagcataattgagaaaaaattttaacttatcaaatggcttatcaaaactagaaaacaaagtttcagacaccttccaaggttcaaaacctttatggtctatgtcttccttttttgttgataacgacatgatattcaaagaaggagcaattacaaaagtcttatgcaatcaattcatcataagacagtaatttctagtaatctaagaatacatactgctagaatattatcacattagacatttcataagctcatattccaaacttactcaaaagttagacttaattatgttctctagtgataggttggtatctatttatattgtttttattattctgtgtcagcattataagatcttcaacaatagtttggacgccgtgatatgattcaatgtgaaatataaattagaatcaatatgacacaactctttgtttgaagaggctaatttcgactaatcataatatcattaccatataaagtatcatttagtttgggcgcgtggggattaagttccttgtggtagtggggttctaatatgccatgatctctgatcgtttgactatcaagtaattagcggaccacgaccgcatctaaatcctaaggtagaaaggttaatgtacttttgaaataaaatatatgaaaagaaattaatggtaatccttcaaaaaattgagtaaacaatttctttcaatctggtagacttttacctaattgttttaaacgttctaaagataagattaaaagataaaaattattttgtcctttcggtctcaaataatactttagatataattaaaataaagataaattttactttagaatttcaaagtgttctatcgaatggatatgtccgtatacatgagtgtaacaataatattcagaacatttagtacatcttgaaatagatttttcgttacaagttgtaaatgaacatttacatgtactaccgagggatttgattacagagagagatagcgtaggctctgttgacacgtaatcaggaatattgttgcatgccgttgtcatgttaatattatagaaactcatctgtgcataaatacattttactcatagatctttatgcaatattgtaactatgggatctatataccacaatgggaataaaaatccaatccattaattatgtgggaaagaaaggaacagttctagcagttttagaattaacttacgaaatcgaagatggtagagttctatagcatttaaatgcgcaatgaattcctaacgctgattttgtatattagtgcttaatatctgatgaatttggtatgacgattagtaacaatctgggcgcgtggggattagtaacaaatttgaccaaattttgaggtgcaacaaatagttcagcaggtggagcaatgagttgtcttaaatatgagaaaaatttagtggttaggctgaaaggggaactattttaccgtaacagtacctgacatccaaggatgaagtacacagatgtaatagtaagtaccggggttttcaaaagtcatcgtgaatgaggtaattggtggtgcacctgggggaaccagccccattgggaacatccagccggaattaacataactttcattccctacaaaagaatagttggagttaggctgagggtatgttatattagtcttagagtcatcaattataactggcgcagatgccctttggttatccactattactagtttattatttgggtttgtgttgtctggcattgttgttggttcaacatttggagcaggtactgcagaagtaaattgagtgttgttgggaacgctaaagggagcaaccagaggcgggatcatctccttgtctttaacgaaagtcacagtatgaggttccactaccttcatcggattggtccatgtaacgttttcaccagcattaatagttacattttgtggagtatatttatcccaactatcgccatctcctcctgcactaacagtgcttgaggtggcattagcgtatccataataaaaagccccaaatatcaaaaaataggatattgcaagcaaacctgcactaatggttaatatattatttatcacggtctttccatgatatcaaagcatataagaggttctgctattgctcgatagcgtgcttttatccatcaatactaagttcatttatgtatttgtgcatttgtgcgatattagataaaaggatccataataattgaatacattctctcacaataaagtaaatacaaatgtgacgtcatcccctttcatggttttaatattattaccattctagagatcattgagttttgacgcgtggggacacggtgcaatgttgaatagaatcaccatattgaataatcatatgactgatcaatttattattgacttgatcgatgttactactgacctttacgattttgtataggatattcattataatatttggccgatttgtttacatcacatgcttgccaaatccaatatgcaaagatcacaatacctagtataataaacagcggaattactcctccaattatagaccatattaatgacaagtacccaaccgagtaccaataagccaattcctttgtctgtgcaaatggagaagtttctatgacccgttggagatagtgttcgagatagaagacgattcaattatttagctaagaaataacaataactattagactcaaattatgagaacttgctattcttactggattcagaaatcagaagcttacacttatgccaaccatttcgttctcttcaggagaggcattccagtatccatattttctactaattgttgcaaaacgagcaagatcttgaggtgtaggaggtggtagagcagtattattaggtgatcttccaacctcttgaaaaaactgtcccatcttttttgtcgttagaatattaactatagcagttgatcctgacaaattacgccatgcatgatgagcgttggatggaacatgaatgtaatccgcggaatttgcttttatccattcgttaatcccatcgacctgccttaagcattccaattctcctgaaataataagaaaatcctctgtgtcaggatgagagtgaagaggaacataaacattgtgaggcattgctcctctaagaatacaaaaatcactttcagtatcctgtggagaagttagaaattctacagttggtccgaaaagttccaccacattacctgtgctagggtttttctcaacattcataaaattccattctataaaataatattatttctattaaacatatcctctagtttttgttagatctatcaaaattggactttatgtgtccatatcgttatgcaagatagtattgttttcgatattaatgacgcctgttcaatgtggttgaggaaataattgccacgagtcttttgatttatagaatagtgatcctatcacctttaatgataaatacaagttcaatttattgtgttgtgaaataaagaatatgtccaaatatgccactcctgaagatttgctcaagtctcaagtcaaagaattcaataaaggaaatatcgatttcttgatgacactgtacgaaaacgatttctgttttgctaatcaaccaggtcaagttgtcaaagaaaaagagctcatacgtaaggcatttcgtgattttattaacaagggaattaaattagatgtaagagctaaaagggtatattatgcggacaatcttgctcttttaattacagaatggtctctcaatggtagagaaccagacggtacgcctattaatcatacaggcaatggcacaattgttttccgtcgccagtctgatgacatatggttaatggtcatagaaaatccatgggggacaaactaattttttagaaacaaaaagcatcgatataacttaccctgtgaagttgcagaggcagtaacaaaaagtataacaataagtgtcatgtggtagtttaatgtgctagataattttgtttcctggctcgcaaactaagaacataagcctttgggttttgggcagtgtttatacagtaaaaattagtggtgacgaaactcaaggaagatatagtatatgggaaattgaagtgcctctcaataacggacccccattgcataaacattcgaaggaggatgaggcatattatattttggaaggagatttttcatttctgtatggtgataaagagataaaggcagataagggaaggttcgtgtatgtcccaagaggaggatttcacacttacaggaatgtcggcagatcttatggaaagttgttgttaattatcactccacctcaatttgaaaaattctttgaagaaattggaatagcaattgaagacaaatcatcatttcaccctcccttcataacttctgctactattgagaatattgcaaaaatatcagcaaaatatggcgttgaaataaaattacgtgagtgataattcaatttgattataatacaaaggatttcaataaatcatggtttatagatgctataatttcccctagtaactgggtgtattatttaaagtcgaataaaatttagaatcaaaatgacatgagaatcagaaaaaagaatcaaatccaggcttgacataacatcattaccagataaagtatcagtaagttttgacgcgtggggattaagttccctgtgatagtaggctctaatgaaaattaaaggactttatcagttcttataataagatcacgtaggatagtcataaaataaacaaaagaaaagatttgggacgtttttcaaatagcttttatcatattgtgatgaccacttttccccgaggatgattatctttttggtaatctagtgccttggcagtttcggccaatggaaatgtcttttcaacatttacttgaatattattttggtctatccactgtgccaatttagccaatcgttcattggttatttcagtaaattgaaatatcgctttgacgccatattgctccatcaaatttgaatctggttgttctagcatggagacaatagttccactatttttcaatactttaaaggattttctataggtctcaccacctacagtatcaagtgctgcatcataatcttgtagtatatcctcgaaactttgagttgtgtaatcaactacctcatctgctcccagccgctgaacaaactccttatcatctgattttaccgttgttgcaacgaaggctccccgattctttgcaagttgtattgctattgaaccaatacctcctgcgcctccatgaattaggattttttgattctttgataatccaatattttccacaagtgcctgccacgcactgacaccaacaagaggcaacccgctggcttcaatgtgattcagagtctttggtttagccgctatactgctgagattgaccaaagccaattcagcaaaagatcctgacccgccaaataatacggaagattgtccgtagacttcatcacctatactcaaacgagtagatacatctccatctaattctttgataatacctgaaaaatccatccctaatgtagctgggaattggagcggcatcagttgttgaaaatatccttcccgtattttccagtcaactgggttaaccccggatgctttaacctcaacgagagccttgccagcagatacttttggtataagaatgtcattatttacgtcgataacgttgcttccaccatatttatttatttgaattgatttcatccgtaaatcactttgttatatctactatcaaaaagtaagtatttaaattggtaaggtacaagatagtaagtagataaagtaagggtaagttgacaggagtagacactttagtacgaaacacgataatagacagataagatcatctcggtttcaatgatccatgtgatggaattgatctgccatcagaatggtctgatagacaggcaatttacaaccaaggattgaatacatataataaattctgttttaagggattatgttttatgatttgatccctgtaatattttcaatattgtttatgtggatatgaatgacatcactactttaagttcaaatcaaaggcctatccaactgaatagaatcacaaacaaggaagatatatgacgcaatatttatgaacatcttttggtcaggtttcagtctgggcggtctgggattaagttccctgtgatagtagggttctaccataatttgagaatatcacattttttaaacgacagctggacttttcttaagcatgatttgtatgctttatatgctttctaatccttgaccatgcttgtttagttttataatccacaggtcgaatatctgattctttaagtttcccataatccataaattctcgagcaaatgctgattgtattctatttagaacctctagtctatcagttcctacaatcacagattcagtagtatttatcccaaaatcatctaaaatctcttcggtagggatttttattattcctaaatgtatgtctataggaatgggattaaactcataaccatctattggatctggttgaaataagaatcgcggcatggtaaaggtattaaccatactagaatttaataattgcaacattcaaaaagatgagccaaaataatatgtatcagagtggtagaacagcttccgtggggatacgaatcaaggttgaatataatctgtcagtactaaaatggaagaaatattatatatactatttttggatccgctaaaaaaagttagtggaatccatcatctagaatttcaaacgatggaaatacatttgttttttgcactatcttagcaacctcaagcatattagttaaactgtcttcagttgaagtttcttcaatggtaaccatagaatctgtagcatgaacaatgccatgatgaggcatcatgtttctattccattgtacactccaaggtattggtcccgtaataccatgagcctgcttccagtcttcaattctgtcgtcaatccaaccgtgaagcttccaaaatatagggttaacatgactagagtaggtatctgccagaaagtcataggaagggttatcccacttaacatcaattgtatcagcatttgtcggttctataggtggcctaaattccaaaggtttcgaagaccatcgaagatgcattgcgttgtgaattgaatattccaatctagaacctagttcgcctaaagtaatttgtgctagattacttggatcagtatagtaaatctccctgggtttcatccaattgtcatagaaatcagacgtttttgaatcttgtatggaaggtggtgcatcagcccatattggaactggataatcaatatcacttggcgacggaatcgcaacccatcctttgactgctggataagatggatcctgtatctgagatagcatactgttaacatgtatgatcatttgcctgtgcataaacagaaaatcctcccctgagccattagtatgaatagcccgacggtttgaatctaaagcaggtcttggaggctcccaacctttgtttcttaaatcattttgtgctgtgggatcaaaccttaaccatccatctcgtacagcatgccataaataatgatgtatcctgtgttcccttatcgctaacatattctttacttgaactggtagttgtaataccataacaaacttactcacttgctatttataaatatttgtaataaataccaaaatccatcaaaagcacaaaattctacttgtttaatggcgttgtcaatttttataactattgatggataagtattttcgttcctagactgatttacagacattgtataacttactagttttcacatgtaacaaagttcccaaaagcaattacaattaaaaagtatatatattaaaattgttatcatattattaacaagaatgagtttcttttccaagaataggcagaaaaccaaagatgaatacaagattgaacaataacaattattttataatgactttagcgacaataacttcgataatacttttatcagcaactatgacaagtccgatatctggatatgacttgagtgatgttaaatcatcaataggatatggagaggcaatagacgaatttgatttgccagtaaataccaagaactttagtatggaacttgataacggattagtagcaaactattacctcgcacctaatcaaacctttgtctttgatggggtgtcaggtgcaatcacagaacaaaatgatgataatgataatggcggagatggtaaaaataagatcaaatattacgttgacgtcacagttacaacaacctactcctatccgcaatcacaagataagcctcaggatccacgttttgacaagaaatacgattcaatagactggcaagatgacaatgaggaggacaatctaacaatcgaggaaatggacaagatattagaagaaagagagaacaatgaagagcaaaatgaaaacggcaataatgatgatagttcaagtggagatagcagtagtaataataatgatagcaatggacaagatgataataccagtggtggaagcgatgacagtggtggaagcgatgacagtggtggaagcgatgacagtggtggaagcgatgacagtggtggaagcgatgacagtggtggaagcgatgacagtggtggaagcgatgacagtggtggtggtgacaactaggcgataaatagacctttttcaattatttttgacaacacctgtttttctttacattttatttcattaattttatagcctacatgctaattgcatgaagagaagatctggaacaaagattttaacggaagaagataatcctcatatccattatcgaatgattttcataattgctgcgtgggacttcatatctgtatcggtattttaaacaagattctataatcaataatagaatgagacgcttaaacttttatggacaaagaggaaccatattgcaaaatatggatctttaatgtgaaaggtccaatatacaagatccgtgatcacagtcaaaaaaaattatatcttgatggatggttttgtcataccctcactgtaaggtgttctggacctttcttaggactgttggtcatttcaaagcaatcatatatgcttccatcatcctcgtcaaccacacaaacatgaaaatcctcatttgcatcgattaaacctgacggcataactattctagttgtatactgtccatccggactatcgggatcatcatcatacattgcatcaatcaaatcgatattgtcccgcgagtattgcggatattcttctatgtacacgcttacatcatttggtccatttcttgaactgtcgacaaatgtcacctctactataaagctgcccttttgagcgtaagtggttggaactaatgtaagaaccagagaaatcgatattgccaagacaatctcctttctgatcatgttgatataattatacaatctatcatatttaacaattgcgaatcattcccaaaaatatgttataacatattttcatttttcccatttcatatccaatttcaaactcaattattgtcgtacattagaagaatttttgattatggttaatcggtagtctgggcgcgtggggatacgattcaagtttgaatagagtcctaatatgtgacgaaataaaatatcaaagatattatttaatcaagaaaatatatagactgaattttatatgctaatatgccataatgagattgtaccattcactgcatttttaaaatcaaaaaatctgaagataggtccctttttactttaggatctaaatgattagcaatctaaaagataatataagatctattatatcattagttgaaaagcatggtaaaggcatctagcaaacgtaaagaaagaatccaattactcaactatctggctagagatataagcacaagaacaatattctttcatcagtggatagcaaactatcttggactaagcgagatcgaccataaatgtcttgatgtaatattgagatcagaaaagccgctgacagggaatcaacttgcaggtgaaacaagtctaaccgctggtgcaataactggcgttgttgatagattagagaaggccggatatgtacttcggcaaagagatcaacaagacaggcgtctagtatatgttattccccttagagaaaaggcgttaatggatataggtcctctatttgaaataatgcaaaagggcatggataaaatattttcagattatgatgacaaagaattagaagtaataactgattatctatcaaaagcccttaaggctatggaagatgccacaatccacttacgttcaatggtagaatcaaaaaagaccaaacaacaacattagataaaaaaactttaaagttaacaaactaaatcatttagtaactaaaacatttatataattaactaattaaaaaagtatatggaaaaaaaattttctgaaaataagaagatacaattggtgtttgaaagaaatagacagcaagatgtgtacatacctgaaaccaagactagatactcggacaataatttttttgacatgttttcggcggatatcgatgagatctacaactggtttggtaaatttaaaatatcagaattagagtttacgatcaacaccattgtaaacacccaagacattacaaaactattcattggcaaaaacaatgatcaaggattaaaggtaatcttaaagccaaatgagaatccattttcgaataaagatatagaatcaatcaatagcgagacatacggccgccaatatccattgaataagacaaaggaatgatcccattgacaaacgccaatgtaaataataaatacaataatgcaaacggatccaagatagcagaacaattatccaacgtacagaaagtaagacaattgatcaagatagttaatacgggaaatttagaaaatgtagagaatttagtacacgagaaatatttcaaccatgaatctcatatcgacgtatcttctattcaagatctaccggaaaatatattacaacagattaggatgcgaaaccagcttagtggtcctgcggagtttattgatacagtaaaatcattacgaaatgcatttaccgatcttatctatgaagaaaaagaaatccactcagaccataacacggtcatagcacattatatcgttagaggaacacatacagggcccttttttgcattccctccgaccggtcgctactttaaatatgaggcagttcacacccacaggtttgagaatggcaagattaaagaacataacgccatacgcgatgatttggcgtttatgttgcagctcggacttgtagttcctttagcacaatatgaatcactttttagactttggaaggcagtcggtgatgacggtgacgatagtaatggtgaaggagcacgtctagaataatgtctaataacgacgtacttgcattgcaatctctatatagaaaaaagattgaaggatggaatgaagccaacggtcaaaagtttgctgaaccatatgcggaagatgcagattttatcggatttgatggtacgtacttgtttggtcgtagggagattgccgaatttcatcaaatgctctttgacaaatttctgagaggaactcgtttgataggaaaaattaagagtataaaatttccaattccaaatgttgctatcatagttgccataagtggaacaattgaggccaatcaatcaagtattaaccccgagagaaattccatacatacaatcgttgcgataaatcataaagatagtggaaagtggtgttttactgcgtttcaaaataccagagcaatgtatatgggacagccagaaaaggcagcacaattaacccaggagatcgaacaaataagataatcagactgcaaggtgattcaaatgactaccgagaaatatagctctgacaagaactttcgatattcattactggacaaccgtcaaatccaatctaatacgaaaatggataattgaatttcttgacatagtatagcccatcatgtattttgttagctatattcagcctttcaacctcaattttagctttatttcattaccatattagatatcatcgagtttggccgcgtggtgattaagttccctgtggtagtagagttccctgtggtagtagagttccctgtggtagtagagttctatcacagttattaatcattcttatactaacatctttagcaaatctcttatgagttaaaattagaacagcaacagagagtattacaaagaaggtcagccttatggttaccattttagatagttatctagaattcaagaatgctttactcataataatttagcaagaatgagaatgcaatcgtttgcaaatatttgcttaaaatttttatagttagagcaaacgttaagtatatcatgcaaagggatgaagattctacaaaaagcgccaaggaaattgtgatggagttcgtagatgctctggagcgaaaagactttaaaactgttagaagttacttaagcgataacgtatcggtcctggcacctgggcctgttgaactaacaagatttagccaagctgatccatatgtgacctatctggaacacgccaacctaccaagatttgagatcaaaaaggagtttgaggataagaacgatctatgccttctctacgaaatgaattatcgcgagcccccggtgtcgatctttgtatgtacatggtttcaggtgaatgacgaacggaaaataagttcattaagattcgttgcagatataagatctttgttgaagtagaaaaataggtgacttccaaaggtaacaatgtcttatgacaaatgatatacataggacaaaatggggtaatcgattcatcattaccgctataattcaaggagggataatgacctcattagcgttatcaatggtggcttcccaatttatttttgcaaataactttgacatgatacagtttctatctttatcctttgaaggccctgcaaaatggtttttccttgggatagtgttttatcttatatttatagttgccatagcagttaccgccattttttacattcacttagaggtcaatcttaggcgccagatttctggcatgttaaatgtattggcatggattcatctgatcggtatgaatattggaggtcccttgacaaccttgctcatgatatttgcaggattatcatggtctggtgtattgactgtctttaccgaaggaaagataggtcctcagaatgtggaagtgttgaacacattaactactccaatagccctttccataggaatattaagcatagtgttatttgtggtggtttagcatgtaccctaacttatatcaaaggaaacgatatggtaagaggataacaatatagtaaatttcgaattaaattcgtgatcagatttgctagatgaatttgattggaaaaatctgtttatattatatatactatgtgtatccaaacaacagcttccaaaattctttatagccttggatctctaatttcttaatctctacttcgacaaggtttgagataatgtaaaagtcagatcaggtgaatctctagatggttaagaataaaccaaagtagaactctatccaattactgaatatctcatatttgtttgaatacgtctgtgagatatgattcaaggttgactatatcccattatgtgagaagtaaatgaaataaaacgaataggtgttcttattaacccactcttcctatttcatcacccagtagtcacgtaaaataacgtttgcaacaactcaaaggatcggaatctgggggtttagtaatagacatatgacaaatctaattttaagttgaacctatcaaatagtattctgtattttcaattccccacaggtgggctttgagtccagcttatcggaaatctgatatcttaataaatattagtatagaaggatggattcgcttctgtagcaaaagaattatgttatctattactccatagtattcaagttcttcattgtgtcaatgatttattaacctagtacaatctaactagagttctacctatagtatctcctctaaagagactaacaaaggcgtgtggtgcattttccaatcctacaaaaatactttctttaagttttaccctatcttcactaatccatttagacatgtttgcattgaattcacttaaaatatcaaagtgatcgctccagataaaaccttgaagtttgagcctatgtgaaacagccaaagaaagattagacggtcctaaagatggtgatttgttaatttgtcggtctccttttgaagaatatatcttgtcttcgtcattatattgagatgttgttccacacaaagcaatccttccgaaagtattcatgttgttaattgctgtctctagatgtttacctccaacattatcaaaatatagatcgatgccattgggaaatactctatttaattcctcagagatattatccaagccgatctttctatagttaaaagcattgtctactcctaattcatcaactaaccactttgctttctcatcactaccacagctgcctacgacataacagccctttatcttggccagctgacatgcaacagacccaactcctcctgcagcagatgatacaaacacagtatcttgtctttctcttagattacatattttaaaaagaccaacatatgctgtcatgcctgtgattcccattaaacccagaaaagatcttaagggtgctaagattggatcaacttttgatatggattttttttcactttccgtatctttgcctatccaatattctctccaaccaaaattggccttaacataatcgcctactttaaacttggagcttttagattcaattacttctccaatgcatccaccgtcaagtggtttatgtagttcaaaaggaggagcaaacctagtacctttgaccatatatatgcgcaaaaatggatctatagacaaccaaacgtttcgaaccaaaaaatcaccctcctcttttatgcctggaatttccacctttactagttcaaagtcttctactcttacagatcctgtaggacgcttctttaaatgaatttcatgacctaatctttcatttttcaaattacagacacctagacattgatgattcaaatgaacttttttgtttgaaaaaaattgtgtaaataatcgaaggaattgggctatgtttttattcaatcccgttcaaagcacgctgtgaagatcctcgatgcaagtgaaccaggatttggcggtccaatgacagaagacgaagttagagatttcttggccaacagcaacaaaaatgttcacatttcaactttagacgaaaagggagaacccaacatacatcctacgtggtattactttgacaataataattacaagatttacatagaaagtgggagagaatctaagaaaactcaaaacctaagaaggaataacatcatatactattgtatagacgatgacaggataccttacaaaggagttcgtggcaagggaacagtaagaatatctgatgacgttgattataacctgcccataattgaaaagattgtagttaaatatctcggaagcattgcgcatcccatgtcacagactatcataagtaacatcagagaaggagatgccatcttattagagataacaccaaagttttatgctacgtgggaccacggcaaagtaaaaaggtagaactaaaattgtactataatgatgcgttttcacaagacaaatagatagaatttacaattcccatttggatagatcgtcccctttgcttcttaatgcgatgcagacttggaggtaagagcaaaagtgaataaagttattgtaatgtataaggccaaaagaagttatgctgttctattggaagtatcaatggagtaagaaagagcaggagtgtacaacttgtttctattgattatatactccagttttttatgattttccctattatttcatatgaatttactacaatatctttaataatggattataatcatattcatgtacattcgatacctcttgttactaaatatgctaccaattggaatgttctgatattaataacctttgctacaattcattgaacatagcttattttcaatgtatagtatttgttaaatgtctttaccatgagacatatttatgacggaaaataatagtaatcggactagttatttttatgatgtcatagttattggtggtggttcagccggccttagagctgcaattgaagctcatgacaatggttcagaggtgctcataattagcaaaagtgaacaaggtgatccgcatacagtgcttgcaagaggaggaataaatgctgcacttggaaatatggatcccaaggataactggatgatacatgcttctgatacattagtggaaggggaacatattgcggattacgagagagttgaaattctttgcaagggtgctcctgatgctattcaggaattagtcaactggggtgctagatttcacagggaaaaagatgggagattaacccaacgtttctttggagcccatacatatagaagaactgttttttatgaagattggactggtaatgagataatccgtgttctgatgcaacaagttattgaaagaaagatcgctatcatggataatgtccatgttactaggttgctggtcacaaactatatggacgacactggtgaacaatcgaattcttcaccatataaggtaaaaggagcaattggtatcgatgttaagaacaaacaagttgtcaagtttggttgccaatccttaataattgcttcaggtggctacacgagggtatattcggtaagtagttcaagaaattatgaacactatggtgaaggaattgaactggcatatgaagcaggaatagatttagtagatatggaaatggttcaatttcatccgacaggcatggtatggcctgaaattgcattaggtacgcttgccacagaagctatccgcggagagggaggcattttgttgaattcaaaaaatgaacgatttatggaaaaatattatcctgataggatggagttaggccctcgagatgtagttgcacgagccatttaccatgaaattgcagaaggaagaggtactatacataaaggagtttggctggatgtcacccatctttctctgaaaaaaatattagatagattgcctagcatgtataaacaattcaaggatatagcagggatcgatatttctaaagagaaaatggaagtggctcctactgcgcattattctatgggcggattatcggttgatataaattgtaaaacaaaagttgagggtttattcgcagctggtgaagtaataagccagattcatggggccaatagattaggcggtaatagtctacttgataccatagtatttggaaaaatagcaggcagagaatcttctatttttgcaaaacggttgaaaagttcagaatacaatccattagagtcaaaagtgtatatggatataaaagatcttgaaacaggccctattatggtattgaatgacccattaagttttcgaaaggaaatacaaggtctcatggaccaatttgtaggaatagtaagaagtgcttcaaatcttcaaaaaggcttagaaaaaattctaattctaaaggacaggtttcattctcggattcgaatattacatgaaaatgaattaaacaatgaataccacacccagaatctcatcataactttagaagtcaagtcatctttactaatatgtgaggcgataataagaagtgcccttatgcgagaagaaagcagaggagcacactttcgttctgattttccaactattaataacgaaatgtggcatgtcaatatctattgtaccaaagagaataaggatggaaaaatgatcctatataagaaaaatgttaaagaaataaagggaaatcttaatgaagtgataaaggctcatttaaaagccgttcacaataatgagtctgagtgagaggtaatacggcatttgatatactctttggatcacaggtataacctcatcaaaggtaacagttctcatccgtggggattaagttcccagtggtggagggactctattacatcccacaaatattttctaatcatatacgatactaattaggataagaatatgtatttactatgttgcagattttggtttcgaccttcattatcccaccggtacagtcaccagaaagggaggaattatagttagtaacggaggaagttgtaacactgtacattcccattgataattttaccacagttcctgatgaatttcctttaaatgttgcggggatgggatcattggcatgaatatatacggtaaaatctgaggagttgttcttacccttatcaccattaacagtggtcatatttactattaaagttcctttatttgtgtccgaagatattgcggtgttttcactaccaaaactgcgtgccataacagatgaactcattattgtgtatacaagagagattaaaaataaagtgtagataaatttcataaaagatctttacacatctatgttaaaaaagactcggtctattgaatgattttttttagttcatagcattaatttgtaaaaagattcaacctgtaaatatgatgggtattgataataatgacgtttagactatacagaattatattatgatagttttgtttgtcggaaattgattaaagcgtaaatctatttaggaaaatccgataaactagattgatgtctctcattggattgaccagaattattttcgtatcgctccaattcagtcttccaatccatctcagacatattcatcagtttcaaaaaatcgttaacggattgaggaccaaagccggcaaaatgattgttaaaggctattaatacgtctcggatgcttgaatcttcattttgcgtttctctaacccgctttacataatcgagcatctcttttcttctgtcctttactatcttaccaaagtctatctctgaaatgcttctatcacctatgaatctgagataaatctgatcggaagttattatcgatggagtttgcagtttgtcccttatactccaaactaaggaaatgttattttccttcattaaattgtatacattatcattaaaccatgaagagtgtcgaacttctaaagaatacctgaatcgtttatctagatatctaaccatggcttgtaaaggaccaaaacctttcttctctgaaagaaaaggtggaagttgtattagcaacgttagtgttttttcaattaaaggttctaatgaatagaataatattgaaagaggtttaacgacatcctctaatttcttttcatgagttattactttgggaaatttcaatgaaaatttgaaatcttcaggggttttgtctttccaacctctaactgaagatctcgaaggtatgtgatagtaggtagaatcgacctcaacaaatttgaagaatttcgagtaataggataaatagtctttactttccatatcttttggataaaaattgcctttccagccttcataactccatccagagcagcctatattgaaagtcaagtttacttaagtaaatagatcaagacagtagaaaaactttcgaagttctcaaaaaagaatgtcaggcatatatcagcgaaaattatctcatattctgcttgcattagatctttccaatattcttaatatgattcttaatccttgaccatgcttgcttagttttataatccacaggtcgaatatctgattctttaagtttcccataatccataaattctcgagcaaatgctgattgtattctatttagaacctctagtctatcagttcctacaatcacagattcagtagtatttatcccaaaatcatctaaaatctcttcggtagggatttttattatccctaaatgtatgtctataggaataggattaaactcataaccatctattgggtctggttgaaataagaatctcggcatagaaaaaggtaataaccatactagaatttaataattgcaacatactaaaaagatgagccaaaataatatgtatcatatagatgtagagaacggcatccgtggggattaagttccctgtggtagtagggttctaatactaagatagttttcttatatgtcaaaattagcagtgtttgataatacatatgaaatattcaggtctttcttttaatcaaccttttatttattggttagatatatacgtataaaacaggttttgaagacgttccttcttcttcatacatcaaataacctggatgggtaatctacaagtaaattatctgctatattctgttttactaaaactttccaaatctgttctttaattctataatatactcatcaatggcaaattctttgaatttgtcagattctaaattagataaactattctctatctgtctagcctcaacattctgtctgacattatttttcatgcctaatacctctacccctactggcttgttgtttttatccaaatcaacatagatatttttgcttataggctctgtttttactattttattatctgtgaatttgacatatccagcatccaaatcatcattataataagaattcatattatctcacactaagctaaactgtaccgaatccaaccaataaaagtatgtcggattatttcccacttgatatatatgaggttttgcgagactgccacttcaaaatctaatcgatacttaaccataaataatacagatccaaatcttagtgatgtataagtaatcgttttaatagaaaaaattattcatacttaaattaatcttaaattaaactgaaactacaaattgaaaaaaaagtggttttggatttagctttgtgctgctgcgttgtttcctgtgttttcttgattttggacgttgatgttgttaccagaacctattgtgtctacaccagagacaacttggctgttttggctagaggattgagattggctaatgctttgtcctgcagagttgccaccgttgtcgtcatcatcgtcttgtgctaatgcgttgtttccagtattcttttgattttggaagcttacattattacatgataggaaagttgttccaccagaagcacacaaggcgttttgaactgaggcttgtgattgagatattgattgctcagcatgattgccttttttctttttggttgcaaaggcgtcatccatcgctacaatgggacttgcgaaaagagctaatgcgaccactattgcgattgatgctactaggagttttttgtttttgttgtgaatgttttttgttttattcatatctttgatactagataaaaaatatatggtgtttgctaactaggtgcaatactcttatattctaatacctttagaattagacaatgtaatcagaaattagtagggttctataacatttagctgcaaaacaaattctttgacccgatggcgcaaattagtgcttaatttatggtagaatatatacatccagtagtaacagtctgggcgcgtggggattaaattcctagtgatagccgggttctgctatattaaaacaatcatagagtttgtcacgattttagaatggacagtatcgtattcctaacttgtgtccaatactttctattctctaaatctcgagaaggctccatcaatatttcaaaagcaattccattaaacaaagccaatagaacttttgacatttcctctgtatttttcgtgctcattcttaatattccattttgaattgctttatccaatactttcttaatcgattctgttactttagcgctgcatataattaactcgtttttgatctcatcgcttcttcttgacgcacaccacatttcaaacaaaaatgcatagaagtcaggatattccttaaagctttggatacagtccttgatgatattatctgctatttcttctgcagtttttcctttaatacccttaatggtagtttgaataatattttcagagctatacgccaagactttacttaccaaatcttccttattcgaaaaataataatgtaatatacctctacttacccgagattcttttgctatgtttgctattgtagtattttcatatccatttttagcaaggaccttcaatgcattctttaaaatttcattgatcttttgctctttgctttcactcaatctgtcaataaactaagtaatcggactaatataaatttagttggatagccaaccaaatatttataagacagtttattattagtaagttggatgactaaccaatttatgaacataacaatgaacgagcccatagacgtgacaaaagaggagtttaacaaagttgagtaactcggtggagagaataaagacgactcatatcttgactggccagaccgccctgatcactggtggaagtagaggaattggtgcggcaataagtaaaacccttgccaaaagaggcgccaatgtcgtagtcaattatttcaataatgaaacttctgcaaactcggtagtttcagaaattaatgattatatatatggtaaccaattagttggaaatgctatggcggttcaagctaatgttactaatcctgaacaagttgatgatatgatgaataaaattcagcagacttttggagatgttgatatcttggtgaataatgcaatgattggaaggtattttcttaaaccttttctggaatcaaagtgggatgattttaatgaaaagttttatgatgagatgaaagcagcttatgagataacaagagccacactacccagtatgctcaaaaataattacggtagaattgtgtatattgcaacaggaagcgccaaatacccaatccccataggtgcaacagcattcggaaccgcaaaagcgggtctagttgcgtttgcaaaatacatcgctcaagaatatggtagaaatggaataagagcaaatatcgtgtcaccaggattgatagagacggatcaaaacaaaaattatatttccgatttcaaacgacagtttgaatccataactacattaggacgggctggaaaacccgaagatgttgcaaaggtggtagcatttttggtcagtgacgatgccgagtatcttacaggaacatatcttccagttgatggaggcttcgtaatcggaggataatgatactattaacaaaagtcaaaatgatatcaataaagtgaataatagcagaaaagattgtgttgggaacacttccaagatattatattggattgatcatgcttctctataaatagaaatattatgtctggctgtccaataataatcaagagctaatagaacattctttacgatattatttttttacattgaaaaatatgaataaaatgaacaaactatatgaatgatgggtcttttacaaaattcttgataacatctcggatttgtttaagataaaattaaaacaaatcaaacacactgaaataacttttgaggcttcaagtggcaaaataaggaatatcatttatcagaaatactatgataccggatggacacctgaagataatcaacataataataagcaagcaaaagtaatatgggatatacctgatataattataacatctcgaaacgataaagttattgttatagatgcaaaaaatagtgatctaaattaatctaaatcataattatttgttaaatcattcggtcccggtgggtttagttataatcatagtacgagtttaattttattctagaatttataaattatatttttaagaattattatgcaataaaatattaaatacttgaggtaaatgggaacgtacaacgttttataaattcggtgggcttcgcttccatagagtacatgggaactgttacttctatttattttttgaatgcgatgagtcagtaaaatagatgtagtatttgtatgagagtggcagttgggaatcaagtccattatgatggcggaacttaacaaggatctaaatctattaaagaggtcagtgtggatatactagagttagactaatttctaaccatatcattcaaaacatcgaaagggatgggatttatctacatacaaggtagacacggtttagactagcgcaatccaaaacattccgtgcgtattattgaataccgaatcttattcgcctctaaggattaagaatagttgagattatataagattcaaagatcaaaagctataactactcaaatgactgtgaggaacatagtgacagacaactctgctttttgggatgctgatacttatgacattgtttctaatgcccaggaagaatgggctagatccctaattaaacagaggaaatggtctggtaacgaagctgtactcgatgcaggctgtggctctggaagaattacaaaaatgctatctcaattaattagggatggcaaaatttatgctgttgataacgatcccaatatgattaaaaaggcaacagagatcttaggtagtatcgcgaatgtccgtataactcaatctgacctgacagatgcggattttggaaatatgcaattaaaatttgatatcatattctctaatgcggtattgcattggatactggaccaccataaggtttttaagaatttctacaatttgctgaatcccaagggcgaattgctcatccaatgtggcggctttggtaatttgaaaaagacaatttcagtttttaataccgtaaagtactcatcaggattcaaacaatatttttctgaatggaaacagtcatggaattttgcaaatccggaggataccaagaatattttagaaaatataggattcaaacacgttcatgtctatctctcaaactcaaatgtcaatttcgatagcaaaagtaactatttactatatgtaaaaacagtagtattaggtccatacttgaaatatcttccgtcagaacaactaaaaaataaattcgttgaagcaattttaaacttgattgagaaagactatcctgaattgaaatggaacctcgactatgtcaggttaaatatattagcatccaaataattgagttatatacattgttactacatgtttttggattttcaagttaatagtatgttctaaatccatgagtacaaagccggaagtgggattcgaatccatgtggtatatgggaactgttaatttaataaatttttacttagaagaattcaagtttagttaatagaatcataatattatactgtcgggagggcgtttgataaagccggaaagaagatgagtatgtgatattgttgcaaagtctttaccacctacttgagaaataaagggatggagccagagactattgacctgttgtaaggaaggataagtggttccgtatttgtgaatcattattatatacccgacgtaaacgaaattattgcaaagagtataagtctgtattgcgtgaactgatgaagatttgactaattaagtacatatttattcccactacatagtaattttctagttctaatcggtatgagttgtaatggtatatgcgttagatataaagcaaaaaggaatcatgaggtgccatctaggtataaggaaggacagaaaagatgcagcacttgtgagatattcattaaatgggacaacaatgcctattgtccctgttgtaattataaattaagaactaggtcatttcgtggttgggaaatgaggaaaacgtatagagaagagaccattaagcggtattaatcattcaccattttagaccaaactttttcgaaagaatcccaatgagaataagtccggttttgggtgagttgattaaggatttgaaaaatgtctaactcagtactgaagaatgaacagaacctgtatttagaaaatatataatcgaattttacacataatagctgagaccagtacaattaaaagatccgtaactatttgggtccagagggacgtctttcaaaattgaaccaaatctatcattttcctatgagctctggctaaaaaatgggaataaattaattaattaatgtattatttcggtctcaaatatattgatgtcgaatcaccaaacctggtatatccatattgctcataatttgagtagtcagttttaataacttggtcacatcctcctagacgatcttcccttaatgctataaatccatcaatatttgaaacttcttcacaatacattccgtgacttgcttttgaaacatcaaattctatctgacatgatgttgtgttatacaacataccagtgttatcatatttattcaaaagttccggatagggaaggccattcatccaacattcgttatactttatctcttcttcggttaattttgattagatatggtctgaatgttatttactgttgtagaaagtttaactggcaatcatatcaccttaatgactatattcgttaatgttgatctgatataagaaccctattactcagcgggcccgtggggattcgaaccccagacagccggatttctttctattaggagttaaaagtccggtactctacctggctgagctacgggcccaatatctttctatataaaactagtataatttaattttatagattaatgatacacagctgtgcacctctgcatgtttacttctacaaaaaaatagctacctgatgaagaagaaaaacagtcagaaatcatacaaattctctaaaaaattattatcaacaaatatttttaggaataatactatctaataaaagcagtaacatgtatccaaactatgatataattaatttcgattatacattctgattataatgagtaacataacaaaaacccacaaagttggactttttgcaatgtttattgcagcagccttaattggttcagttgtagcctttggcgataactatgcatatgcaggcggaaagaagaaatctaatgatgcagaacaagaaatcgagcaagaacaatcaaatgaacagaatggacaatgtgttactggtacaatatcactaattaactgtaacaacgtaggattactattccaaaataacgacggcaacttggcattaggccaacaataaatccttttttttattttaaattttagtatatatatcgtattctatcttatccagctcgttctttaatattctgctcgctcgcttctgaaacaattttttacctgttttatcacgatagattcaaaaaaaccattaataatagaaatcccagtaacctgacttgacttgacttgatttaacaaattgaatacgcatctcttctagcaactacatataatcttatcaagagatcatagtgtaatactcggatcagctaggccacataattaaccgtgttatcaaagtattcttaattcttgtcgcagatcctaacaagaggaagaataagaagaaatagatacataattctaataaataaataggctataatatttcatataaaaatgacagtaacatgtatccaaactatgatataattaatttcgattatacattctgattataatgagtaacataacaaaaacccacaaagttggactttttgcaatgtttattgcagcagccttaattggttcaatagtaacatttggcgataacatggcatttgcaacaaagaaatcgagcaatgaatcagaacaagaaatcgagcaagaacaatcaaatgaacagaatgcacaatgtgtatctggagatttcacaatagctggatgtaacaacgtaggtttaatgttccaattacaagacggtaacatagccgcaggacaacaataaaccccttttttttctttttgaatctaaattccattaatatatatatatcatatcctataataataaaaataagttagttagtagtttttagcctatcaaacagtaactccccaagtaaccattttagtgaaacaatattgttgtattttgtcattttattgtcgtctcgtatttgtaaaactaattggttatgaactttcttctcctcctccccctcaggattctcatctttggatccaacatggaatttctcttcgcggtaaaatagagttgatcccgcaccatcaataaatacaataaaggagacattcatactgtatttttcaacaatacaaatctggtgctttttatctccaagcagttttttttgtgaactattcttgtactcaaaattcaagatattcatataatgttctaagagaggaatcatttttcggatgaaatttttaaaaacggatgattcacttggacaaataccatagtcgttatcagaccacttaaaaaaataagagcctatttgtacagccggttttaatgaatagtcacgataaccttcatttgtcaactaccaaaacatctcctaaaaaaaaggccagcaaaaagttatcaacatttgtataatttatcaccataaaatttgctatactgctacactactatcttgtaataatagcttccgagaaccatttgggaatcatttctttaccgttttttaataaaaacgaaacactgctatcaagaatataggtatttgcgtaatcatcagcatttctaacacttcttccatatgcttgtataagtcgtagtatcgtattccattcgtaccactttggattacgctgttttagtaccgagactttcttatccgttagatcgggatatggaacttttactattatttggaatctagaaagatcatccttaaggtccactcctaagaacatggatggagatataaggactgtgggtctttcactttgagtatgttttagtatcatttcatttctatcaaactttggattggtttcaatgagccttgataaatttgccttcgacaagttattctttataaactgaagctgggaataagacgttgtgtgaattatacctttgtcattcttatgcacagaaagaagattatcaattactttgactatatttggcaaagactcgctcatagttcgtgcatttaaccaggctacattcatcagatagataggtctatttttaattgggaaatcggaattttcaactcgtataaactttacgtcttcgttctttaatcctacagctttacatagattttctttactcaaaatagtagcgctcatcaacaatgaaacggaacccttatcaaaaatatctgtaaagtagtttgatactactagtggttctaatttaattcttgcaagtttattgtctatttcatttttagtaatatttgtaactagccagttttccttattaatacgcaagtcctctaaaaatgtcaacaaatttttttcataatttatggcatctataagattcttttcgctaacatgaatatcctgactgatgccccctgatcccaaaatatttgcggctttctcaacatacctagtaaattgctcttttaatcgggtacaaaaatctatccaggtttcgacatcggtctgtttactatcgggtaaatctatttttggaaagaacctaattaaagattctttactgaatatgatatttttgaatgaggatacttcagattctagcgtgtgagcttcatctaagatcaagagctttcttttatttacgccagatgaataaaagagatcggatagaaaatatttgtaattatagatagtatggctagattttatagacatccatttttgatgataatactcacagggcttccattcgattcgaacaagctgggaatgttcttttgctttgtcataatatttttttaaagcgtatttatttatctctaggttttcataaatagttccttcagattttacatcataatcgctcattctagtcttatagatacaatcaaaattatcatctttcaggcaaggtccatattcacaactttctcttatgcccatatcctctttaacaatgcaaggaaaattatttcgacctttaacctcagagaggtatggaaaatctctattgtactgagtttgcagatcctttgttgatgtgcaaatatgagagcttcctagaaatcgtgcaagcgttactgctacggcactctttccaaatcctgttggtgcttctaaaaagatgaatttgtaatcggatttgagtgcttggtcaagttcatcaagaactttatcctggttaggacggatataatcgagagggaaaaaacttcgcatagacataagaggggatgattatctatacactaacggattattaaagcgtaaccaaataatcatgcgatatacatatacaattcaattatattttttggagtggaatatactagaaatagagcgacaattcactccataattccatgacccattatccgcatgctctttgaatccggtttaaataaaatgcacaaatcattctttacaaatgccagtggtttttcaaatgaaattgataaatttgaatcggacattttctttattttcactgtccgtatctgaagccctacactcatcatataattctgtgtttcagatatttcttccttaaaatattgatttttgataaacgctaactgaaaattagaagctgctattttagcaaaccctggagatgtaataacatctcctcttgatatgtccttagcagatgcccccttaattgccaggcccacacgagaatcttttttcgaagtattgactggatcatcatgcatttgaatggatttgataaccacggttttgtttgatgggcttaatactaattcatcataagttttaatttctccatgtttaacggttcccagaactactgttcctactcccttaacgtcaaagacatgatctactacaatacaagcttcagaggattggaggttcccatcttctttatcttttagatccgccactgtttctgtttctgtttctgtttctgtttctgtctctgtttttgattccatttcagatatactgtttttcaactgttctaaactatccactatttgaaatgatgataagccagtattctttatgatatttcttactttttcaccatcgatctcataaccatataaaataaaaccactctttatgccaaaaatatcaactgctattagctgttcgccaagaaaagaatcgagtttggagatattgatgattgcatggttagacatcgctacagattgtaggaggggctgaagtttttcaggataagtattagggaaacaataagaaatgattttatcactagtttttctatcatatatggtaatatcacttgaagttcccttttttcccaattcatttgcaattgttgtatcgcctagtaaaacaaaattaaaactattcaaaacttttgattagtatagttttttttaaataaaatcgttgcttttagatcaaattatgatcaaataacccataatatagaacattctaatgcattgctttttatatagtacaaactcatatagaattcctgagctgaatatattaattggttagttttgaagaacttggtattgaaaaatctatagttaaagcattgaaagaaactggaatcgaacaaccatttcctattcaagaatcaataattccacttattttaaaaggagaagatgttattggtagattgaatacaggaactggtaaaacagccgcattcgtactacctatgttgagtaagttaaatccgaaaaattttctacaaggactgattttggttcctactagagaattggctatacaaattacaagtactataaatcaacttgtaaaatatagcaacctgaggtccgttgcaatctatggcgggcagaatttccaaatgcagaggaaaatactcaataaaggtgtaaatattgtagttgcaaccccgggaagactcttggatcacatgaatcaaggaactattacgttaagtaaaattaatttccttgtccttgatgaagcagacagaatgttagatatgggctttattgatgatatcaaagatatcctatcatatattgatagtaaaaagcaaatttgccttttctctgcaacaatgcctgattccatcatgcaacttgccaaagagcaaatgaagaatccgaaacaaattagcattgaaaagacaatctcacaggcaaacataaatcaatcatacttgatgctttacgaaaaggacaaattccaacagttagttagcactttgaagcctatttcaaacaatggtaatagtcacatcattgtctttacggcaacaaaacaaagagctagagatctgacgtataaattaagaaatgacgacttttttgtagatagtatccacggagatttgaatcagagacaaagggaaagtactcttgcaagatttagaaataagaaattcaatattcttatcgctacagacgttgcatcaagaggactagatatcactactgtcagtcacattatcaattacgacatacctgatgatgcagagacatatttccatagaataggaagaacagcaagagcaggagcaaatggtaccgcactttcctttgtttcccaacacgacatgtttacccttagaaaaattcaaaatatcgcagcaaactccctaaagaatctaaacacagagtatggaatagaagtagatttcaaattcaatagtgcccctaggcctaatcgtttcaggtctaattatggtagaagaggatacagtcaaagcagggttccaggagaacaaaggtctaggaataactatgacaatagcggcagtagcagatattcgtctaggaataactatgacaatagcggcagtagcagatattcgtctaggaataactatgacaatagcggcagtagcagtagcagtgggtatccatccagaagactaagtggtattaccagaccccttggccgaaagaataattataatagagactctaactagagactcgaactaggtagacaaaaaatagtaaagaaaaatatgcatgggactagtcccgctaaggatagtcaacatgcaacaacactttttttcataaatttctgtttgttaataatatagttgtaaatttgttcactctaatttctgcacagagcgttaatacttatccgtccttaaggattgaacttgggttacggcaggtcataaacgttgaaatcaatttagatattttttttgaatagatattaaatttaaaaaatttttaaaaaaaagaaaagattattctgatcttattcgtgatgctcgccgcttaaatgagcgatctcattaacccctaagactatagtggatgttgctggaaagtcaatatcctctgtagagttattttgaattgctatatctgtaataggagttgtttcatttgatgcaatatctacatgataaagacagagatctccaggtgtagacagtggttctacaaattctaattcagctggggctagattaggtgcttgaccaatcaatacgtttacagcggtagcactatcttcactacatggaagctttgctgcaatgtggccattcataattttatatggtgtagagtcataaagatgaataaaactgtcttcaggtaagcttgcaccttctaataatacagtctgggaatccctagtgacagtgtttgttgaagttttgtttgttgaagtttcattgtgttgctcgtctgtttgttctacaacttcatctctaggtgttgcgctagtggcattatcggtaaccaatccattggtagtatttgtggttgttgttgttgttggcaataattcttcttcagctggtacactgctagttccattagtgaaattttgctctgctgcacctgttacattcgaagcctcagataaggttacattttgttgtgcgtatacatttccattaacagaaaatatggctgatacgagtacaaaagctataaaaagggatatttttgtactagttgatttgttagtcattattttatattaaaaatactggtatttatgtaatttttagtacaattatcgaaccgaactattcatttaccttttttatattattgcgtctcctccttgatctcacaataaatgaaattccaatcaaagcagcaagtggtatgtaaatgtaataataattcatcataaaggttagtaaaagattatagattctttctgctattggaacttcaacattaacttcgaatacagagttcaaagtattgaaggtatagaaaatgtccttaatatccacaaataaaagatattttccaggctctctaaatacataatcaaaatcgtaatgtccttgtctaacgagagtaaaattattgggatttgaaaatacaggatttccatctttaaaaatagaaaaagaaacaggaagctcgattaattcgtctcccgtatcagaagtaagacgaaaaagaaaagatgtatctttaccaatcataggttttgatggatttaccaaaagctctataatgtaatttcctattgattgcgtttgagtgccattaaagctatcatcactacctccaaaaaaagaatgtgcaaaagctagttgctcattgccaactagagagaaacaaattattactataaataaaaaaaagatagggacaaaaatttttgatgattgaaaacgtcccaagattctgatcagagaataataatttacaagaaatgttaaacctaggaaaataacatatctaaaaaacaaaactttggtagatggaaacacatccataattggacaaagtttaatataaattcaataaatcataaccataaaattacttcataggtatgatgagaatgtactccgcatttttttattattaaggtaataaaatatatgatttattacactcggacaaaacttgaaaaacgataggattatcatacatcaaaattccatgattttttaaaaacatggttcatcctaaagctgctgatgaacatcaccatcagcttgaattgatatgccaaggtaaaaagaatattttaagaatttattaagtctggtttatatgatggatatatattgacagacgagtttcaacaacaacaacaacaaccacaaaatatatgcaaaaaaacagtccaagaatcagaagcagagactacaatagtaatgctgccttctgatgcaaacccacttggaaatgtttttggtggaatgattctaaaatatgtggacctgttggccggtttagtggcaaaaagacatgcaggtcatgcaaacattgttaccgcaagcatggatagcatgacatttctaaagccagtatatattggaaacgctttgattttaaaggcaaaaataaattatgtcaggcgaagttctatggaggtggaggtaaaaatagaagcagaagatctaaacaagtcccaaaaggttcacacaggtacagcatatgtaaccctcgtagcactagatgaaaaaggaaagccaaccgaggttcctcaattgcttttaagagatgaggaggaaaaaagaagatttttagaaggacaggtcaggatggaaatgaggttaaagaataggaaaaaatagcgcaaaagcggatccacaacatagcttagggtttattcactggtattgccacaatggccttgacagcttcaacttcagtattatatatcaattataaaaaaagagtaaatccacatacaatactctcccaatgaccctcaaaagagcactttgaggaagggaatccagaaattatcagaggttagaaggtatccatccctccttcgaagggggtgttttgatttttatgctagtttctggttccaagagcatagaggacaaaaccataccaaccacgatatgaccgcttttggacattttttgaccaggtttttttgaaaaatgacggtattacgtagtatagtttgactataaatagcaccaaaaccgctgaagcagtcataaaatcttatataaacggccttccaagatcagaaatttcagcaaatacgggtatttctgaaggggcagtctcaaacatcatcaaaaattggaaagaatcaggagaagaaatccaagatatcgaggatattaggggttttatgaaacagatatacaaaacaggtgctacagtcaaagaatgcgctcggggttttagaatggtgcaaatgatgcattgtttctacgataataagagtcaagatgtagaggttcccaccattttctgggtgtttattaatgacattctcaggccttgtataaagttaggaatcccaccgcccctcatccctgcttggataaaggatctaatagatttccttttgcatcccaatagacatggtgatgtttgtttctactctaatagacagaatataagcaatcaacagcctatcaataaaatctcaactaggccaaattcaattaagacaaaagcttgtagattagactatcctaacagcactgaaaaactcgaaatagcagagatatcatatgctaaaaagcaaattttacggcaagaaaataatcttcctggattagttcataatagaaaatatttggtagaaaacccaaacttttcttttatatcaaagttatcatctcatatcaacacaaaaaagaaagaatgtatcgaacttgaagaacgtatcaaaggacaacaaaacaaacttgaacaactaaatttacaaatcgataggtctcaagccctcagaaattatgtgattgatgaggaacagtccataatggaggtgtataactggtatcatgaattgaaaaacgcattaatgaaggattacaatattccaatagaagatgttcacaaatttgcaagagttatccacgagtttagcaaaagtggatatgatgcaatctatattcttaaagattttttaaaactcggctatatgaaatttgaaatacaggtccttggcactgaaattaaacaactaaaagataagaaaacagctatcaagagcacattgaaatttgatgaatcaaggatagaagaatgtaggcaaaccatggatacatactatcaattagaaaaaaagaattttgggctagacaaattaagacaattaaaagacatacttgtagaaacatctagagtcgaaaaaaagccgattaatgtagtatcaagagagttctttgcagatattcaacagaattattatgatacagttagatttgaatcaaaagtgatagaggaaagaaagaagcttgtggaggtcaagaataagctagacgaatcaactaacagactagtaatgcaaccccatctatacgcggcattaacaaatcttttgcaaaaaggagtttctgaaaaagatattctggatacctataaaataatcaaaagctttgcaaacggcttaactaaatttactaatactttagaattgccaatctataatgaaaatgactatagtggtatcgaagtacaaaatcaagaccttcaaactaattggaaactaataatagaaaaaataagaacatacaaaaatatgctttcagatgtaaaactacagatcattaaatacaaacaaatcaaaaaggaatggacagtactttatttacagaaacagaatttatataaagaactcaatcgaggcctgtattatttatgtagtagcggttctagtaagaatttattctacagtgtattatgatttggaaatcatagtatatacaaggagaataaaattaagaacagattttagttagattactgattggagtgagtaagtgagtgagtgttatcttctaccatatattaagaatgtatcagcacgtagagggaaagaagaaatttgagagaaaatcgttaacttatcatatttgctcataatcatttatttctattcaaaacctttgattcatctagtggatatacatacacattagctttctcatcttctatttttaaagaatccagtattatggagcccttcaattctgatttgtctataccccaacctttttttcccagaatacaggtgtcgtctatagtatagctaagaatagcaggattgaaaggctctaatgttattctttcttcacctaacaaccctttagtccttatggattcagacaattttctgccaccgtcatttagtagatacttgacaccatatttttctctcaggatccaaagtccattgtgaatatcaaatttttccccagtatcgataaaagtgataaggttggattctttgatgatctttgaaagatggtcataaactaaactggtagtaagtattattaccttttgattgttctttggattcagcattgctattttatttttctcataaaattcgaccaaatgtgattcagaaatactttttagtgaacggatggaaacaataaaataaaaattatcaggatccacaagtttctttgaaagattcaaaagttcgctgtatagagccgggtgtggttcccttaagtgttttccaaaaaaatcccaagaccaaatttgaccatagttctccatcatgttatttactgtaactataatagcttgatttcctacaatgatacgatgcaaagaagcaaatatgttgtcacccaacttcctactgccacctgtgagtaacgtaacacctcctcctcttaacccaagaagcttaaaaataaaaactccgctatttggtgaaaaagctttagctgctataaaacttgtagcttgatatggcacactcatcttattaacgaactcatctgaagccccaattactatgtagggaattattttagatagatgactacattttaaatcgctattggtatcatatatttttacacctcttttcttataatgagtaaaagtatcgtaatctaatagcttattttcaaaaagcaaaccgagtttatcaaaataatcctttttgattgaatcagaatccatcaagttctttacacaagacacaataataagtacacacttgattattcattctttgatacggagtactggacttaggctgagaggcgacaactaatatcagacattatttctattttgagatgttttattttattttattttattttattttattttattttattttatttgacaaaacaatccaagtacaatgtttacataatcggttctttaaatgagtaataataatacagatctagtcaagtagtttgcaattacagatatcaagatcggggtttcgggctttgattatcacaatgattggatttaagaaatgaaataattgattatcctacgcactcgataatcaaaaaaagaactaactaaaagaaattagctgatgtagtttttggcacatttttcaatttcttctgttgacagataatttcctttgtcatatgctctttcaaagcaggtagtaagcaataatttgcgctcttctttattcacagtattttcgttgtatacttttgcatcactgtctttgtctttgttatcatcatcattatcgttgtcttttgcatcactgtctttgtctttgttatcatcatcattatcgttgtcttttgcatcactgtctttgtctttgttatcatcatcattatcgttgtcttttgcatcactgtctttgtctttgttatcatcatcattatcgttgtcttttgcatcactgtctacatctacattcacattgttagtatcattaggattgctgttagttgttgttgttgtaaatgaagaggattgtactggggcagagctaccagcattagaattcgtatccacgactcgaactatgcctacaccagaaccatctgtcatgcctgtttgaggaccatcagatgacggtaagccctgaccttggctgcttggtgcaacaggggacattgatgggctactgctgctgctgctgcttgagctaccagtaccactattgttacaattttcagctgaggaagatgtatatacatagcttgacatgaaattcactacacaatcagcattttgcatggcggagtctttattaggatcgttaggtgaggtatatgtttgaaagttattgttgtagtttaccagatcacctggagcagcatcaaccaatttgattgatgaaaagttaactgaacttataactaataataagaaaattgcaggtatgagactcgaagttagtttattgtaatacatggttatgattttttagtggatattctttatgaggattgtttttaataattatgtacgtatttttttcttaaaactataattcaattctagtagaagattaattttctttgatttctatcacgctctttgaactttttatgtgaatcaatataaaaagtaaatattcaaataataaacaattgaaaaaaaactaatgacaataaaattattgggaattgcaggaagtatgaggagcaattcctatagttttaaagcattagagcacgctttaaaaatagctaaagataattataatgcagagattaatttatttgacctcagaaaaaatcgaatgcctatttatgaacccaatttgaatcacgatcagattcaaactgcagaaaaagaaagcttacaaatggcagatactctagtcagatgggcagatgcgattattttgacttctcctgattatcatggttcgatgtcaggtgtattaaagaattttttagactatttttggaaggaattttctggaaaaacatttggatacatttgtgcatctcatgaaaaaggacttacggtaatggaacaaatgaggactgcagtaagacaatgctatggatggagtatgccctacggcatttcaacaagctccaatgactttgatgatgcaggcaacttaataaacaaaaaaacactattacggatagaaatgctatctagagatatagtttattacggaaaagttattagaaatcaatttctcacagatgcatcaaacaaagtcaaagaatcttattcttttcttacatcagatagggactgactggaaaataataccaatataaacattttattagtttctactataatttagtgacatagaaaacaatcatatgtcttaatgacaatttaacgcataactacataccaattgtacaaaaccaatacaacatcttttttgaaatgggcaggtggaaagagaaggctagttacattattagacaaatttacaccaactaatattgacagatattttgagccctttttaggtagtggtgcttttttcttttatttaattcaatcaagaaaaccgtttaaagcttacttatcagattcaaatccccatttgattaacacgtatagagaagtaagaaataacatacatgaactgatagaaatcctgatggatcatcaaaacagttatcataaaagtggagaaaaatattactattttgtaagggatgataaaagtagtaaaaccaatacagaggcagcagcgaagtttattttcttgaacaagacatgttataatggattgtacagggtaaacaagataggaaactttaatgttccccatggcaggtatttcaatccaaaaatatgcaataaagagaagcttattgattgctctagtttactcaatagtgcggaaataaagattgcttgtgatatttataaaaatactactttaaagtgtaaagacaatgattttgtttatttagatccaccctattttccagtatcaagaacatcaaactttacagattatactaaagaaagttttggaatgcagcaacacaaagaattggcaagtgaatttgacagattagacaatattggctctaaagtattgctttctaattctaattcagattatgttaaatcattatataaaaaacactgcattttaaaagtgaaatctactaggagtattaactgtaatgcggataaaagaagtgatcaccaggacttgataatctcaaattacaattacaacagaaaaacaatagatactgagaagacaacaacccataagttaaacaagctgataatatcaaaatagtaagcgactgatgcatatataggcatttatacatcatatcaaccataatcaaaaaatataaaaatattttttagattctcaagctcacttagattaaacctaccatgcgaagcttttgaggcaaataggtttcggatagatatttaaatccatgtttaaagaaagcgtctaattcacatttttcctttttatttaaaaagagatttagttctttttgccattgtttattttgcatccaaggtttctttttcatgtcgttggctctattaatatcttcatcagttgctgtcaatcgagcaacttctggaatattatactgataaatatctgaaaacatcattccaaggacctgagcatttggagttaccagcctttcactatcataacttaacgattcgctaccaatcttgtaccttaacgcaatacccaagccccaaggatcggcatcggcaaaaactaccacaggttttttccactgttcatttagaatcttcaccatcattcttgttgcacgatccggttcacctgacccagttaacaaaatagcgttgtatttctgaataaaaccagatttccttatattatttagaacggtgtctttttcgaccaccattacaaaatccgccttgacatcatctatttggacatcgccaatgttggttgggataagttgagatgtggctctgcttccaagattacaatctattatgtcacccccaacccgcaattttattggcccagaaatcattcctttaggttttgaagttacagaaaactcttctcttgggattccagttaaaagctcaacagcttttatagcattatcagaatcctcttggcctgtccaaaatttttgcttgtttttatcgtctcctacattactaagggtagcataatacatccctcgaatagtactttccatatcttcatcaattaatttttttactgcattggccatgaccaaatattgagcaaaagtgggtattttctttacgctatctggactaacttcaatttttttttcacctgttgtaagcattcttttttcatccgaccaaacagtattatcatatcctatttttggtaaatctagaataggcatttgattttgcttgattacatcatcagatattttcctcataatcctttttatgatagtaacaaattctcgtttttttgcagtagacaatagatagattatttatttctttttacccttatttacccttttactataggaatctatcgttgattgaacttctttggctttagactgatttggaggtttattaaaggatttatgaatttttgtcctgtttatacttgttttcacagtgaggcgcttgtttttattatttgtagtgtctttttctttgatgattaatttcttattcgcacctttgtgttttttatttttagttacatttcttgtaggatcaaccttacctaatttaccagtaaagctcaaaccgatctttttattatcctttttaagttctatctcgtttaagtttggtttagaaaaggcggcatctttggtcttttgagtctgtggggccttttgagtctgtggtatatcctgtatatcctgctctaaatctatatctgcaagatccatttcattagatgcttgaacgggtaaagtaggatcagcagcatcagatatatcgatttggggtttcttggataaatgattctcaatcaatctagaaaacgattcgtttaattttgaatttttactcccaagcgaatcatttattgaatctactatgaatggcagatagtgtttatacagtctgatcttattttctgcctcctttaatttgagttccttgcgtatttgtgtacttaacttcctatatagttcggataaacaggatttcatataatattttagttcgccttctgaagcaatactttcttttccggcggttttgtaagggattttggttgaacaaatatggaaaaaaatatgcaatggcaaaacctcaatgactctatctttttttgattctttgttgacagaaaattgttcctttgcttgttttttggtgatccccatcttattaatctctacttctgatataacctctctagcaacatcggatccttcatcgtataatagagggattttattagcaaaccgatataacttgaatgaaggaatatccccaccataagccaaaccagtttcaactactgtgggcctattatttatgacacaagttcttgatgtataagtagtaaggacaggcttaaggactttaactgaaaaatttgattttgataaattatttttgaatggtgttggtgttggtgttggtgttgatttctcattttgtattgattcaaaagtcgatgcagtaacagtgtcatcggttccttgaggggcagaatcggtattattaagaacaggcttttcaactgtggtcgttactcctgtgttatcgttatcgttccctttatttgagacaatggtatattccgacatcattcctattgtaaggacttctctaccaataggactcaaatgatccgtattgggattctggaatttagtttttttgcaaatgtttacaatcttaataagatcatgctcactaaaatcaccagtggaggtctttaatgacagtccggtattagtgacgatatccttcgctttttcataagaaagcttttgaaatgatgaacttaaaatttttggtaaagacattttttgagcttggaatttagaaatggctttttttaaggtttttagatccatatcggaaggatgaggcaagatttcttgtgccggattaggcattatggatgtccttctattaaattgaaatattccatcatctgtttcaaaggttatggatgaataaggatttacaatactcgtttcagaaacatactcataaattttgttcttagtaataggtactaactttgccctcaaaataacttcgatcctaaaacctgatgtaccctcaatacgacgatgttgtttaagcagtaatttttttgacaatacaataggcttattggttccaatatcagttcgtaactcaaaataatattcatcttgctcatcaattgatttattccaaacttttattggaaaatcagtatcttttgtagaaaaagccgcaaccattttcaaaccaactccgaagagtcccctttgttgtttctccatgtattttgcagatgttagaaaagagcaaacggctatgggcaatttatctgaatttattcccgttccattatcttcgcaagtcaacatccacaaatcattagattgatcaaaaatttttaatgaaatcttaatggacggcagaatcgaaaaactttcgcaagagtccaaagagttttctataagctctctaatggccatgtataaaatacgttcaccggtaaaaccagctaatgcggaattatccacaaaaaactcggattctgccttcttattataaataattttatacttttctaactttgttgctgattgagagctatccctctttaattcttcaacttgtacttttacttttactttttcttcggctgagtctaagacggtggaggcagatttattcggcatcaaatactttaattaatatcttatttgatttaatcgttattcaaactctccttgtgattacctacttaatcgatttgagaaccatatggggtagatgaattttttaattcttttaaagtaagtggaagaatttctagataataccgcttcttttccttttgaataactagataatcggagccagatccaactacatttccatccaataattctttaattttcatacaggttaattagtacaatagtcaatattttggttttccataataaagaatacggttgatagctgatgaaacatcaggccaattaatcaattaattaatcgactagttagttgaattgattttcaaggttgataaaaaaatatttaagaattcaacaaccaatattcatcatggacgccagatgtggaaattgcaataacaaggctaattttgatattgaaaagaataggataaaatgtgaaaaatgtggtattgaaatagattacgatgattatattgaacagatgaaagaaaaagcggttaccttagcagataattttcaatcaagttgggataaaagtggattttaattatataaaaaataacccgcatgcaacaagtttattagattaaaatataagtttaggttgaaaatttcactcaacaaaaggcaatgaagaagagtgaaatttttagcaagattaattaaggttgaaaatttatctaataaagactttggtagaatttaaagtagttatctcagattcaaagggtaaaagcactaatcaggagttaaaggataaaagtgctcaaccactattaggttctaaacttggagacatattagaatcgtctattttaggatttaaggaaggaaaaataaagttaaccggcggaagcgacaaatcaggtacacctatgcgctcagatctgcatggggccacaaaaaaatatgtactcatgacaaaaggagttggaatgcgaaatctagaacccggggaaagaaaaagaaaattggtcagaggaagcatgatcacagaggaaatctatcaagtgaattgtagtttaattgatgcgacattgcctgaaaaagagcaacaaccttcaacacaagaagaagcccctcaggtaactaaataaaattaaaaaaattttttttatcttctcttataattatctagtttaacactttaagtaaattaatatttgaatgaaaaaatacatcatgtattgcactggaaggatactttacctgaatggtatattcaaaaatatggttatcaaccatgtataaacataggtacctcaggacatgtagatcatggtaaaactacacttattgaagctataacaggagtttggacgagcggtcatagtgaagagcttcgacgaggaattacgattaaagtaggttatgcagatgccgctttttataaatgtcccaattgtcagcctccatcaaattattctgttcaacccaaatgtggtatatgtaattctgaagcagaattatcaagagtagttagcttcgttgattcccccggtcacgaaagtttaatggctaatatgctttctggaggtgctcttatggatggtgcaatattagttgttgcagcaaacgagaaagtaccacaaccacaaactagagaacatctactagcattacaggtactagggattgaaaatattgtaatcgtacaaaacaaagttgatctaactgaaaaagagaatgcaatagaaaattacaaccaaataaaagaatttgtaaagggaagtgtggctgaaaatgccccaataattcccatatcagcacagcacaaggcaaatatcgacgtattaatcgaacacattgaaaaatatattcccacgccagaaaggattcacaacaaaaatggtataatgcacatattgagatcttttgatatcaacaaaccaggtacacccattaaaaacatcaaaggaggagtattagggggggctttaattcaaggtgaatttgaagcaggcagtgaaatagaaattttgcctgggatttacaatgaaaagaagaacagatatgaccctattttttctgaaatagggtcattagccactggtgcaggtttggtggataaagtgaaaccaggtggattggttgcaattggttcaaaactggatccatcattcattaaaagtgattcattaataggtgcagtggttggaaaaccgaattcattgcccccagtagtagatgaaattacgatagacattaatttatttgataccgcggttggaacacaggatttggttaaggtggaacccataaaaactaaagaaaatttaaggttgaatataggaacagcggttactataggaaatgttataaattcaaaaaatcagaggattgaagtaaaaataaagaaaccgatttgtctgatgccccaaagcagagtagctttaagccggagaatagcagatcgatggcgattgataggtgcaggaatagctgtataaattaagatggaggttatttctgataccagttttttaatggttttatgctatgatccagtcaaaaacctggacgccctagaatctagatttggaaaactagtatggctcattcatccggagacgattaacgaactagttcagttagaaaaaacggcagggataaagagatcaaaaattgccagtctttccttaaaaataataaatgaccagctaaataaaggggatttcaagtatttagacaaaaatgaacttgataagttagaattaccacaacaatccaattcagcagtggattccatattattgaatatttcagcggaaaaaagacggcctttggcgacaatagaccagaatttaattaaaagggctcttaaaaaaggagttgatgtgatcacattaaaaagcaacagaattatttttgtaaattccaaagttaggtcaaatttaaattattcctaataaccttctttatacatatatgatgaatatagaggggatcgaaataaggtggaatggccatgatggttttagacttgaagtaaatggtaataaaatttatgttgatccgtataaattaatttcttcgtatgctctcaagagtgatgcagatatacttttgatttctcataatcattttgatcatctaagtatagaggatattaataatgtaataaacaaaaatacaaaaataatttgctctcatgaatgcatggaagtattaaaaaataattatgcagataatgaaataatccccttaaaacccaaagaagcaaagattgttggaaatatagaaataagaggtatagaagcatataataccgataaaaaatttcatccgaaaaaggatgaaaaaatcggatttatcgtatatgtaaatggcttaaaaatataccatacaggggacacagatattattccagaaatggaaaatgtaaatcctgatattttatttgtgcctgtatcgggtacttatgtaatgaccgctaaagaagcggcaaaagccacaaatgagttaatcaagcccaaaaaaatcgcgataccgatgcattatggatccattgttggaacagtcaaggacgctgaagatttttgtaatgatgttaatatttgtaaaaccgcaataatggaaattgaataaatttgtctaatcaaacatcatcactacgaatgattaaatattaagtaaagtttaaaaaatcataattagcgtgtaggtaatggcaggaagagagtttttaaaatcagagaagagtcataaggcaactaagtatcttctcataatcgcagtattatgtttagcttttagcattgcattcattcttagagcatacccaatcaaatacggcttttatttaaatgaatttgatccgttttttgattatagagctactgaatatatagtaaataatggaattggaccatatcttgagtggcatgactacaagtcatggtttcccgatggcagagatattgctggaacatcacagtcaggcttacacctaactgcggccatgctctacaaaatttttggcattaacatgtctttgatggatttcacaatatggtttccggtaatcataggatccgcatccaccgttcttatgttcttggtagtaagagctataaccggaagtaccatcccaggattaatttcatcccttttctttgctgtaagtcctgcgataattcaaagaggaaatctaggatggtttaagtcagagccactaggtcttttctatgggttaggaggcacatatctgtttttatctgccttaaaggataaaaaatacaaatttttgatcccaaaagcgatttttgggggaatcttaatcggacttgcagtaacctcctggggtggagctcagtatttcgtaatccctattggtatctttataatagtccttggatttgtttcaaaagaccttaaaaataatttagtggtagcggctctttttacggcttcagtaatcttagttgccggtgcttttccgagaccaggtatgtcatttgttctgggattgccaggcttattgttaatgactagcacgttattcctattagtcactacaattgtaaggttaaaaagttctgagagaaggactactttaaaaactgcagtaattctaggaattttcgtaattataggaatgtccatagtagtcggtggcttttacaaagtgccttcctttagatatctcaatgcaataaacccattcctttcttcagagaacaaactagtagagtctgttgcagaacatttcacacccacgatagtggattactttagacagttttcaattctgatcatttttgcaggactaggaatatggctagcgtttaagaataaaaataataccaatatgattttcgcattgataataggacttactggaatttatctaagcgcaacatttgcgaggcttttggtatttgcctcgataagcatcataattttatcaagtataggaatttatcaatcaatcagggccataacatcgatcagaacagaagcggaacaaacactagcgccgtcaagtatgaacggagtaaaatcacaaaagaatacgaaactcaaaaaagtatttttaccatatgcaggatttgcgtccattttgataataatgttgaccattcctatggtttacgatgctaatacaaattggattacctctgcagatgttcctacatccattgctaatggaggcaccaattatcgattaacaacggacgattggatagagacactagattggatgtctaagaacacaccatctgattcggtggtaacagcatggtgggattatggatattggataacaacgttgggaaataggacatccattgcagataatgcaacaattaatcaaacaagaatagaaacaatagcaaaaatgttcatcagtcccgaagaagaaggatggaaaattgctaaagacttaaaatcagactatattttaatatatatagttggacaaaaattgccgtctttggatcccaccaatcctagtcctctatatgttttaggaagtggtggagatgagagtaaaaaacattggtttattcgaataggtggatttaatgaatcagaatatgtagaatctaatggagatacaccaaaacaaaagtactgggattcgcttctggggaatatgatgccgtttcaacccgttggattctttaacccaagtagtggaacattatcaccagcataccagcctaatgcaatacccttttacgtacaggacataaagtatccaaaaggtaacacttcagaaccactatcattagaatacgcttcaaagagttttgaaagtgatgatccaggattattttttggagtgttggtgtacaaagtgaatcataattatgaaacaaacaatgtaacaaacggtaccaactcctcctccacctccacctcatcctctgccaatactactctagctagcaatgtaacaaacggtacttcaaatttagttttagaatctaatattttaaataatatcgacaatacaacatcaaacaatagtatgactagtaccacaaatcacacagcaattattgaaactactcaaggtccaataaaaattgagttttatcctgacgtagcaccaaatcacgtcaagaactttcaagatctggctagtaaaggattttacgatggagtagtatttcacagaatagtaccaggtttcgttattcaggttggagacccaaatacaaaaaatgacaacagtagtagagatacttggggtacaggaggtcccgggtacacaataaatcaagagttcaacagtctacctcatgaaagaggaatattatcaatggctcgaacaaatgatccgaatagtgctggttcacagttttttattgtattaaatgattcgaaatttttggataatcaatatacagtatttggaaaagtaaccgaagggttagagattgttgacaaaattgctaattcaactactaacgcaatggatcagccagaggatcccaatgcagctcgaatcaataaaatcatccttcaatagatcgtaaactccatccaagaagaacacttttttattttgatatcaatgcgtagtaaataaatggtaacacaacgctcacatctgcatgaatagtaacttgtttagcttgtgtagtaacctttccccatgaaatagcctcagcaactggagctccgcttaaacttccgtcccattcagatgcagttgtaacataaacggcatagtccagtccacccctatactgattccaccagagagtatgatgtttcgaaagtcctccccccatcatgaaagctccagtcttttttgcatcaaaaataatctcagataacattgtctgatcttttaggatatcaattttgaaatctttatgagattgattaaatagccaaatctggttccctactgcaccatcaacaattccaggaacaaatacaggaatattgttcttagatgcccaatacaaaaaggatgattcgtttaaatgacttccaatatatctaattatttcagaaggtgcaaattctcgtgaagattttgaattatgatatagtttttgcaaaataggctgaactttattttcaataagaggtccataattcttatttggtattaaaatgttacctaatctatgaatatctttctttagtagaaattgatcatccaatctaaaatcaccttcataatatgaggaaaatgattttgcaatatcatgatctaatgcaccgcatgttgtgataatacaatcaaacatcttgttctttatcatatcacgtacaatacctctgttccccgtagacataagggcaccaacgaatgatatgaacctcgtgcagtttttttcattttgcatttttttgagtatttcaacaccattagctaaatgtctcccctcaaaaccaccagaatcagtcatattttttaaaatctggtttatcgatgttttttggtttatagaaatatcctgtacatccttggataaataattcgaactatctttagcatcaacatctttttttttgacttgtctcaacaaaaagatgtaatattttcacattaataaatcactttaaattataatactttacttgtgtactctaactagattacaattataataagttcaatctagaatagatggattgaactataaccgacatagtttttcaggaaaaaaaattgaacccccggaaatctttgctgatatgaaaatatcagaattgataaatttattcagaaatacaggctacaatgcaagaagactagcagaggcggcagatataatgaaagaaatggtggaatctggtgcgacaatttgtttaactatagctggagcattaacaccaatcggctttggaaagattatatcaactatgatagagaacggttttgttgattggattgttgcaacaggtgcaaatgcatatcatgatttacactttgcatatgacttgccggttagacaaggccattttgatgtggatgatgatatattgtattcgaagcaaatcgtaagaatttatgacgtatatataaaagaatatgggacacttcaatctcaggattcgataatacaaaaaaatattcaaaacatatatcaaaaacatattgatattaccaatagctcaactgctgatctatcttatttaataggaaaagaagctgcagaaaaatccaagttccctgacaaatcattcatggtttcagcatacaaatctaatgtacctatctatatgccagcactcagcgattcttcaatcggattgaatatgctaccttcaatgcttgatggaaaaccatctataaatcctataaaagatattgcggaatcaacagcaattttgtggaaaagtgatatttcaggcggattagagttgggtggaggagtaccaaagaacttttttcaacagactggcccagcgctgtatcaaatattaaaaataaaggaaggaggacatgatttcctagtccaactcactgatgcaagacccgatacaggtggtctatcgggagcgacattacaagagggtaaaagttggggaaagattaagacctcacacaaaggaaacgtaatagtttatggcgatacatcggtatattttccaattctttgttcttatttgctaagtgaatgcaaaccaaggagtaaaaaacaaatttacaagaaaaaagattcctgggttgaagaaatgaaaacacaatatatgaaaaagaaaaagccaaaaaaaaggatggataaaataataggaatatagaaaaaacaaaaaatagcctaaggtatctgtataaatatgtcagaattcaatcaacttttggtaagaagaataagaaacggtactgttattgatcatatagaatcgcccagggcgcttcttgttctcaacatattaaatattacaggtcaagagggaaatgtaataacagtagcattaaacgtacctagtgttaaacagaagaaaaaagatattataaaggtagaaaacaagtttttggaaaagaaagaaaccgacaagcttgcattaattgctcctaatgctaccatcaatattattaaagattataaattaaccgaaaagagaaggattcagcttcctgataagataattggtttttttaaatgccctaatttaagatgcattacaaacacagaagaaggattaagttcaaaaatcgaaataattgacaaaaaaaatatactattaaaatgtcaatattgtgcacgatctataaccacgaatgaattaattaaatagaacacaaatatcatgatgatgatgatgaagttggcttaaaatgatgagatagaaagccgtttttgtttttttgttattttcaaaatgatctgaagaaagactgaacattctatgctacgagctataagtcatatatataaatgaaaagtgttatccctctcctccttctacttttcctccactaaatgcaacaatctatatgatcaaaaatgcttgcagatatctgtcacttttactcccctctgcaaacttcacaggtataagaaccatcagcatagagtagaaaatcggaccattcaccgcattcgtcacagtatccagaaatattgcgtggagagcgtccaatctcgcctcttataagcagtgatttttcagaaactacatcaaataattccggcgtaaccgcaagaacatcggataccgaaataattccgactaaattatctttatgggtcactcctaaacgcttaattccatgttgtcgtaaaagtcttgcagcagatgtaatactttcctctccagtaatagtaattaactctttcattatatccgatgctttaatttcagaagggattgaaccgacagctattgctttggaaacaatatcccaatcagtaattattccaaccggtttatcgttatctaaaataataatgcttccaatctgagcattagtcataagttttgaaattgtaacaaggtcatcgttaggtcctgcatgaactatagggctattcatgacatcgctgactaatactcgagttgtcatggcagtagtttcatctctaatatctttagacacatcagatctttagagttttaatttaattacttttctattcttcttcccattgatacacatcagatctttagagttttaatttaattactttggtaagaaactactaaaatcatattttaattcgcctttttcaataggcaatagtttgaattgacctaccggcaagattcttactatttcatctattgataaattctttagataatgtattaaccgttcaggaaactcattttttatagagtaatctacaaaatcagatttaatcttttttgaagcctttacgacatcaaaaccagacgggatcatatttcttaaaaatacggatctttttaaaattgcagagaagggtccgacaataaatagtggtcggtcttcaatgaaagacagaccaattgcaagttttatttccaagttttttacaaaatttcgcttgccttcaattatgaatgccccctttggaagatactgacccgtaggtgcgcctttttttacctgagaaggatagacccaatatgcatcagcagaagaaagattatccttccaagacctactaaaagatatagttgcctgagcagtttcaatgatactttgtgacagatctgcgctggttttgttattagcgttctttaatataaagaaaggagaaccattgacctctgcatgaaaaatatagtcgttttctgtcatatgtcttcttataagtactgaatttgacgatgaatccctgccacctatagctaacacatcatcagttgtaagaaaccatcgatatttttcataccattctttattagtcaaaatcttaatttctgctaatgatggttttttgtttttctgtttttgaattttgtccatttgttcaagtaattttgaatgggaattttctatggtaatcaatcctctttccatatcctttgcaacattaaataacaaggaagaaatttttgggatgttagagtttcctatatctatagctattttttcatctacaatttccagataattcttaccttttatgctcaaaattttagcatccgaatcatgaagtaattttgcaattgaatggttttctggattcaacacaccgtcagtctcttgcataagcagattggcaaaacctctgagcttgtttgatttggaaataacaaggtctttagcttttttctgctcattcaaatcatgttctaatgactcgatctgcttctctaattcagaatttctcaatgaaccagtatgtaaaacggaatagtttagcaagtcatcaattgcatcagtgtacaaactatattttctaacattttccggaggaacatctgatggagttattggacttacatctgcaggatcattatcatcatctaaaataatgcagggttcatgtccgaaaccggttaaaatatttcttattaatgaggtcaattcttcgaataagtttttaagttccactgaagtcagatctttgactttcttgttagagattttactattttgaactgccaattcgataaatttctttgaaattgataacgttcgtcctaaccatttttttatatcaatattcccctggtcgctatttttgattaaagataaaaaatcgtcataatctaaagataacgggtcagctcctctagaaggaggaggaaaatatttcaatccaggttttaacactctatgtcgaacgttaatgggatttagaatattcaaaatcttgtgagattcattgcaaattattatgttgccatgaccaaatagttcgacaattaaatagtatttcattccttgaatagattgaaaaacaaattcaactattcgttctccagatacgacagagacatcaatcagttttgaacgttcaagatcggtcttaattttttttaaagactcattatcctcaataatagaatatttatacttagtaatacagattcctagggaagaaaccagtagggaaacatcatttttttgtgaatgatgaaattttatgatcagagcattttttgttataagagaaatattgcttacatagtaaacactatcaataacttctttgatgttatttacaatatatctaagttcaatctctgaaatagccatctaaatttatcatgatctaattgaatataataagatacaatatacaccaatatacagaatttgagattagcagaatcaaatgaaattgaattcaagaataaatactaagattgaaatattacaggattatggtaagcgttgaaaccaatgaatcttccccataagttcatcttgcttggaggctcttgttttcttaaccgaagaaagtaggaaataaatgtggttaatcaaaaactaatagcgcatatcattgctaatagaagataaaatatattatttaagagtcgttatggctgcagtcgcaggatccattttgggcgccattgtaaaacctaattctgatcaatccaataccataggattaacaatattaataggcattattttttactccatatcccagataattgcaactaggatggctggggaccttcctaaagaaaaaaagaaaaaaataatcacaatagcaatttttggctttattttcatgttatttacatttatggttttaacctatacggtattaaaccaacatataatatgaaacgatggaaatgatctggaattataagactcctggcattcctgacgaattttttgataggatagacaacgtaccaattacaaaagaagatattcgttcgataataattagtaaattacgactaaaagaagggtttacagccatagatattggatgtggtagtggtagtataactgcggaattaattcttcaaaccaaaagtaaagtttatgccatagatatggacaaggttgcgattgacctaacagagaaaaatttaacaaaatttgaggtcttaaatgacgccacgattatacatggattagctcaagacgttttacccacattgcctaatgttgacgctattgtaataggtggaactactggagaaacagaacatataataaaattagctatttccaagctaaatgaagggggaagaatagtggtcacatccatcttgatagaaactatatataatgcacttaaatctatgcaagattcagagttgcaggagatagatataacccaagtgactattgcaaaggcaaaaaaaactggctcaggtactatgatgatttcaagaaatccggtaataattttctctggtacaaagtaaaatacaaaaactttaattaatattttttaaaaaccatctatgggtaattctacattatattgtgttggctgtggtcctggtgatcccgatttactaactttgaaagcaatcaatattattaaaaacgctgaagtgatttatactccaactgcaagagagaataaacctagtgttgctttgtcaatagtcgaaaaattcctcaccaaaaaaactgaagttcgtcagttagtttttcccatggtaaaagattacgagaaattaagagaatattggaagactaatgccaaggaaatagctgatgcggtccgaaatggaaaaaaagcagtttatttaactgtaggtgatccatctctttacagtacttggatatacattcataaagaaatgtgtgaaaattacagggacattgagatagagatagtaccaggaataacatcgattttctctttttccgccgaaatcaaaacaccaataggagaaggagaagagataataggaataatccccgcttgttataatctggacagattaaaaatagcagcagaatgttgtgatacacttgtattcttaaaggacggtaggtattttaataatgtaatagacatactaatggaatcaagttttccggaggattcagatgtttttattgctgaagacgtctcaaccgataatgaaacattacaaaaaaggaagcttgtggacgtggcaaaaaacaaaaaagaaaacaatgataagtacttttcaataatgattgccaaaaagaaaaaatgattcaaaagaacacagtttattttgtaggttcaggacctggcgaccctgaattaattacaattaaagcgaagaaccttttagaaaacgctgatgtaataatatattcgggatcgttattaaatcccgaattactgaggtatgctaaaagagatgctcaattacacgatgcagcgaaattagacagattagaaatatatgaaattctaaaggattctacaaaaaatggcaagttggcgatcagatttcatgatggagacccaactatttttagtatataagagaacaaattgacagattagagaaagataaaattgaatgtaatgttgttcctgggatcacttcacttcttggtgcagcagcatctatgaatctagaattaactctgcctggcattactcaaacgataatcataactcgggcagaattcagaacacctgttccagatagagaacgaatttcagaattgtcaaaacatggatcgaccatggcattttatttaagtgtgcatttacttgaaagagttattgaagaattattgaagggcggagtctacaccaccgatacaccagttgcagtagtatataaagcaacatggaaagatcaaaaaatacttaaaggtactcttgataccattacaaagaaagtaaaagaagaaagaattgttaaaactgcattaatagtggttggagatgtgatagcaccaaagaaatatgaattttccaaagtttatgattcacaatttacccatggatatagaaaaagtaaagagagtaatcgggctcttaattgagagggatacgctgtaattctttttgatttacagtcgtccacgcccccataccgcgtccgttcgttccgttgaaatctataatttgactcaatatgatttctgtaggagccattggaggccatagcattgcaacataatcgccctcattacccgctttattcatatctgccaaagctaatttttctggtttcaaaccaatttcaccaagtcgtgatttaacagtttcaaataattgcttttgaccatgaactattatatgaacatttttttcggtatcataatttgacatactaaactaaatactgcatatttataaaatgattactaattatcgatatttataataaaattcccaggcattacattttcattttcattttaaccagtcaaaataccaataccagataaatgaaaatttaacctgttttgaaaaattttattataatatcatatggataaattgacgttacagacaattacaaaggatttggttcactgattattcaagctccaaacattaatattaaaaaaatagtataaagttgacttaatttgaaaattttatatgaaactatattattaatttgaaaaacaacttcacagaaataatgtttaaatatatttaaaattcgtcaatactaattaaaaaacatttaataccatccttgattaacttagatgcaacatgacattaccaaagggatttggttctcaatctaatactcaaaagaacagaacatttgatgaatggtgggcaaccgtgccgggagatttgaaaacaaaagctcgcaagggcgatgaagccaacaaggttttattgaatcaggtaaattatgtattactccatcttcatcttcagggtaaacacgatacaaaaccgtcacatgaagaattaaaagactggcttcatagcggtcaagtagacgtaatgcgtcaaattaaaaaataattttttttgttaaagtaatatttttttattatttatttaatataacataaaaacaataaaaataaaatatatataaatatactaatagataaaaagtattcgagttttgaaaagaggtagccatatagcaatttttgatacttttaaaactcatcaagtaaaatcaactagggaatctaagagacaaagaggaataattgcacacatagcatcagaaaaagacccgagtggaaaaactagaacttcaatagcgcatattttagctaagaaatatggcatcgcctggcaaaatatttactccgctatttttaaagatcttgacgaggtattgataccagcaaaggtagtaaaagagggtggcagattgccaataaaaaggggtcccaaagcccttcaaatccaaggaataccatactatgagcttactaatattggtctcattattgcatcaactattgaagaaacaggggatattagattgcgaatgaagctgcttgagatttatctgttaaattcaaatgttaataatacaggcatcaatgaaaataatggtataataaatgacggcattttgttactatcacgctatgccccgacctttattttgaaaataataaacgagtatattgtggcatacaatcgtggagaaatagaaagactagacaggcttgatatagataatctgaagaaagtaatatctaatcaaataacaattgaaaaagaattggtagaggcctgtatggtgttatctaatgataagaaggaagtactaaagaactttatagaaaagattagttaataaactgcatcttgaggttacctcaagtaatgaaccggtattattttcaggtcgaacgctaattcggtatgaaagaataccgatttggcttcatttaataagatatggagatctttatatctactgctaaagtgggtcagacataatctatgtactgaggccattttagctagagtggcagtttcgatagcggtagaatgataggattccgtagcctttgtatgttcattggatgagaatgttgattcgaagatcagtaaatcacaatttctaaaaaaattacacaaactgtcagatggacgcgtgtctccagaaataccaattttcctaccacgtcttgttgggccaacgatatcatgagaataaaataatttatcatcataaataacatcaacacctttttgaagtaagccatataattctccttcaggaatacctaattcttttgcccttcttgcgttgaattctccgggtctttcattttcaagcaaacaatatgcatatgaacaaatgttaggaccatgctcagatctacaatataatatcttatagtccttctcctctacaagagttccttgagaattaggaattatatgaatatctacttgaaaagttaatttaatctgaagtagtttcatgttctcaattaagaaattataaagtagttctggaccgaaaatatcaactgatgtctttctgccttgtagtgatagtgtttgtagaaaacccaatatacccaagatatgatcagagtgcatatgggtaacgaatagcatagttttcttattaaatcccaatctagtacgaataaaattatattgcattccctcccccgcatcaaaaatcaataaagttccatttctatttactacaagggaagaaagcgatctgtcttcggagggcatcgctgcggatgttccaagaaaaataacttcgagatttaccataggaggctcaatcacgtgacaaaatggaggtcaaggtatttccaatctcgctactcaaatcaatctttgaacaggatcttggaatactattggtagaaacaatctcatttattccagaacttttcaacaaatttatggatttttcatccgctagagcgtgaacgcacataacaaagattttactgcaattgttattttttaatatatccacagcccttagtatagttcctccactggataccatatcgtcaagaatcacaatatctcgattcgtaactgtaatatctagtttatcatccatggtaatatctccagtgaatctatctctatttttttttaacccaataaaagaagcattcataatcccagcaaactcttttgctctagaaactcctccaaggtctggcgacacaataacagggtccgttaaattaaaattgtttgtggcatattttgccagcaagggcatagaagaaatattaaaaatataataattgaaataagataatgccttagtgctgtgtatatcaactgttatcagattccgggttccaaaatattcaaacagttttgctatcatagacatagtcacacattctcctttcagaaatattctgtcttgtcttgcataacccatgtaaggaataacaggaataacttctgaagcgccagagttattacaatatgacagcatcatcaaggtttgtaaaaaatgtgaatctacaggaggataggtggattgtacaacaatgcattttttatcatgtaaattcgcattaattcttattttactttctccatcagaaaaagtacgtaattcaacttcaacgggatcaacatttaaacatgaagcaatagaattccccagctctactgaagaaggtcccggcaatatgactacatctttcatgacatgattgaaataatacgagaatcttaaaaatgttgaactatgattgacatcatttatcaaatatgatcaaatttctacaacctattaattggattgatataattgagacgtaggtgcgtaataatatcatattgacaaaatatactattgaaaaacatgataaaggatcagacaagatcgagagaatatccatactcaagaatatgattgaaaattatttaccacttcatgtgacaaatataaagcacccagcgtgacataattatgtatcaatatgattttatattgtgtgcaataaatataatgcctattgcttgataattagcaagacctcggtatcaattttatctaactgttctctaattgcttgaattacttgttcatttgcgtttaagctagaaaaatccaataattgaaacccatcaaccaattgaacatttggagatagatcagaatttgaggaaaatcttgagatgattgatgggagatctgaagatattttggttgaaaatccatgtatcaatttaccattatccaatgagagacgcactctcccaaatttatctaatatcaatatagattgcattgttgttttaaagaataatttttttttctgatatatattagtaaaaatacaataatttcctagtttatgttttaaggtaacatctccatcatgatgaaatagatcttttgcaatcatgtctaattcttcttgctctaattctttagaaccgatattattcaaatctagagcaacattacctataacagtgactctcaaaattgaacgatcgcttatatattccgattgaacagatagtgaatctggagatgcattttttctaatagctacatccttagtctcagttattaattgagtaacatcttcaggagtaggattattaatggttttctctttctcttcataaatcattcctgtggctacacctatagatgaaatgacatcggcgtactctgcctttttgtattcaaaactgagtttcttagcaacaagtggtaccaaaacggaagcacctcctcctcctccaataactattattctgttctttgataatttgtactcttttatcattggaattatataatctgatatctttgaaacagaaatatctaaaacttgtttagcaatttgctcaggcaacattcccatataggtagccaatttcgtaaatgcgattctagccgaatccacatttccatatgcattatcattcttagggatgagacctaaggcatttgcggcacatgtattggtaatcccgtatgcttttcctccgggaactttgatactaatatagtcatttggatcgttattaagtggactaagaggtacgatttcaccctttatcaattcatcaggatcggcaaaacaagaatactccaatccagcaatatgtgaggatcgaggaccgacatcaataatttttctctttgatgaaagcctcaataaagatccaccagcaaccccacaaattcttacatcaagtgatcttatacaagttggatgttccataatgttcacatagcgcatttcaggctttccatctttaattatactaatgttagttgaagtgccaccaacttcaataaatatgccttctaaaacctgcaaaaaaagcaaagcacctacaacacttgcagctggacccgaaagcactgttattataggcttgtgcaaaaatgaatctaatgtggttacaccgccgtcacctttcattatcattaccggtacatctatacctaagttattgactgcagatttaacataatttgcggtactcgtggcttttggaagaatgctagcattaattgttgctgttaaagttctgatctctaacccataaattcccgtcaattcatgtccggcagtgcaaggaagtttagaatgcttcattacaaataattcgttacttggatcatcgactccgaaagcctcacttacgactattgattgagctccctcggaaactaaattctctatggatttttcgattccaggttcctctaaatatttagaggtatccaaaaaggtataacaggtttttagaaatttattagaatttagagatatatctttaatgtgggttcttttgacgacattggttttttccattcccactcccattccaataattccaacttttgatacatctccttcaagaaaggcatttactgcttgggtagtactatgggagatcaactctatttcttcatggtctatattgcacatctcaattaatgaggataaggcgttaacaatacctacagaaacacccccttctaaagtatgtgttgttgaaacagatttttttcccagtatttttttttcaagtacatcaatagctacggctttggtaaaggtgccccctacatctattccgatcctaatttttttcataccttttgttcactcgctttcatagaaaccagaaaaacgtttgtttcatacattctaagtaatttaaatgctaccacatccaggagttacatttgtagcgagacatcaaatattatttctttaattcccatatatctaagaattgactgaaagttttttttatctgcagaaacaagaatttcgagtttgcctttgctattcttattcttatcaaagtctccagtatatttaagataattcttcacttcttttgcaacttcagctgaagagtttatgaacttgatggatggcaaaatagattcaatataatttttaacaaatggcaaatgagtgctacccaatgcaataacatcaattgtgttatcaatattggagtcaattatttctcgaattttatcataggtaaatttctgatcgaacaaaaataatccactttcaactagattaataatctctgaagaatctaccttatccacaaaaatctgttgaggtatctctttttttatcaagtaattgaactctttactatgaagtgtacctttcgatgccattattgctatgtgttttttcctagtcaagtttattgtcttatctagcggtatttttgttgaaatgatagctgtcgaaaaattgtttttaatttcatcataaatttgaacagagggtgtatttgatgccattactattagttttggctgatatttctccaaaaatttaatggattttagtattattgactttaattcactcttagtcttatttccatatggaaaattttttttatctgcaaaatacaaaatgttctcggagggaataattttcctcaattctctcacaacagatagtgaacccaatcctgaatcaaaaaccgcaattggcctatatagcatatctaacggtatttaataaagaggtaaaaatgtttgaaatgaaatgaaattatcttccaatacaacaactaccctctggaatattatatccgtggggacagatcttaggatgttttaacagggtgcatagtgcatcggtaaaaatttctttcatatgatgttcaatgccacaaaccatctcttcatctacatcgatttttaaggcatccctcataagcacttctaacagtcgagtatttcgtatcattttttttccaatgttctcaccctcttttgtaagcgtcactatagaaccctttttataatcaattaaaagagaatcattcaacttatgaagcatttgaaccactgatggttgagtgacatttaaaattctggctatggaactaacttttaactcttggccactttctaaaatagaccacattgccttcaaatacatttcaacatgctcggcttctgcggtgcctacatacaattgctctgggagtccagaattttttgaataaacagtcaatgtatattattacacagtattattttttaactttattgattcaaatttgattaaaggaaaaaaatgatatgaattaattcatttttatagagccttaacagacttattgcaatatagaacgatctaaatttcgttcgtttttcttaaattgtaaaaggacctgttttttgttcaatatcaattctactgactggattttacttttgtaaaagacaaccttttttcctttttcatttatcacaattctatcaataaataaaagtccaagatccttaagttttcttatttttttgtatgtcgaactaataggcaagtcattttccttgcaaatttcaaaaacggttttggaatcttcgatggtagacattataatcttgtaagaaaatccatcaaataattccttcaataaaattgaagcatttttatcttcttgattcagtaaatattgctgatcagataacatcatttaggctaccctaattgttaggctatcctaatatttaaacggtgttatatttatcaagtttactctgcaaattttattctgatttttctccagttatacacactatgataaatattttcaaatactatcggagttattgcaatatttgatagattataaagagtcttgttatgacttaacacattttgactactatttatatagaaatcggttttttgttattatacaaattatgtagttgttttctatatttagttatatagaaaagatgtctaagcagataaattattacaaacaaaaaagtgtatagagtaggggtctttattttacaacaatctcaccaaccatcgaagggtggtaaatgcaataataattaaaagtacccttattatcaaattttaaggtgaatgcctgttttgaaagtattgcgtctgaatcaaacaactgaccctcatcaggatcgctgtctgacccagaagtggcggtatgtgatacggtatctgcattataccatgtaattgtttcaccagaatttataataattggatttggtgcatacgagttgtcaccgctgataccgttaattgttaccaaaatggaatcctcaggtacaacactagattgtgatgatggagattgagccttcggaatgctactttgtgagattggcaatattttgtacaaatcccctgtaaagcttaggacatacagatatccgtcaggtcctacctggatgtcagtaattccaccgaaaccttgtccaaacgtaataggaatactttcaacagtattatccacttttttatccactaatgcagatgcttgtcctacataagtattatttatgttaatatcatcacgggcctcattcaaagtaaatctatataaattgccattattaatgtcacctacaaacatattattttcatattctttacccaacttatctgaattcaaaaattttagtgcagtcggacctataggaatatgccaagtaaatttgggttctgcatattttccgtttccaaaaattattagatcacttggggttgccccgttacccaatagatcatcgccagaaaatccctgaattaacgaccagccactgttaaatccaggaaaaactaggttgatctcatcgcctgccgtaggaccattctcggtatcccataaattaccagtcataggatcaaaatcgatcccgaaactattcctaatacccattgcgtagtaaacacctaaaggcaagtcagtaccaaagattggttcatcatcaactaatccgccatcttgagtaattctgagaacaccgcctaatccattaggtgctggaccattttctatattttgtgcctgcgtcctatggcctccaacttctcctattatcatatagacgttattgtccggtccaattgtgactttacctccattatgatcagttcgattaacattattcggaatcgcagtcaaatccaatagaagaacaggatctattaattggccatctacatactgataacgatatagtctatttcctaacgggtctatattattagatacatcactaccatcctcattatttccagattcggtataggataagaaaacaaaagtttttccatctagatgtttagaagcaacaatccctaatagtccacgttcgatttttgtagctaccggtagatcaagtaagggattatcctgtacctgaccatcgagtacccttataaccttaccagtatttttttcagtaactaacatatcattatttcccacaaaagtcatgctagttggaaatttcaaatcggaagtaaccttttcaacagttaaactatcatcattaattgtcggtccatcaggagatggtagagctttagagtacgctccataagaaaaataaacggaagaatagtttgaagataatagtattaaaataatagcgaaagaataaagcaatagtttaatgttatacacaagttttatcaacagaaaaaataaagcacgaattaattaaaaggttacgtagtattgtttttaaagatattcaccaaaagtaagagatttaatgtacacaagtgtgtacttcatctaattattaataagaaatacagatgtaatttagaaattatgaataatgctaaataggaccattgaaaacctcatttgagaacaattgcagataatcgatttaacactggatattgatgaatatattcaagtttttccagattcaccgaaagtaaacattttacagtggtcaaattttcacaatcacaaatatacttcagaagtattatttgctagtacccatgtaggcacccatatagatgccccctatcactttcaagagcatggcactacagtagaaaaaattcctcttaacaggctagtaattaaagaaaacataaaagtgttaaaaattgaaaaaggagatgatgaaaagatcgaagttagtgatctaagaaatcataaaattatgaagaacgataccatcttaattaacacaaattggatatttaatagatctttagacaaatattttagtaagaaccccggactatctaaagccgctgcaagatatctggcagacctccagataaatctggtaggaattgatagtcccagcattgatcctgccaccgatcatgactttaattctcacagaatttttggcgctaatgatattccaataatcgaaaatctgataaacctagataaactactactcagtaaggaatttacttttatggcattaccattaaaattaaagaactgttctggttctcccataagagcagtggccataatagcttgaatgaatcacaagagtatagaacagcaaaaaaagactttgaaatcagtcgaagtaattcatcttttaatggttaagaatccaaatcctgacaaatgtaatagaaaaatggtttttacatttgtatggattttaacaaatgttttttttcttcttagattttgtagtatttattaggccaaccagtctataaccatattcaaaattatgtttaacatgattaattccatgagtcaaatgtgtttggaatttaccatccaaaatattttctatgtaaaattggacctttttgattgaaatttgtgaatgcctgatttgtttatcagataaggaacgtccaagttcggattcgatttcggttttgaaatcttttaatccaacgagcttaccatagcgaagaactttactataattattgcatatgtcatgcagtttttgtacttctttttcgggtaatacggataaagattttttgacttgatcgggatctcgctgaacaatctgtgctaatcttaataccatttcatctgtcatgtgaattgtgtttactaatttaggagtataggactgctgagtattatctcgtttaatagcagtataggtttttttcacaggagaagaaggcatctcagcagtatttagattatcaattagctcttttggatttttaaatgattttcctggcaaaaattgtagttctcttgatggatatgaataaacatgctctatcaaggatgattttttggattcatagtaagtctttaactgaaaaagagatacctttttgccatctaaatcggacttgaaaaatattatagaaaggacatctactagtaagctaggaaactggattttcacatttttatcaaaagtatcgtatgtatgaaggaagtcattgcaaatttcaaaaataacattgtcaaaagtagataaagtaaatggaatagaattgacctgtttttttatcaaatgatctatcaaaaacttgtatgacattataaaaaaatcatatacgtcgctcttttgtaatacaaagctatttttttgtattacaaaagttattgtctttaataaaatcatatatggatttacaaccttaatctctggaaatatggtttgaaaatccttcattatagtagtcatatagtcatcatcactttctaaattatcaagccaattaattccaagttctttataactttttttaaacagaacgttgaaatcactatttgagtcgctatccatttttagacatgctatatggtatttttttgttattaaacattagaaaataattcaggtgaagaagattatattaaaatgttatctaaataaatatgctagttattttttttgtgatcatcgtcaaaactaccatcagaattatcgatagcccatggaaaccatctgccaattattttggcccaatcaaatttaaatgtaaaaaataataccacagctaatattactacagttattataggaaccaaaaaggtcgaatacccattactagaatcggttacaacaaggaatttatccattattggtcgacctagaaatacggtgccccacacaattgttgccccgaggaaaaacttacctgcgaatgtaaatagagcaaatctagacggactgtatttggcaatccctaggggaatatataccaaatcatctggtattggagttaaagcggccacaaaaacccctataccaccatatttgcttaatagtttctgaagaggaagcattcgggtttttgtctttttacttagaatgttcctaccataatagcttgcaataaagattattgttttggccataaccgctccaatggtgctcagtaaaacaattaggtttgggtccagacttttatctaaagctgaagtaactaaaacgggaaaatatgggactggaataaatggaataatactgcctacaaagctgatcaaaaatataccaatgtaacctgaactgctgtaaaaagaatataggtccggtatatcaatcaaacaaaagaatattaaattaacaaatataactactttatcaattttattaattttttataataaatatagtaaatattagaagtctttgtctacttccttccttacttccttcgttcatcctctcttatgcttgtctcccacggactttctcattgaagctataacttgctgacgtctaggttgaataattagaatatacaccgatccggctaggtatatcgctagtaatattacttgtcccaaaacagtttctaaagtaggatggattccagtcatagttgccacattaatatcgaatctaggaattatgcccagcagatgagtggttgaaatccaaccgagctcttggaattcgcgtaaagcatttcctaagaatgtaattgacataaaagctccaactcccatggtaagcccaaacaaaactcttaatggcaatttcttccccagttttcgaattataaagacgactgcaattattacagccatgcccagaattaatcctgcaagtacttgtacagctccatatattttgcaaaagaaaatagagcttgataaaacaagactgtttcaaagccctctctatacacagtaaagaaagacagcaaaacaaataccataaaactaccagtagcggttgcttgccatactttggctttaacaaattcaatccatttcttagtttcaatcttgttcagaacccaaaagctgacccagaataatacagctactgcagaaattccagcaatagcctcaataagttccctttgtgcaccagatatttctattatgaattcagcaataacccaagtcacagcagtcagtgcaatagcaagcattactccagcatatacgtgctttttgtacttttcatttcgtgatgcctccaagtatgtcaaaatggcacctagtatcaaagcagcctccaagccttctctaaaaataattgaaaatgatgaagagaatgcaatagcaggtgcaacgactccgatacccgaaacaaaccgttcggattcatctaatccatttttaagttctgaaatctttgaaacgacttcatcagatggagcacttgaagtaatgaggttacgcaattcagcaaactttatctccatttcgagagtaaaatctggatcgatgggcctcaagggtatttcaatattttcataactatcaagataagctgatctggcggttgctagtgcttgagaagtgtcattttgattataaacagctataacttcatctagtttaactctgattgtatctatatcgttacgaacttgacccttgaaatcttccgaggtttcgcccatggaacgtctttcaccagtataaattccaaacccttgttttagagaatcaatattggcagtattcgtaacaaaagaggatggtaatgtaaaattattgttggactgtgcattgttggcagtacttagcaactgtttggaaacttgtagatcatcttttatgttagaaatgtaaggttcaatgacagcaagtgaagtttgatttttgattaaagcacgtagattttctcgcatatttgtttctatttgcaacattaaggtggaatttacctcctcgattggggcttcaaggtattcataattatccaagtaggcagcagacacatttttgtctgcagcaagataattaccattttgaacggaggaaatggcgttatttaagagagtatctatgttatcataatagatctgaagagacgggtcaacggtgctggttgtgctttgcatacgaatattgttagactcgttcaaatcattctctattgcgaaaactattcttgaaaactcttgattattgtcacttttggaatctattattgtattcaaatttgtgagaaaatattctatctctttagattttgcatcaggcatatttggctttaatatttcaaaaattgtatttgattgatttatcaatcctcttgtattctcataatctatcatggcaaagtttgcagcatcagtgtcggcagtttttgaagagttcaagtataacccatatgaattataggcatcccttaatagatacgacatggtctgggattcaagaattgaaaaatcctgtgcagaaaacgtatctttcagttttgaataaaaatcgtcaattatgtttttggaatcatttatttcagtcagaataacaggagaatcaggattagagcgaatttgcaacggaatatcagttagtttattttctaaatttctggccaattcttcgtcaatagaaatggcaacaggtttagtggatgggaagattattgaatgcggtatatacgcatgctcaaataacagagaattattattaatatttattttatttaatagaatatcaagttgcgtgtctattctatttagattgatattcaaaagcaatagatcctcatttgatattgtaggattttctgtggaagtagaattttgggcgagggcattacttacaaacgaaaatgagatatttactatcagaaatagcagaataaaaggtgcaagtagttttaccacattcttttacctcgcgtacaaccgctaatgataggactagagtgatctattagacatggcgttaatactaataacattaggcttccctaattttgttagacatgcaatttaaacattctttgttaaatttactatgattgacatagtatgattaaaagtattacaataatatctctaaagttttaattaattataaaaccacgattctgaattaaatataattagtatacagctagaaaatattaaaaataagaaaatgaaaaaataattttattagatcaaagagttagtgctacatccgaagacaatgtatttgatagtgtttcagtcttattcaaatcggtgagagtgacattagtttttacactcgttagagaagggtcagagaaggatgtagcaaattgaataattcccgattcagttattgtaaagccgtttggataagaagaggtctttaatagggttccattaggtgcatacacctgcattactccgttaatagtagaatctactagcgaaagatccttagtttgatagtcaaccaaaagttttacttgattaagggacggatttgaagttaatggtccgaaggtagcagaatttagacttattgtaagtttctctaatgactgtgcatttatggcattaaatgaataggctccaaaaagtaacaaagtagcagcaaatagagttgcagaaagcagcacaattcttttgtgatttgctaatgaattatacatcaatttaaaatctaatataatactataaaaacaatatgttaagatataattatacattttactaaaataatttaaaaaaaataaaatttgattttatgaagataaaaagataaaggtgagattacttattttcataagccacctcctgatgatacgaaatatccaggcccaggtcctcctcttcttcctttgctctaatccctatagcatagtctataatcttcaaaattacaaatgttccaacaaaagctaatagcgcgccaactccaacaccgaaagcttggattggtaactgcattgggtttccatatagccaaccgtttggaccgattggattgactgcttgtgttgcaaacagacctatccacaagctgccaactataccagtaatcccgtgaacagagcttacatccaaaacatcatcgatctttaatctttcctttatcaatacaatcccgtaataggatgcaaagcccaatacgatacccaatatgaatgcccattgacctgtaataaaaccggcagttggagtaattccagccaaccccgaaattgcaccatttattgctgcactaacggtaggctttccagttctcttccaacttagtagtatccaaacaagtgcacaagtacaagctcctatttgtgtggctagtagagcacttgcagcaagcgcccccgatgccagagcactacctgcgttgaaaccaaaccatcctagccacagtagagtagctcctatagccgccagcggaagattatgaggcaccataatttccggaccgaatccctttcgtctacccaagaccaaggccgacgctagagccgccatacccgcacttgtgtgaataactatacctcctgcaaaatcaaagactcctaactttgctagccaaccgccaccccatatccaatgggcgagcggatagtaaattacaaggctccatacaattatgaaaatgaaaaaggcattccatttcatacgttccgcaaaagcaccagtaataaggagaggagtgatgactgcgaacatcatttggtaggcagcgaagttaactccaggtattgtgggggcccaagaaaccgaatcgctaaatggtacattgttaaagaaaaaccaagaaaggtctcctataattccattaacgtccggtgcaaacactaacgtgaagccaactataaaccacagggttgatagtagcgccattcccgtcatagtttgcataattacagataacgaattttttagtctgattaaccctgactcaaaaaaacccagagcaggggtcatcaaaaatactaatccagtggcgattaacatccacgtggtatcaccagtatctattgccaacggtcacaaaaggtttacagtagattataaagtttttccttttttacttaagaattcgagtcaaaataaatagaataataaaattatcataaaattttgattttttgattaatagatttgaaatatgcaagattataaggttttaattttgcttattcagattcctaaaaattatgtatttaatatacaagagtttgttgtaaaagtaaaagcatgtcagtaaaaaattttcaattacaattctttaattcatttagataatgagaaattagtctgagaagaacaaccccgacttcattactttaaaaaaatgaaaaatattctttctttttctttctttttcttacttattgaaattcaagaaattttcccaaaaattcttgaagtctaatttttttgtttcaaaactttccttatctgtcaactgtgattgagtgttgttacttgtggaattttcagatagagctgtattacagctttgaccattattacaagtggttacgacgcagctatcgtttctacaacttttttcgtaataggtagaagtgctattattgctattaagcgaatatccatatggaacttggactacggaaaacccaataacaaatatcaccataaaaataagataaacattcataagcaaaagttattattcattgtatttctaaattttgatacaatctaaaagatgattacttaccaagtattaacaataagaaaacaaaaaaggtattatacataaaatacaactgaaataaaatatgaaagcccttttctttaacaagcccggcattgaaaatttgatctttggagattacgaattaccagaaataggagattatgaagtcctagtacaaatcaagtgcaccagtgtcaatcccattgattattatgctgtaacgggaatacacggagtaaacggtcctgcaatgaagataaatccatatcctcacatagctggctctgaaattgcggggactgtaaaaagtaaaggcaaaagagtaaataattcaatcagagaaggcgaccgtgttatactatataacagagtatttgacggaatctgcaaatattgtaggaataattatcaaatgctctgtgaatacggcggaatgatcggtatttcaataaatggcggatttgcagaatatataataattcctcaacacaatatcataaagattcctgacgaattagattgggaacttgcctctgctttacctatatcaggattaacagcctataacgcaatactagaatcaggactcaagtcagatgagaaccttgtagtatttggtggttctggcaatacaggccttttttgctcccagattggcaaggccatttctgctattacaatatcgctttcttctaaaccatggattaagcagtatggcgcagactatgttttaccaattgatgaaaaccttagagcaaaaatttttgagattacaaatggagctatggctgacgtagtcattaattcacttggagaagagacatggacaaagggaatggatgtggttggaaagctaggaagaataattatatttggtgtacttactggcggtaacctaattattgatggcagattgatgtataacaaacaaattacggttaaaggtactactggaggatccgttaaaggtttactaaatcttatagaaatgacaaaagagcaaaatattaaaactaaagtttggaaaagatattctcttgaagattcaagaaaagccatagaaaaggtttttgacaaaaatagagaaggaagaataattatagaaaactattaatgaattatagttaagaatcttcactagcaatatagtatttaataagtatccgataaactataaattcattatataattaaaatcataatgatacattctaaattactaactaaggtattacttttataataagaaaaaatattgatagtatatgaataatctaggcaagttatccgttgtaatgatagctattttcgtagcaggtaattccatttatccagttagtcaactggtaaatgcacaattggatattttagagacacctacaaatcctaataacacatcgacatcatcatcaacaactacagcaactacaaaagccgtggaccctgacaaaagtgcaaagataaaagaagcattagctaatatattcgaaatatatcaagccctagcagaaaagggcgatgtagattctttgctaaagctaaatactatagagagaatattgctagagttattgagataagataataacttaatttctttgtttattttatttatattattttgcctaaatactatttttcaggttatataataattagttaaaaaaaagagatggtttatgttgtagatgtggtgttttgaccgttccaggctgttggagtaccaaccatatatggtgtgacctccactggaatgctgtttgtgccagttggtggaattgcatttgatggatttgcatcacttgtcaaaccaagactattgcttatagcgttgtctggaccgtcaactacaattagacctgcttggcctttgaacaattgtgagtagtcatggtttacaaatgcgtaaactcctggttggtcaaatactacatcaacaattgcatcgttagatccacctactgtgtatgtttgtttaccaattccattaacaatgctaccatctgttactctgtcaagtatttcacctacaatgtggaagttgactggaagatcaccgtgatttagcacgaagaatcttgcgtggtcacctactttcatgaataatggcatttgacctacttttgtaattaccggatcatatccaaatggcataccgttaatccaagcgctggtaggaatgtgtgcgttcatagcttctctatcgaatgcgccttcagcggtcaaatagtattctgagaattggaatgtaacttctttagcatctggagatacgtctgttgtatttaatgccatagtaccattttctatgccgacaccttcatacccagtataaccatctactggatcaacaattacaccaccgaccattccctggaatacgtgttggtccatgtttataaccggaacgccagcttcggttccaccttcacaatggtatttgaagaatcctggttgagttgcaacaaaggaatactgttttgagtcactcacatttattggaccgaaagcaggtgaagcgctaattgtagaagcatgatgatctaagctgtggactagggaattattgggatgattaatgatgttaacgttcaaaatgtctcctactgtcaaacgaactgttggtcccggaattgtaccattccaagtcgaagctgatatatttgaaccatcacttaacgtaatattcttctcaatggctacaaaagttacattcttttgtggtgcttcactttcctctgcctcttcagtagagatctgttggaaccctccacccattactaaattcatattggctagtgttaattgactttgatcatttgatattgcaaatgatttcatgtttacgcctggaagtaaaattaatccagacatcaaaacagctgacaaagcaaaaattgctaatgtactcttcatctagctaaattagatagaagatattcttaaaccttttggagataagaattttatataagatagtttcatgaacaaaaatttggataattttaattttaaatgaatgaataatatttactttcatctacaaacaatgcaaatctttaacaaaacgtcaaaatccataacttattctatttttcgtcagattaaccaattaatattgttagttaaaactatattttggataatttataaaaatgagtattatattatacgaaatgtaggggtcaaggtatagtgagtgaataagtatcttatcaatcgtctttaattgtttcacaccgttgaaaattcgatatttatccataacttctaaagttgatcaattaaaaaaacaagaaatatttatcgcgttatcttactactgattaaaatttttagcaaagaaattgtgatgatttgaatactaatgatctgaattaatcatggtcactttgagaaagagcaggttttatcaattcatttcaatcgaaatatctcttaaaaaatctatatattatgtagacgatttgcatatatgaaaagttaatagttaaaatggagattaaaaaaattgaagaatatacaacttctaaccaaatgttgcattaataggtgctggagtggtagtcgttgcatttgtaccattagctatcatagtagttccgttaatttccattcctggctgtattgaagattccgggttggtttccattgctgacattgtattattttctgactctgtattattttcttgagctagtactggcatacttacacctatagataacactgatacggctagaacgcaaatcgttgcgaaaatgagaatgttattcatcatgtttagttacacaacaaggtttataacattctactaaaagtcaaaattgaccttttgtcaataattcatatcttttatatttttattgctactattaggatatacagacattcctgattcaaagtccaatctaatgccatttcccacatcaggttcttattaattgatggctaaaatgtattctttgttggtgaaataaaaaatttcaaatcagcagttagcataacaccaaaagatattgaattacaatagatccatatttttccaattaatgtttttattgctactattaggatatacagacattcctgattcaaagtccaatctaatgccatttcccacatcaggttcttattaattgatggctaaaatgtattctttgttggtgaaataaaaaatttcaaatcagcagttagcataacaccaaaagatattgaattacaatagatccatatttttccaattaatgtttttattgcagaagcaaattttattgattcgtaactgatatggaattggctattaattcataccatatcctaacgcagtattttgaagactattaagtaatagcaatcataacagaacaaattgattattttccatgagttattatttttattttacattattagctctcatgatgcttattccaacaacccaatctatcatcatcatttttgaatacacaggaacaggattccaacaagacttgggttagtacaccacaaggatctgcaaatcctgagtcagatatgaccgacgtgtttcaagacagtggtgccaaccaagtcaaattagagttaaggttaatgaaacgattacatggaataataacgatactaaaccagataccagtaatcaaaggtaagatatatccaaattcgaaacagtcttgtatctaataattttttgtgttgaataaaaaaaatggttaccgtggtaaaataatgtctaacacgaaatttcaaacgtaatgcataagaatggataagctatccacgatttaattaattttaataaattatgcaatacgtcttaattcatccaaaatgatcaaataagtgatttatttattatcctgtatggcctggtcattattttcttagtttttttccctataaaatcaggcaatcgcgtaactggaatatgcaaatattcagcaatggagcacactttacctatttggaatagaaattcttttggatcaatttcttccttgaatcagtgtatagccatattttcaagaaaggagtcggcttgtatttcatttaatttcgaatcatttagtctattttttagcctcattgatgaagcaagataagtcagactaagaccatttcttttcaataaaactgcaactgctctgggtaggtcaatatcttttatactttctttcttgaccgctgtaattatattagtgacactaccatagcttatttcgttttcatcagatatgatattacaaggtttgtcttcaagccatgcatttattactttttccttgatggcagatggaaccttttgacccattggaatattaatttataaatattcaaaggtattaaagaactccattacagcacaaaatgaccacagagcaaaattaggacatttgaccatcatttgaccatcattttaaggaataagacatcaggccagattcatttattccgcaaggtagtcagatataagacactattgcacaaccattgtatgttatactttcaagatgcttttattctttaatagatatttatgaatcattgatccatactgaatagcctttttaggatgcatggctgcttcttttggaacgccaattcttattgcaatctctcgcaaaatatgctttcttaacatatcatattggccatttattttatattccatggggatactttttgcatatttaacaaatgtttttgatagaaatggttggtatgaatatatattcagttctgctatcacattggaaatttctctcatcatatgatcttcattgtttaatttttcttccatgtaagtggttacagactccttaccattttgataataagatctatatcgatcatatccacaaaataactcgtcaaatccgttagcggttaggaaagaatcctccaattcgtgatattttatgattttacttatctgaaaaaaggcaatacagttttcaatgtgggaaagaacattacaagaaagttttgattttacaaacttaatgtcatcctggacatcctcctccttaatctcataagctatgtgattcatagctaaagagagagatttagaaatagatttagaaaaaataatatcatgggaattggcaaaaccaattgttactaggtgtacttgtttacccagatctttacaaatttttgccaataaagaactatcaacccctccagaaaatgctatcacgaccttatcagaatgatttgtgaactcttcaaccgtagaatataaaatttgggttaattcgtcggatatgagcacttttaggtattggttacttcagaatatatttgtaataattataatagagagaagataagtaaaaatagatttggataaagatgtgaaatacataggtcaaagcaaaaacttgatcaagaatagaacaggatattcaatctcaaaactattggactttttgaaaattgaatataattacgataatgttttaaatgattcaaaattaagtatagattttaaaattggagataaattcattaaaataattgaaaacgataatgacatgaatgaatttagaatcattcaagaaagattcccatttgtagatatgattgccgtagggagatcggcttacttaggcaaaataaatgagatgcacaacatcttcctgtttgacaaagaaagcaaacaggttggatctatatttatcgaggacccctcattatcatttgattatgctcatatattaccgctagtcgaaaagtgttcaataattcatggtcacacgtctacggtcatggtagagattataggcgaaatgaaaaataatctagtgatcgacttctcagaggctaaaaaattaattaaagaagctttataccaaatcgatcataaattttttattaatagaaaatatttaaagaaggaagacaacgatcacttttttattgaatttgacggtccaaaaggattttttgatttaaaagttccaaagtatacaacctatcttttagaaggcgaggcgactgtagaaaatctttctacagaaattataagaatgctatcaggcaaaatgcccgagaatgtacaagcccttggtgtgtatatatatgagggagtcaataagggcgctcatattctttcctacatccgataagtgctaataattagtaaaaccttgacactctcatttcagtagcattatattctagaattattcaagattcagattacatctaaaattccatctagacatccagaacattcgttgagaccgacctaggaaggttaataactaattaataaaagagtattacaaattaaaagttgagttcaaagattactgaaaagatatggtcatcagatattgagaaaaagatcatagaagattggaaggttaataatgtttatgataatgttgaaactgatcaaagtaaagataaatattttgttatagatactccccctccctatccatctggaagaccgtggcacatcggtgcagctgcccattattctcagatagatatgatttcaagagttgcccgcctaaagggctttagagttatttttccaattggcgtggatcgtaatggcattcccgtagaaatccacacagaaaaaaaatacaagatcagaatgagaaatacagaaagaaaagagtttttgaagttatgtaagataacgcttgacgatactgaaagtgaatttatagaaatcctagaaagcttgggtttaagtgcgaattttaaacagaagtaccagactgattctcctgatttcagagcatttacccagtcaacatttattgaaatgtggaacaaaggattagtatatcttggaaatagaccaaacaactactgcattgattgtggtaccacaatagcagatgcagaaatcacatatgaggatgttgagactaaattagtttacataaaatttttcttagagaataataacgaattcattgtaattgccactactagaccagaactcctctttgcatgtcaagcggtaattgtgaatcccgatgatgagagatacaaagacatgcaaggaaaaactttgagaattccaatttttgatagagaagtaaaaataaaaccacatcgctctgctaacaaaagctttggatctggagcggttatggtttgcagttacggtgacctaaacgatgttcaattattcagagaaatgggtctgacggaaattaaatctattgaattgaatggaaaaacaacagaatttgccggaatgttttctaatttacgcataaaagaagcaagaagtaaaataatagatgagctagaaaagcaagggttagtagaaaagattgaaattatttcccatagaactcccctttgtgaaagaagtaaaaccccgattgaaattatttctttggaagattattatctaaagcaagttgattttaagtcaaatttgttagaacgctctaaagaaataaaattctatccagaaatgcatagacaaatcctattgaattggataaattcaattgcgatagactggcctatctcaaggagaagattttatggaactgaaattccgatatggtattgtacaaaatgtaaaaaagcaaaccttcctgaacctggaaaatactatagaccttgggatgaaactccaccatttgataaatgcaaatcgtgtaacaatgacaagtttgaaggagaaaaaaagattttcgatacatggatggattcgagtataactcctctttatattacgaaattctataaaaataaagaaatttttaataaaatctaccctctttctattagacctcaaggaaaagacattgtaaggacatggctttactatactcttctaagatgcttgtaccttacgagtcaaattccatggcatagtacttggataatgggatacggagttgatgaaaaaggggagaaaatgagtaaaagtaagggaaatgtaattgatccacttcccattattaagaagtatggtgctgatgcattcagattttggtctgcaagtgagacaaatgttggatatgattttagatgttcggagcaaaaaatacaaagtgcacaaaaattcttatcgaaattatggaatattggtagattcatttctaattttgaaataattgatgaaaacaataaacctcgagaactaaaagcgactgataaatggattttatcagaactctcaagcatgaccaaaaaatgtcttgaaggttatgaagaattaaattttttcatccccgctaatgcattgagagaatttacatggaatatttttgcagcccattatattgaaatgataaaaagtagagcgtacaataatgaagcagaggatgaaagaaaatcagctctttatacaattcataaatgttttagaactatattgcttttattagaaccgatttctccatttattacatatgagttgtggaagaaaatctatgaggacggagagataatttcaggtcaaaaaaatattcctatcgtagagaaagaatacgatgtgtttgtttcatcgacacatcacattatcaagttcaattcagaaatatggaataagaagaaggaaactctttctaatattacaaataagcccctttcattaaaagatcctataaaaacaaaggtacccagtgaactagagtcatttaaggatgatttaataatgatgcataatattatgatagagtaaaaaattctgaaagaagaaggtaaataaggtgaatgggtattaagccttatttccactaactatatctagaatatcttctgccaaatcaattacgttttgagactctagattaggttctaaagtaatcaacaacattttcttatctaagtaaaatgttagcagcgataacttctcacgttctatatatgcaaaacgagctttacccatagtatcgtcaaatctttctctcatagactttctaagagcagtatgagtcaaatacaattcttcgcttggttgatcaacaatggaatcaattccgtgacgcattccaccagctatcaaagagccggtttcatcaattaatccagcatatcggataccatcatttagctcaaaaatagtatcaattattttttggtagtccataaataaatagaacagtcactatttattgaatgttaagattatcttcaggcatatttcaatataatccaaaaaacatttttattcgaatatataaaaatagcaaaaactttgtaattatgaagatcttattataagcaaatctccttaatcttattaatctataacgaatgaaagacacaactttgtaattatttttttcgttaattaaggtatgagtaagaaaagtatagaagaaaagtatagatgtcgaagaatgatggattagtttgcagctatttccctcacactcagattctttatatcgacgtttgaagtgccgtcccatcggaatgtaacaatgggtcctccccatgaaatttgttggtctggacttcctccacatctatcgccatcctcaccgaatcctccgctatctgtataaccaaacaccttcttccattgaccgttattgctttcatctacccagttttcaagttttacagcaggctcgccatttacgacagtgttaaacatgacggttttgaatcctatccatttaccttcgatggaacctatatttttctgggcgggtgtaaatgagtaaccccctgaatgccattgttctttagcaaatcgagaacgtccgtctgtgaataacccccctttatatgcggtaccttcacaaggaacatctgagttatgttttccaccatgggcatacaatgtcaaatcaaagtcagaatctgaagctgaattgattttaacatattctgttatttccacattcctccaatcattcacggcttgcatataccctttggctgacagggatttttgatcataagtatcaatatcaccttggtgatatccagtactagtaaatacattcatcctaaccttatcagatgttaccttatatgatccatcagcatttttcttcagagtcagtttgggatcaaatctattgtcagaagacggattagccatattcatgaaccacttttcgccatttggtttgtcaggataaattttctttacaccaaagacatctgtttcattacttggattgggggttggtgttggtgttggtgttggtgttggtgttggtgttggtgttggtgttggtgttggtgttggtgttggatctgttgatgcaggtttagaaaatgccctgatctccgatatagaagcccagtcgttttccgtattcccatttacagtaactttgatatattgtgctgtcaaattagagtcttgaatcagataacgttcatgtgagttggtttctccactgctctcgccgtcatatagagtcgtaaaggcagtgccatcagtggaggtagacaagacaaaatcatttgtcctaacgtctcctcggtgccatgcaatatctacagcacaaagtataccttttttctcaagctcaatttgaatattagagcctgagccgtagtttgaccatcgggtgttaaagttattgtcaagcacgttttgtggtcggttaccatcattaccattagcacctattctagtaactttatcttgaatacatcctgcaggcaattgaccggggttgggttctgggcctggtcctggacctggacctggacctggggatgcaggtttagaaaatgccctgatctccgatatagaagcccagtcgttttccgtattcccatttacagtaactttgatatattgtgctgtcaaattgggatcattaactacataggattcatatgaattagtatcaccactggacttgccagtaaagagaggtgtaaaggtagtgccatcagtggaagttgaaatcataaagtcatttaccctaacgtctcctcggtgccatgcaatctctacagcacaaagtttatcctttttcccaagatcaatttgaatattagagccctttccataatcagaccacctagtattaaatttattgtcaagcacgttttgtggtatattgttaccatcttgaccactagcacctattctagtaactttatcttgaatacatcctgcaggcaattgttgactagggctgaggcttggcgtaggtgtagcagcgggtgtagcggcagcgggtgtagcggcagcgggtgtagcggcagcgggagctggatcagggcttgacaaaggccaaggccaagaatttccatcatttcctggcgatggtggtgttccatctagatatccacttattatatcattgatattcacactagcatgtgcattgatgacaaggctggataatccaggtgtggaaaagattaatgttaatgctagaaaaacatataaaaagttattatattttttcatttatacacttactccatttaaaattgtatttctttgtaaactcaaatcaatttcgataagtaatagtgcattatgtatgctcattccaagaatttaggagaatgtcatatttatgggacgcttgtttttattatcaaagaaaaacaatgtagttagttataaaactattataattaataattattatctaaattatactaccagtattttactatcttatgaaacataagaagagacaattaaataaaattatatgaatttttattacaaattaaaacatatttcataaatattaccaaccgtaatataaattagaattgtttcaatatattaagattaaaaatgttgtaatcataagtgcatttattgtctttattattggttccacatcatttgatttaaataacaaagtaaatgccgcaccagtagatttaccaaaagtaagtctaaatcataatggcggtatttctgatatgacgccgacgataaatgtgaaagataagataatgaaaaaagtcggacaaccagaggacacggagactttagaatataagtctctaatatacgctataaacagaggagatcaggtatcgtttaactttgaagatgaaccctctcaagttgatgcttttctcgtagactatgaaactgattatagtacattatgggctttggaaaaaactgaaactggagaatacatagcaaatgttccctcacctgggctctacaatcttgatgtacatgctatatatccagacggagaatacgtgtcatactctaagttactaaacgttgtagacaacaatctaaatctgctaagtttaactccagaaaataatcaatgtggcaatgagataacattagataagctaactgcaagtggcaatcccgctacaagcatattgaacaaggtaattaatcagccattaataaaagagctgtcatttggtattattgacgaattgaacgttcagttgaacaatgtcaagaatatctgcggaattcaattagggctcaaaaatgcacaaaatgatatcaatttctttgcagtacagggttcaagtgacggctcacagtattctgatccaatagtttttgcaaacacaggattcagcggtgaactgccagaaatgtacatatatccatcgtccatagaagccaaattcttaaaaatagtgcctcttggaagtacattagaaaagggtttaggaattacggactttaagttatttggtcagtaatgcccatcgtttgaaatataaatgaagaaataaacttcttttttttgattttctatatttgaattatgaaatcaatttctacaggagaatttaatggtaaactgtttactccaacagctactctagagtgccttcctaaatctccaaacacctcaataaggaaatctgaagctccattgattacctttggatgatctgtaaaagtatcatcacagttaacataacctgttattttgactattctctttaccttatctaagtcgccaattaggctcttaagaattgagaaggcgtttaaacaacaaattttacaagctagttgagcatcctcgattgaaatttgtttgcctactttacctttaaaattcagatcgtttgatggagaatttatgtcaattggaagttgacctgaaataaaaactagatcgttgatattcactattggaacatacgaacctaaagcttttggttttccaattggaatgacaagattcaaagattctatttttttttctggtgtcatgtttgaatattccatcattagaattaaaaggttaacttttttgtattcagtaacctttttaatatctttgacttttgttgtaattatgtcaaaggagggtgaccttccaaaacttccaatcaaaaacaagaaaataggtactataggtttctctgttattgtgataggtttatcattgctatctatctatattttatgggcgtcctttggctatattggcccttcgttctcatcagatgttttaaatacgcaacaatcaactttaagagcccaatatcatttaccggaagagccaattattacggatcctacggtattacaaaccccaccttcacttcgccagtttttgacagaaaatgcaactagtggttcgatcaatgcaactagtggttcgatcaatgcaactagtggttcgatcaatgcaactagtggttcgatcaatgcaactagtggttcgatcaatgcaactagtggttcgatcaatgcaactagtggttcgatcaatgcaactagtggttcgaccaatgcaactagtggttcgaccaatgcatcagatcaagcttcaggtaatgttcaagtatcaattgtaccgggtgcatcaactttgactgatacggcttacagtccaaaccctatcgaaatcactgctggtcaaaccgttgtatggacaaacgatgattcggcatttcatactgtgacatctggaagtgccggtgcaccggacgtagggaaggcatttgattcgggtttagctggtcccacagcacttaccagcaagggaaaaacctttgagcataaatttgatacagcaggggagtatccgtatttttgtaccttacatccagcgatggtgggtactgtgatggtaaactaaaacagaaaaattcattttaatttgtatttgttaatgaaattaaagacgcagagatttcatcagattgttaattgttcatagtatttgaaacaattcatctttactcacatacagataatgaataccaagataattgctgccggaacagagttctcgatttaattagaaaatgagtaaaggaaagaatatttggacatgaattctagtcctgcgtttcctgctaatccatgcctaaagagatatttttctcatctaattgcgatactctcagaatagagtagtaaaaaagcaaagtagtacataataaatacaatcatgtaccttcagagtcatggataatcgttttgacaatgcaaaacccaattcgttgatcaaagaaaatagtccctatctattgcaacatgcttataatccagttaaatggttggcttggaatgacgattctatcaatttggcaaaaaaagaagacaaaccaatctttctgagcatcggatatagttcctgtcattggtgtcatgtaatggcacatgagtcatttgaagatatcgaagttgcaaaaatcatgaatgaaaaatttattaatataaaggtcgatagagaggaaagaccagatatagatgacatctatcagagagcatgtcaacttgtaaatggtaatgggggctggccattatcggtatttttgactcctgatcttaagccattttatgtaggtacatattttccaaaagatagcagatatggtatgcctggttttactgaaattttaaatcaactttctcaggcctattcccataaaaaaagtgacataaatcagaccacctcggaatttgtagaagcgctgataaacacatcaaaagatattttgaacaacaaaagtgtagaacttgacaagacagttctagatgaatctgcactaaatttattgcaaatggcagactttattcatggaggttttggaatgtcccctaaatttcctaatgtatctaacctattatttttgcttcgttactacgatatatcacatatcgaaaaattcaaggacttcgtaactctaacaagtgaaaaaatgatctttggagggatacacgatcatctaggaggtggattctcgagatattcgaccgatcaaaaatggttagtgcctcattttgaaaaaatgttgtacgataatgcattattggttattttgttttctgaaatgtatcaaatcactggggagaaaatatttagagatactgttggaaaaaccttggattatattttacgtgtgcttacaaacaaggaagggattttcttttcagctgaagatgcagattctgacggagaagagggaaaattttatgtatggtctaagagagaggtcacctcaataattcaaaatcctttgcaccaaaacatcttctgtgaatactttgatataacagaagtaggcaattttgaagggaaaaacatactaaatatcaaaacctccgtcgaacacctagcgaaaaagtatggattagatgtaaaggaggttaataaccttatatctgtaaattctgcaaggctttttgatatcagagagaaaaggataaagcctcaaaaagatgataaaacaattttatcatggaatgcactagctatatctgcttttatcaaaggttataagataacaagtaaagaagactatttaaaaacggctttaactgcggtggatgtcatcgaaacaaagttaaagtctaacgaaggatatttatatagaatttataaacaagataaagccaagatactcgcttatttggatgactatgctttttatataaattctcttctggatttatttgagataaagacaaatccaaggttcattgaactagcatcttattatacagatgttttgataaaacatttttgggacggaaaagaaaataatttctattattcttctgacatgcatgaatctattctcactaaaaccaaagtcttgtatgatttggctttgccaagcggaaattcggtttcaatttccaatttaatccgtctttatcatataacagggcaaaacaattacatagacatggctgagaaaatgatgaaaggatctgtatcatccgcactagataatccatttggttttggttggttactatcatcgacatatctatatattaaaaaaccaaccgaaataaccatttttacaaaggataataaatcagacatgattgatgaattgaataaaatgtatgttccaaatggtattttttctattgtacacgaggacagtatctcagaaaagctagataattataatttattcaaaaataagtcactaattaaagaaaaacctgctagtgattttgctataatatgtaaagaatttacttgttctcctccattaactagtgtggaaaaaataagggatattttatcttcaaattcatcaaaggaaagaattaaataatttttttataatcatatcacagtgtcaattcttccacaattcaggttttttttcatcactggattaattattttaagtttgggttcggtttctaatattgatgtttttggtcaaatggaacaaacatccaatatttttgataaagcaaagtcatctagtgatgaggcgatttctttaattgattctttgaaaggatcatccttacttgattcagtagttgaaagtatgcaaaatttttcttttccgatagcaaacagatcagataataacgacactgacaatgtaatttcacaaacactagataatgcctcaaattatctcggaccgaataatactacactaaatattacaactgtttctcctgataaagataatattactagtaataataacagtaacaataaattagaaaatatgcagtctatcatgatcctgccttaccctatgactatttcttcaaaggattacattccgctatatagttcagcgccattgaaaattttgaatggaaacattcttgcaaaacttccgtgtaattcaactcatccattattgcaaatcgtaggcacttctgccgataacaacgtgttcccaattcagatgaaaatggtgtccaacttttcaaaattagggagcatgtgtatgtatcaatcgctgattcccaatgatttgtccaatcttctatattcacatacgataaccaatatttatttatacaatccgcttgacttttcactcgaagttccaacaacaacttccatttttattggaatacataaattgacagagtgatctttttctagattgaatacattattccaccagagactataggaatagattctaagttagatagatcctttatacgagcgattatggcattgaaccaaagactatcgattccttgactccaaattgttatctttttatagtccctttctttcccctgatggaaaaaacctttgcaatcttcgactgtcatgttattatatttttgactaatttcttcaatagctaaatttgcttctgatggcaaatacaatatagttagagtaggatatggaattgtatccgcagaagtagatgatgatgatgcatcgttagccatggttatattatgttttagacttatatgatgatttcgttgaaatatttaaaatatgttgagactataaattattgaaaattcataaaaggctatatgttttattattttaatataacaacatgaaggcggatcaattcacaaaaagcatactagatttagataatgatattttgtttagtggggttattgaaaaatccggacatttaaataccagtaatcaaagggattctctggacaatcatctaaaaggaagaaatacagaacttattatttctgaatctgcatacgcggtggatttaaggaaagcgtttactacatcatttggaagtttaaactcaatttgttatcaatatagttcactcagaatattaattattccagtcaaagaacatgtgttattcttagtgataaacaagaatgttgaagtagacgatttgactcagaaggtttataatataattaattcaactaaagaactggatttatactcttaaagaggtcgtctgtgattgaataaaaaatagattaattttgttggtagttatttaagaaaaataaattaatccttatagttcttaggctgtgaccaaaaatctaacaacctaaaataagatgaagttgcttctttcaaggtatgaagatatgcctcccgtaattgttcccatatcatataataattaaaattattttccaatgtttttacaatatttctttgattcccatcgagtctgtttgaattcagattatttgtaaccgaggaatctttatgtggttcttgtagaatggtcttttcttctgcttctcgtttggtcttttcttctgcttctcgtttggtcttttcttctgcttctcgtttggtcttttcttctgcttctcgtttggtcttttcttctgcttctcgtttggtcttttcttctgcttctcgtttggtcttttcttctgcttctcgtttggtcttttcttctgcttctttattgggtattacataaccttttggaagtgtcataattaaagtgacacaaaagaagattaatgcttttctaagattcttaaaatgattaattcagattagtgcgattatagaatcaaaatttttttttgacttgtccattttatatcttgacaatagatttaagaattcgactctctttttatcataattaacaaatttgtttatttgatctgatataatacccttgaaaattaacccttgaaaggcggatgtaacattattaacttttctgatgcagctagcactttcaaaatctactatagtgcattttgaaccacaatgagaaattattacatgattatctaacttatttagttgaccatgatctatgtgtagtttatctagtgtataacattgagtcaaaatattaattatgatttttcgtatcaagtctaagttcatgtctgattttaagaaccagttccttgcggacaaaccttctaggaactccattaaaagagcattttttgtataagagaaaaccttgggtcctagattaatcctatttatactctggtaaaattcaaattcattttgcatatcggttctacacgaatcaattctcttaatttttagtgccaaagttttactatgcatatcttgaacttttagcaccaatccttcgcttcctttccccaaaattctaatagcatttaaaagggtattaccttctagaattacaaattttagatttaaggatctaagttcactcaacctagaatgataatcagaggcactaaatctgggataacataataaatcaatcaaattagctgatgataaaataaacttgttagaacactcttccatccgtatataataattcagaaacagtattttttatatgttcatccaaagtagggttttgatcaagagtagctattttgaaggatcgaaaaaaatcaactttcaaccctctagggatccctatcagatcaggcttgttcgcgagaataaattccaaataatcttttgcattagtaaattccctaaaaagaaggcatctagttcgagagtcattgtctaaccattttaatggagagccatcattaatctctataaatttttctaggtcatgtaatctaaatatttcaggacctattttaaaagataatttagaaattgttagagactcgtataataaagcaataacacaaactttttccttttcatgcacattacatttgtatttcaatattctaaaaccatatgattcgacaaatttacatatggacctggtcattttcttaagctgtccccagattacatcagacggtctatcaccatatttgaattcaattaccataatgaaagaagacaataaagctttgagatcgttgcttgggttatatacccgttcctctcgaaaataattattgctaggatttgctaaaacctttcttgaacactggattagagtcgcgactgaatgagatgaaatagcactacctaaatttctattttcatctattggatccaatattactaaaaaactatcaaaaatcctcttatgtttttcccgttcatgatcaggtgttgcgatgctgataacagagttgtcactagaatatgtagaaaaaaattggatggtagataaaaaagatccaaatttcaaaatcaggacttcacaaacatacccactaaatccctctatagaaatctcagctccataaatttttagtgatttcaaaaacttcttaagtaatctcacttgatttttcttttcctgattcaaattactgattacataagaggtatggaagggggaacggtcagctgcacttttccaatccccgaaggagacatcaaagcatgggacaatgttaaatttaactccgtcaacataagcttctacataaggatgatctgcatatctaagatacggagaatattcctttagagattgcattccaattagctttccataagcctcaaaatgaccataatcaacgtctttcttaaatttgataaaaatatcaatatcggcttcattcttgagccaagttcctttagcaaaagatccaccgaacacgatctcatttatcttagacccaagtttatattccgtaacacaagattcaagtttattcttcaccatgttagccatagcatgaaggttaatttcttcttctgaagtaggagtacatttctttaaaattccttcaattaaattattgatatcaggattactcatttcttttatactcgggcattaatggtaaacaaatcagaatatataggaccatctgctgtgagcatgctttgttttagtttaatttggcttatctcatctttaaatagattaaattgaaaagtaggatccaaatatatacgacccttaaaatgccgatttattcgaaaaagtgtaagatgagggacgtatacagatttttcttcactaaaatcatgttgtgattccttacggtagccaatatatttatcaagcaattttgaaattgaattaaaaaggtcatttaattttttagaactttgattatccagtcccaaccaaataaccttaggattagagttttttggaaaacatcctatgttagcgaatttaatttcaaatggatcaaaagttaaactttctaaattggagataatttcccttacttcaagatcggtcttttcccccaaaaacattattgtcaagtgaagattatacttgttgacgagtctgacatgatgcaggtcaaattcatagtgtttcaaaatttgattctgaatatggataagtttcccaacctttggaatatctattgcaacaaatatacgcatgaatacaatcaaatgaagttctaactatattaattctcaataatcaaagtaatcaataaataaatattgatagaatgttcacagaatagagaggttgtcggttctagaccaatttataatttgcttaacaggaatgccgggtgcaggaaaatcgacagttgctacttttctccaaagtaaaggatttcatctaataactatgggtgatgtaataagggaaaaagcggtagaaaacaacttgccaatggatgataaaagtcttggcgatttgatgaaaaatctaaggaagcagcacggaaatgaagttgtcgcaaggctagtgatggagaagattaaagaattggaaaatgtcaattttattgtagtagatggaattagaagttatgaggagtatatggtactaagaaatataggtttcgtaaagttattggctattcatgcatcattgagtattagatataaccatataaaattacgagacagatctgatacaccatcaaatcatgaaaagtttttacaaagagatgaacgagagatgagcgtaggcataagcaaagcaatagctcttgcggacgaatcaatatcaaataacgatctatccttaatagagcttaaaaatcacgtagaagtaattattaaaaagtggtcagatgagtataataaacggaaccaaaaaaacattcttaccacttagaacaaaaatggaacttgaaagtatagaagttattgttataactccaattaatttgactgaagatgtacaaaaagtggtttttgctgtcaaaaacgtattaccaaatacagaaccagtgataagtaagaataatttgtatatcaagatgaataattttgatcgtttgagaaaaataaaggacaagattaggtcaaaaaaaacattagctgttttacagagaattttgtataataattacaatatgcaaagtacttggtttttactaaataaacaggctgctttttcagacgtggtagtattagtagaaaacgaaaacgaatcccccttgggacccataaaaataactgtaaacggctgtgaattagaaagaattaatgaatggtttgagaaatagaggaataaataaatactcactctgctgaaaggtcccagtatgtagcgtctttaaattcggtcttgggttttccaagagacttccattccttaaatgacttaggatatagcttcacgtttgaaattccagctatctttaaggcaaaaaaggccaatcctgagagcgttccgacgcttccacagtaagtaattatctcattgtttaagtcaatacctctattttccatgaatcgtttaagttcagaagggtttcttaatatggaattttccgagcgtaacatagtgtatggaatattctttgaattaggaatatgttctgttaaaaaattcaatctttctcgagaatcaattatgatcttatttttatcattttgtgcattttctatatattcagcatctgcaaatatagaataatcgatatcgatagaatgtgaaactttagaatatttattagaccttctttcaatttctaaacctagttttttccaagtatcataggtaacttctaataaagcaacatttctgtgtccaacaaacttaaatgaccacgctacccttgatgctagtgcaccaaatgtatcatcataaatgactactaaagtattatccgatataccgaggttatttaaaattttaattatagtctctggatcatctttggataataattcagctagtggtaaagaaactgcagtctttatatgacctttcagatattcgtctctttttctaacatccacaactctaactttatttttttttattagagttcttagagtatcaatatcacatacaagattcaaagaaggtgttgatggaggttttgcttttacacgtttgcttactaccgttagatcatttttttttcgatttatgggtttgctcaagcagcacattcgcctctagcagtttttgcgacaaaattagaatcggttccataatctttgtaaaaatcaggtgcggtagaaaacgcaggtaattcaattataggtaaaagtagcttcttcatgtcatctatattcttaatttcgccagttccatttccatttgaaattttgtaaatccattcatttaatttttcattcccttttctttctttcttgaagtgttcaaatattttgagaactacatctagcacctttttagctggaacacgcattattgccttgcccaattcaccattttcgccagtgctacccgcaaaaagcatcgtatagatggggaccatggatgtcccaatcctggtggcaccgccatagaaaccaatagttgcaacttcatgctgtccacaagaattaggacatccactaattttgatagtagaatcaacaaagtctttatctaaatcaatattcagttctaaaaatttactttggatttcctttgcaagcctatgagaattggtaatagctagattgcatgatgtagttccagaacaacctacggtagatacaattgtatttgcacccggatttcctaatccattgccagatagtttttggtaaacttttggtaattgatctgcttttatgtaacggatcagaaagttttgttgaggagtatttcgggcttttttttctaacgaaaattccctgatacattctgctagaattcgtaactgactagaagtgatatcgcctgcacccaaggttatatacacactataatagccggactgtttctgagcaacaacattggtatttagccatcgagtgtatggagtgtctgaagaattggaatttattacaggtaatttaattttactcttagtagaggtagaggaaattgaaatattattcagatctccattcttcaaaaaaccatcgtatgattttctcgttgggatggaaattgttgcttcaaccaaaattcgttccttcaacaacaagccttgaaatttttcccatccgatttcgctgaccaaataacgcattctgtttcttgcaagattttctctatttccaagtcggtcataaagtcgaattgtggctatggaagtagataaaagcctagattcgggagtaaactcctctaataaatgacctataaatgaggcagcgcctaagccacctcccaaatagactcgaaatccctttactccatcacggattgtaggaacgaggcctacatcggctatccttacataaccatgttctggacagcaagaaaaattaaatttaaattttctgggaagattctgacaaataggatttcttaagaaaaacctcgctattgctttagcgtaaggagtagtatcaaatggttcatcaggacatactccagcaaaatgactgcacattacatttctaatggtattaccacaagcttccctagaagtaagtcctacttccgctaaaccgcgaaatacttcactaacatcttctaattgtacccagtgcaattgtatattttgtctggtagatacatgagcagatccgatggagaatgattctgacagactagcaatcttttcaagctgggtaggtgtgatatcaccacctggaacctttattcttatcatactaaattcactatttaatctagagccataggcaccgttttgaagtctaaagcgcctaaattcatctgcattcaatttatcttgacgatataatttcactttattagcaaaatattcggattcttctgctaaaccccatttttcattagtctcaatttctttatttttagatgaagaaagaacatcataatcaatagattttgccaatgttaattataatgtgtttaacaaaccttatattttttatggaatatgcttatttaacacgtattatgcaattttcggaatcattcactaattcaaatttagaaaaacttatagttacaattgaaaaaactgtattaaggtggggtcgtagcgaagccaggcatcgcaacgggctccagatcaaataatgggcaattattgaagaaacccgtggatcaggggttcaaataatataagtaatatattagaacaattcccttcggccccatctttcctcagtcactcttgagtttacgtaaaataacaaataaactggatatttatgaattagaagggaatcagagatatatattaaaaaattagcaataataaattactgcccatctatgcactaaatggaatcgatagaaagccctgtctaatcaacataaagtgaaaaatattgaatatttgaaaagattttggaaaattatttgttcttcttgaagctaaaataacaagaatgacatcgatctttaccataaataacgccagcgttaccacattcagagcattttttctcattatcaacagtagaatccaacgattttatcttttgaatacacttgtcacacaatggagcatccaaattatgactagatataaagacatctccacattgtgaacatctgaaactataaatttttcctctaggtttccatttcttgaatggattagcggtaaaagtatataatatttttctaaatggattggccataaagtatataatatttatgtaatcagacattttagtttaatggcttagaattcaagaggggaagtcataaacaaaacagagaactataagctcctatatagttgtctattccctatacggataaaaaaaactcctgaggaaatcaatatcaaagaaataaataaaaataaaggatttatcatttgtctaagatagtcaggtgcacttgaaagataattgcaattctcctcacaaatctttgtaacaggaaacagtagtaaaatcaatccaaataaaatcaacatagcgactccagcagtagagattagagcccctagttttattatatgacgatatctcaatgaagtatccatctaacaatcttacctaaatattaatactcaagtttggatgaatctatagtaacgtatttgtattcactattttttgaaactctattgaattgtttgttataatataaaaaaggaacatcattttgtatgtgaagatcccaaattttatgtacttgatcgaaatacacttttctcttttttattttgcgtctaattagctcatgacataatatatgagatatttttgcacaattattatcagcaaagaactttacatttttgaaatctgaagaaaagactttgggtctaaaccaagtggcttgtccaaaattctccccgtgatatccctctatacgacaatccgaccaccaagacctaaaataagtaagatagaaatgaaatatggatgaacccctctcccgatgatctcttaatagatatgcgagattgatcctatcaaataaccttccaggaattacaggtaagatatctacttccacagataaatcttctttaaactcatgcttaatccaccactgaaaaaagcgcaccatcgatgaaacatactcccaatcttcttgataccgtttcttccactcttcattttttgatacataaataaaaaaaagcttatcttgcaacaacaactacacatcatacatcaataaaatttttgacacatcaaaagtctacataagagatattctcatacaaaaagttcataatttagaagcaatatagacaaattagatgtcatttagaaaattaggtgctgtaatacttttagtttcagatatgaataaatctattcaattctatagagaaactctaaatttgccattaaaaaaagaatctgatgaatggacagaatttttcaataaagagacagtattggcattgcatccggttaaacacaaagagaacctgaaatcgggccaacacattctgattggtttttctgcaagtgattttgataacacagtaaataaactaaaagagaaaggtgtagttttttttaaaaatcctaaggaagaaggatttggaatgcatgcaataatagaagatccagatggtcatctaatttcaattgtaaaattaaaaggaaaccaaaatgaagaagatggatttgattttttggggttagttggtgcagaatagctaattattctcttttatagaaaaaagtaacgatataagtaacaacatgtgtatatatcaaaattgtattgaaatcataatattcgaaaaacctcatatctatagtaattaatgtatcaaatgattttaaaaaagaagcaggtattgacggatcggattatgggttttttacctagatttagtaaatttagcggatcaagtaactttttgagataactaaaataggaataaacgaaattattgtatatattctttataaaagtagttctagatattccattaccatgttctgcagtgatagttccacgatattcaaatattttttttgaaagtcttgtaagtaattattggaaaccatcccactaactgtacgataattactactttcaggattagtgagtagaaatatatcttgtttttttagttctttatccaaacacacgtaactgcaccaggctgaacgcataaggtaccagactgatatccaaatcaagaatcttattcatgtatttagtaaaatctaagattaatccattggaaaggctttgaccaagtaaacttgtgcctgcgccgcaacaagtaacagacatgccattttttgtagcatatttcaaagacgctactatatccgccttatctttagggaaacatactaattctgggtaaatttgatgatagctcgaatctacagaataataatctctaattgaggattcattagaaatattaccgctgtaggaaagatttagttcatcaaatacgttcattgataactctatatattagcaaaggatataatatttaactatcaggttaagaaaagagcaaagattgaaaaactattttgtaataatgtgactcagattctccaatataaagaccgtatgttctgcctgagatacaactttgttattaccctcaacaagaataggataagatctgatattcttcttcttaataagatattctaacatttcacgagctttagattcagtgaaatcatttactagccaacgtaacgcaaatggaagcgtcttaaatcgattccataaatatatgatgaattcatctgtgtccttattctttgtaggttttcttgatactaatgaaaaaatattccttatcttaccctcataaactatgcctagtccatctttagttgttacaaatggttctattgcgtaggcctgattaggcattagtgaaaatgaaggtccaaaagtcttaatgttaggaatagattttccggcatgtatgacatactgttctaaagaatgtccactaagattttgaatcggctttagaccattatatgttattgtattctcaattgtttttccaatctcacttgatttagttgcacactttgcaatcttggtagcttcatataatgacaattctgctatttttattaattgatcatattttgaatcatatgtaatagtaacagcggtatctgcaacataaccatctatatgtacacctagatcaattttaacaacgtcagtatcttttatcacaatttgatcatctggttcagcagtataatgagcagctatctcattcaaactaatattaacaggaaaagcaggttgtccaccccgctcatttatctcgctctcgatagaattacatatttcataaagtgtcctaccgacatgatttttttttctagcgttttccctaactttggcagctatttgacctgcacgagtataattatccactatttgacctgcacgagtataattatccagagacatgaattagtgataataacgtccataatatataacaataatgtaaataatgatttatattaattgaaataagattaaaattagacaaaaaatttcccattagaaagggatcgtagtctagcttggtaggatgccagccttgggcgctggaggtcgtcggttcaaatccggccggtcccataattaataaatagtcaaaaataaagagaaaaaatttatactcttctacctctacgaccaccaggttttctagtagtatcatgagggactggtgtaacgtcatcaattctacctatacgaaatccagcccgagctagtgcccttatggcagcctgagcaccgggaccaggaattcttggtccaaccccaccgacagctcttacgcgtatatgaagtgcattaatgccctttgttttggcagcgtcagctgcagaaacagcagatttcatagctgcatatggagacgattcgtaacgatctgccgttacgtgacgtccacctgaactaatggaaatagtttctgcaccgcttatgtcagttatatgaactaaagtattattataactactaaaaatatgggctaccccccatttatactgagtaatttcctcttgtgacatgaatgtagaattttttgagtgtcacatttaaaaaccttcttaagcaaaatgtgtatatcctttgttgttaagcaatttcttatttccatcagaattaagaacaaatactctcccatttccactaactactttgccgataatatacaattttaggtgatgcattttcaatatcttggaaatttccaataggtttttttttgttattgtccctactatattgtattcttcacctccataaaatattaggtcgtgaaaatcaagattatttattgataaaaattctttcaaattcggaggaataggaatcttgccctcttctattaataaattcaccccactttccttggatatttcatatagtgaagaggctaggccatcgctagaatccattgatgaagaaaaatattgggcaataaatactccgaattcataagaagggcaaggctgtaagaccgaatcaacggatctttttctaaagtaactattggggcttggtagattattcattagaatttttaatcctgaagaactgtatccaaacttaccagaaacaaccacatagtcatcaatacatgcaccgtttcttcgcggtatgtttgctatcgaagataaagatccaatcatacagcaatcaattatgatttccttagattcattgatatcgccacctacaatatctattccaaactcttttgaagctaaagacaagccatcaattattttagaaatctcagaattttttaatgacttgggtaaccctaatgatattaaagcggcttttggcattattccttttgaaaccagatcacttacactagaaactacagcctttcgggctatttgttcaaatgtcattttgggtgggacatcagtatgttcaactaacatatcacacgtgacggctagaaatttattattaatttcattagatgaagaatgtaatgaattcaagggtatgattgatatatcatctttacctatacatggttccatattattattaccgaatttggatataattaaattcagtatttgtttctcattaaattttttcataaatttcaattattttattatgaaatagtttgtacatagaatcaactttttctctagttgattccaatgatattctaagtgcatgttcagtatttgagaaacgtattaaaatccaagaactatcatctacaataaatttcaaaccatcagtataaattacatctgttgagtaggattttaatgcagataatattttatcaaagagatatttattatcaattttaggatctatagaatgctttgttcgtatttgtttaaattttgaggatagagtcatacattcattaattgtattctgatctaatgagctgataagtacgcttgccaataatccatccctacaagaagtaaagcttggcataatgaatcccccgctactaccttcaccgcctgattgtgaatcggtttcaaacatcttttttatcacgtttgattctcctactttagagacaaagatttgaccacagtgatcattaacatatttttcaattgagagactagtgtcaagactaatggtaaaccttttgaatccattattgcttattacgccggcaatacataacaacaaggttgaatcaggattaagattaattccttcattattaacgattaccagtcgatcaccatctacatcaaacgcaaaaccaaaattcaacttgtttattttaactaattcgcataattccactaaaggatcagacgtcggatctggaccacgagaagagacccccatcttgtcattaattccaagatattttatatgataggaatctagcaactgattagcataaccgcatgctgctcctcctccaaaatcaataccaactttgaaatcagcattagattgatttggttgcggaatatagtttactatatcgttagaatagctggcattaattttgaaatagtggccaatcttatcataatcttggattttcgtttttaatacctgttctaaatcttcctcaaataatcctcgcccctttataagcatctttaatccattccaagttagcggattatgtgatgccgtaatcatcaaggcagcagaatactttcgagattctctaaataaaaccggggtaggtgcaatatctaaatcataaacattaatcccttgttctaatagacatccggttacaatgtctgtaattattcctcctgatggtctactgtctcttgcaattacacaagtcggtatatcataattatttttcaaatagatccataaaccctagaaaaacgggctatctcttgtatactaaggtctttgccaaatatccctcttattcctgagatagatatcttcacgaaaataatgagatagatggaataatttatgttaactggatttaggaaaaaaaataaaagatcaggagaaacgagagcctgttaacagtacttcgcattgttcacagattcttttatctatatttgattcaatactatggtggacatcacatattatgaaagtatatcgcataaaattacatagttgaataaattttgtcattgtacttggagaataagcattatttatagaaagatctttggatatatcgtttatcattttcataacttcaaaattatcctccaatttagctaccaaagaaagatcaccccgtgttcctctaaggtaattactaactgctgcctgagtaatcccaagaagttttgccacagtttcttcttttaaatcataatctcgaattaattttttagataaaatagcacgaatagcagggatcaaggacttggattcaatttcagagggtaataacataataattcctaaatttctaattatataaagattttttaaaattaaataaacaaaaaataattgggtgatatggatttagccttcttcccagcctttactaaacacaccgaatttatgtaacggaactggttggcctgcagtatattctaatggtctcatccagaatatagcatgagttgggcaaacacctacacatgcaccgtcagaaatacatctctctggataaaagacaaatgctttgcctcttttccaaccttcaacaggtttaacacgaagtacatccggacctaatgcggtacaaatttctacacaaagtgcacacccaatgcatctttgttcatcaacatctggaagtatagcaattggcatctaataattcactactcgtcttgtaacgataaaactatttaaactatatgccaatagcaaaacagtgttatataaaagataaaaaactagatattgaatatctattttttaatttgacgcattacgtctacttgaccgctatgaagccagtcttttaattcttcatgtgacggttttgtatcatgtttaccctgaagatgaagatggagtaatacataatttacctgattcaataaaaccttgttggcttcatcgcccttgcgagcttttgcttttaattcctccggaacggttccccaccattcctcaaatgatcttaccattaaaaaatcagtgctaagttactttataaatattttgaaatattaaataatagatatggaaattggtaggaaaatatcttaaattacgaccttgaaaatacatatatcatattatcagtttttaaggtatgccatttttgattgatgatattaattacgcacaaaaggagttaaacacatttagattaagaaccttcggcatcaaagataggtacatacatgagagattcatttttccttttctttgtggttcatatttcacatacagaaaggtagacgtagaaagaataacatcaatagctaaagcgatatcaaaagatccaacttacttagatgttggatgtggttatggcgatttcttggaaaaaattattcagtatttacctaacgcagaaggtattgaaaaaagcgccgacatattcttcaaattaggaagatacaagccagactatataaaaattggtgatgcatataatgggatagaaaaaaagtatgatttaatatttgtcggttggatggaacctggagtagattacagggataaaattgctgcaagtacagatgtaataattacaacttttgataaaggtggacaatgtggaatgaatggagaatgcgaaatggatgaatatgggtttgaaaaaatagcaagctgggtaactccatcctggattgacgttaacaccgaactattgaacaagtattattcaaaaatatcaaataaaaccattgaatctctaaaacagctaaggggtgcacacaatttgtggtatgtttattctaaaccaaaatataaagatatcataaaagaaacattaatcaaatctaataaaaaagattacaataaggatgtttatgagcatgaaaaaatcttggatgaatgtgggtttagttataatgaagtgctcccttcaaacccggatatttgcttatggaaaataaattttgaagaataatgcctccagaaatagataatttgtgtgtcgcattaaatgccttaaaagggtttagaaaatactcgatttcaacgcatcatgagagattcatttttccttttctttgtggttcatatttcacatacagaaaggtagacgtagaaagaataacatcaatagctaaagcgatatcaaaagatccaacttacttagatgttggatgtggttatggcgatttcttggaaaaaattattcagtatttacctaacgcagaaggtattgaaaaaagcgccgacatattcttcaaattaggaagatacaagccagactatataaaaattggtgatgcatataatgggatagaaaaaaagtatgatttaatatttgtcggttggatggaacctggagtagattacagggataaaattgctgcaagtacagatgtaataattacaactttggatcaaggtttgagccttgcagtggagtttgaggaacaagggtttgaaaaaatagcaagctgggtaactccatcctgggatgatatcaacacagaaataactaacaagtattattcaaaaatatcaaataaaaccattgaatctctaaaacagctaaggggtgcacacaatttgtggtatgtttattctaaaccaaaatataaagatatcataaaagaaacattaagaaaatgtcttaaagatgaagggcaaagagaaatacacgcatatgaatttgagaaagttttagatgacgtaggatatggatatttagagagcattaaaactattgataaagattatcagctatggaatattgattttgggtcgtaataatgcaaaaagactaatatgataaataaattaagtagttttcattgaaagttacaacgttaggagctgccaaggaagttggaagatccgcattcttgattaattcaaataatacaaatattctattagattacggagttcttctgaagaaggaacctctttttccaattcaagtgaacccaaatgatattgatgcagtggtaataacccatgcacatctggaccattcaggatgtgttccatccctttttcttcaaggagattcaaatctagaagcattagcaacaatgcctacatttgaactctccgagttgctaattcaagatatgataaaaatatcaggcttctaccttccttttcaatatcatgatttagtaaacatgttaaaccatgcaagacatctagattataagagtagtcacaccataagggatacaagcattacttttcatgaatcaggacatgttatcggtggtgcaacagttttagttgaatcagatggaaaaaaactgttttacactggcgatatgaatacacgaggttccaaggttctaagaccagccgaccttgacgtgggtgaaatcgatatgttaataattgagagtacttattcccaagctgagcaggttcccagggaacaatctgaaatggaattggtaaaatttgcaaaggaagtagtcgagaggaatggtgtattctttataccggctttttctgtggaaagagcccaagaaattgcttgtgtacttaaaacatataattttccatacaaaattgctatggatggaatggcactaaaaactaatgatataatggtaagatatccaaagtatcttagagaccctcagatgtttaagagttcaattgaagatgttgaaagaataacaagttggcaaagaaggaaaagagtagttaaagaacccggagtaataatttctccagctggcatgttagttggcggtacagcagttttttatatagaagaaatatgcaagagtcaatataatggaattgcattagtttcctatcaaggagagggaacaccaggaaagtctttactagataggagacaagtaacttataatggaagaacaataaaatgtttggcagaagtaaacagatttgacttttcaggacataatagcaggacagaattatttgaaattttgaacaaggtgaaaggtgaccctcaagtattaactgtgcatggggataacctatcatgcactaaatttgcagaagaaattgttgataagtatgggtacaaggctcatgctccagatgcaggtgagacaactactgtttagctaagaaaggaatacaacatttttgcatataacagcaatctctaataaaattttctaataattgagcaacaaatatactcttaacgttaattcaaccattaatagtgggcaatcttttctttgggaaaaaagagataatacatggtatggaatatatgaagaatcgatattaaaaataaccgaatatgaaaccaagggtgaaaaaatatatgaatatgattcttttcctaaaatagagaactggcatcaacatgtttttagactagacgataaatatgagttgattatgaatgaaatttctaaaaaggatataataatagacaatgtaacgaaaaaatatccaggattacggatcatgagacaaaaacccattcaatgtattatttcattcttatgttccagtaataataatattccaagaattcggctgatattgagaaatctctccaaaaaatttggaaaaaaggtagaatgggatggtaatgaattttatacatttccaaatctaagaacgctacacaatacttctgtaccagatctcttactttgtggattaggatatagagcagaatttgtaataaaaacagtaaaagaaatagtaaaacaggaaactgacatgataaaattagcagaaatggattacgataatgcaaaacaagaaatattgaaattaaatggagttggagacaaaatagcagattgtatattattattttctttagataagttagaagcatttccaattgacacgtggatcataaaattttttcagaaaaaatgggaacaaatcttagacgaagatatgaaaataaaggaaaagattacacccaaccaatatagagtgttatcgaaaaaaattagggaacactatggaagatattctggatatgcccaacaatatctgtactatagtatcagagaagaatatggtagaaaatggtagcaggcttgatctatctatttatttctcttttttttagtatcggccggtttctttgaagatttattaattgatttcttagaattggatggggtattttttgctgttttagtagaggttctagaattggatggggtattttttgctgttttggttgtaacatttttctctatttttaatattcttttatccatttccttgagtaaagattgagtttgtttgatagatatggactgcttttcaatagaattgagacctttttgtaatggttgagttactttttgtatcttttgaatctctttaaacagtttatctacattcttattaatggtctccaagcttttagttataggagttaaatcaatgttcctatgatcagaactgttttttattgtttcctttctattcgtgcgattcgatgttccctcatcatcttcatcatcttcatcatcttcatcatcttcatcatcttcatcatcctcttcatcctcttctaattctaattcttcatcctcttcatcatcctcttctaattctaattcttcatcctcttcatcatcctcttctaattctttttctaattcctttacctcttctttttctaattcctttacctcttctttttcttcttggttattatctaaattatcagattttgaagtgtcatcatctaaagatagaacgcgatcatcatcagttgctattattttctcttttttgttaataacaataggaaaatattgaatttctaaagacatgtctatacagtgaaataaaataccaaatattaaaactgatctctataaaatattacaaagtaataaaaaaatactagctaacttattggtttcaattcctccgtaaaagtattgtagatagacaatgcttcttcttcgctttttgctccaacaatcgtagcagctccactcgtaaggaagctaataagtagttgattttgaagggacaaagttatacccaaattgccttttgatttcaatatatatccattagattcggcgattttcaaaatgtttgataaatcaacttcgtttgtaatttgggcaggggtaacagtgtacgttctcttgcctcgatctctaccgcacaattcttctaccataatagacggtattttgatatctttttgttcaacatgcaatccgcaggagggacattcatcatgtttattcatttgaattttatcaaaaactaaatcatttagatctacgtataataatttattgactaatgatggttgctgtccaattgcaatttttactgcttcagatacctgaattcctgagacaagataaagaattgacggatgtactccctcagtactacaagttggcatttcatcctcagacaattcaggaaagatgcatctaagacaagcactctgatttgggagaatagtacaaactgaaccaaccattccaagagctccagcataaataaagggtatgcccagccttaagcatgcatcgtttagagcatatctagcatcaatactatccaaggcatcaataactatgtcatatcctttaattattttttcagcgttaaatttagtaacagaaataggaatagcttctattttaacgctgggattcattttctgtaaacgttcaaaggcagcttcaacttttacctttcctatatcctcatcagtgtacaaatgttgtctgtgaagattggagatctctattacatctctgtcaactattcgaatctctcctattcccattcccactaattgagctaaaactgggtttcctattcctcctgcaccgacaacacatatttttgtatctttgagtttttccatccccacataaccaatttcctcgagcataatttgcctcgaatatctcagcatatcttgattagttatttcagctccaccagcaactgcaggtagaatgtaaatagaatcgccttctttcaaaactgaacccattcctgcagtgttaaaacgcatattttttccattaatataaatattaattaatgctctaggcttcccattaatgtctataactctacgtttaaaatcatcacccataatacctgatacaatgttgaatgcttcatctaaggttgaagcatcaatagacatttttctctctcctgcgcctttgtttaagacggacggaacaacaaattctatagtggtcaatttataattaacaccgtaatttttcgatttatatccgtttgttcaatggatcattgcagaaactaacctgatatcaggttttactgaactaggagtaggaagaagatcagcaatagattcggtacttttaagtccgttaccagtaacgtagcatactatattttcgtctctatcgattttattttcctctattagtttctttaaaactcctacagccacaccaccagcaggttcggtaaatattccttcggattttgcaagtaataaaatagcatttttaatttcagaatcggtaactttctctcctattccattaaattgtcttagacgttttagtacatatagtccgtcaccaggatcccctattgctaagctttttgcaatagtagtaggtttttctactggtataacttcattagatctattcttataagcatcaacaataggtgcacatccattgggttgggcagcaattatccttaaattagaaatatcagaaattaatcctagattcattatttcttcaaatcctttacaaatggaattcaacatagccccacttcctactggaattactagtacatcagggactgtccaattcaattgttccaatacttcaaacgctagtgttttagagccttcaacgtagtaaggtcgcatatttatatttacaattccataaccattagaatctccaattactgaagcaatcctattagcatcgtcataggtaccatctacagctacaaatttgcctccgtatgacaaagcttgtgcgattttaatatcttctatgtcagagggtgcgaaaatgtagcaaggtaaatttgcttttgctgcgtgagcggcagtagcagatgcgagatttccagtagatgcacagcccacggcagataaattcatctctctagcttttgatactgcaacccctgcaggtctatccttaaaagaaaaagttggatttacagaatcgtttttaatgtataaatttttaaatccacccagactattacccaaattatctgctttttgcaacggagtgatcgaaccatttaaactaactatatttttcttgtcttctatcggaagaatttcaaaatatctccagtaggttaaatctgaacgattttcaaatgtatgcctggtaatggtagtatctattttatattggacatctaatggcccaaagcaatcctcacagatatatataaaccttggggaatactctttattgcattctctacattttagtgcacttataattcccattatttctgaataaagaagaacaatatgatagataaatctctctaaataatatttagtattacttaactacgaggatcaatcagcttaattcattgtgaaaacatgaacgatttcctgtatgacaggcaggtttcatggaattaacgagatacaataatgcatcagaatcacaatcaactaatattttttctactggttgaatattccctgattcttcacccttcatccacaatctattatgagaagtactccaaaaatgggcatttccagtttcaacagttttggttaaggtgtacttatttgcatacccaagcatcaaaatatctttagtccttatatcttgaaccactacagggatgattccatttcgtttttcaaaatcgattttatcgatggattttaacaacctgaaatattggatcaaaaaggtataagaattttctataatcctaaaatttatccttaaatctttggggtatttttattagacagtatggaatactcaatacaatatagacgtaattgttgctaatgaataattggaataaacctagtgatgagaaagctctgcatataggatttgatgatactgactcaataaatggaagatgtactacccatctatcttatttaatatcaaatatgttaataaaaaaatttcatgtggaatttattgattttccactcttaataaggctaaatcccaatgttcctcttaaaactagaggaaacggtgcagtttgtttaagaataagaggaagaaattatgaaaaaatcaaagaggagatcactcatgccgtagagaactattccgaattagaaaacggagccaatccgggtttggttttttatgaagggaacgacattagtaaagacttgacatcgtttagtgaaagtgctatggataccatattaagtaaacaactagccataaaaatagctatgaagaataatatgcaattcagtatttttggaaaaggatatggaattgtaggtgcgcttgcagcaacaggttgtcttttagattcggatcatacatttgaaacaatcgcatatagaagtaaagaaaatattggaactaatagaaaaatggatgaccttaaagtaaaaaaattaagcgaggaatcatatccatatacctacaataatttcgacattaaaaataatagaatactaattactcctcgtggtcctgacccagtgttttgcggtattagaggagaagaccctttaataaccacattatttctaaaaaacttgtgtatagaagaagaattagacggttatatgatattcagatccaatcaaggaacgaatttacatctagtcaaagagaacagtggaaataacattaaaccatataccgcaggacgtataacttgtcaggttgtatctacaccatccgtaattaatggcggacacgtaatatttaaaataaaggatggatttggtaacatattacccgttgcggtttaccaacctacaggtctgacaaagattgcaagtatgttagtaattggagataggatcgaggtaggatatggtgcacatctaaaatcaaataatcaatttacactcaacttagaatacctcataatcaaagaattagaaagagtgtataacattagaaaccccacttgcgagaagtgttctaagaatatgaaatcagagggaaagaataaaggatatcaatgtcacatttgtaaaataagaaatagaaatagtggaaaaataaagacggaaaaagatagaaaaataaagacgggtctatatattccggaacctattgctcatcgacacctcactaagccatcatccagatatggcatggagaagcaatttaatagtatggaaataagatatttgctaagaagtacaaagtggataaaagatagcggggggttgatttgaacttacggctggctttaaaggcacagaaaccgctctgcgggttatgagcccgccgggataacctagcccctaaaaaggtctggcttccccaccccgctaaataatattggtaatataaggagtatatatacggtatagatgagtgaattgaattgagaccaaagaaaggcaaagaaattcaattccagtctttatttgcaggattatgtctttgttagtatatgaataagtgtattaaaatatttgatatctgtatattattctaattacaaaatacgaatttgaataaataacactcatagttaaaatgtttagtgcactacagactaactgtcgtgttgctattctggaatatctattggacatgatatcacattaaatttaatttattattgtaaccttttcatctttcatgatctaataatcactatatattaagggattataagatcatttaagtccaacattcgttataggcaatggagcaaactcgcctattaataagaaagaaacttaaaagtttctgatgcgggagatgggatttgaacccacggacccctaagagatgaggtatctcaattatcctggtttctgagcatcgtgttttaaatatctcacgcctttgaccaggcttggcaactcccgcataaattatttttgaaaagcccaacatatattctaataaaaattaaaggatttattccatatcagatccaccaacaagatttacaaaaatatcatctaatgttataggagatacagaaaatgacaaattattacgaaccaaaatatcagatatttctcttagattattctcataagtaaataatcttatagagtcagaactcatactaattgttttgccaaaagaattgatgaagttccttaaatcatgaacattataatcctttgatatgttgatgtcaattcttattttataatttagagtatttcttaagtcgttcatatttcctttagaaacgactctaccctcgtcaataataaatatagaatcagacaacatttcggcttcatccatataatgagtagttaaaacaatggttattcccttatttttccaatcttttatgatggaccatacctgacgtcgtgatactggatctaaacctatagtaggttcatccaaaaatagcaaaggtgattcagttgccatggccataccaaccaaaatcttctgtttcattcctccagatagattcaatgcaggaatatcttttgctgaaaaaagatctagtctttgtaatatgtcagaggttttctgtgatgcggactctttcttttcgccgcgtatcctcaaccaattataaatatgatcccacggagttaatgcgcgtaaaggtcttccttcctgtggaactatagaaatttttgggcgtattttttcaggagacatgagtatatcgtcaccgaatactaatatctttcctgatgtgggtaacatttgagtagaacaaatacgtataaaggtagtttttccggcaccatttcttcctaataacgtagatatttttccttcttcgatttgtaaagagatatcatctaacgcctttttattggaatttttgtatattttacttacattaaaagattctattgctaccatataatataatattgatctaaatgtgtatgaaaaatagtttgtttttattgttcattttttttgaattcctttgataaatcttttaatagatttttttgggtatcattaatcttatcaggcaattttacttcgatttttacgtattgactccctcttccaaattttccgtatcttggcaaaccttttcctttgattttaaaaacagcattagccttggtacaagcagggattttcagtttttcagttccatctatggttggaacccttgtttctgttcctaatatcaagtcaatgaatgaaacattgtaattatacatcaaatctccatcatcaagtactttaaaaatttgatgcgggagtaacatgtacatgtaccaataaatcgccattcattccaccttgaatactttctcctttcccagaaattcttagtgttactccgtcctcaacaccagaaggtatatcgatcttcaggttatttgtttttctaactttaccattaccatgacaagtattacaaggtttttctagtattttaccctctccgtgacaagtattacatgtatctaacgaaataaaggtagaaaattgattttggttatagactctgcgggtttgaccctggccgttacatgtcggacaaatttttggtgaagttcctggggaagcacctgtgccggaacaaaccgaacagtcttcgattgttggaatttggatctcttccttcttacctttaactacttcctctaaagtcatgtttacatcatatagtaaatctctacctcttcttcttctgtttgaagttctagagttgaagctaaagggatcattgttaaaaccaccaccactaccacccattctaccaaaaatttgttcaaaaatatcgcctacattaccaaagccaatatctttaaaaatttctgcaaaattgtcttcagatcctctaaatacttcctcattacctacatggccatacgtatcatatcgtttacgtttctcctgatctgatagtacagcatatgcttcagaaatttctttgaatttttcttctgcctctggcgatttattacgatcggggtgatattttaatgcaagttttctatatgcagattttaattcatccttagtaacagttttttgaacgccaagtacatcataataatctcttttactcataacaaatcacaaaaataattagtgtagaattattctcttaatcaagtattatttgatttattggctgcatcttccgctgcagacctaggatcgttattttccggattttgattagaagtactatcactgggaggtggagtatcagatcccacatcccctgcgcttgaagtgttagcagcattttgttgaacggcctgatatgcagctgtacttatttcagctaatgtgttttttagatctgttatttttgtttttatagtatccacattattggccgttatcgattcttttaattcttggattgatttatttactttatccttttgttctggagtcactttatcttttaagtcttgattaatcaatttttctgcagaatataataaattgtctgattcattctttaattctgcttcctctcgtttctttttatctacttcagcaaatgcatcggaatctttctttaatttttcaatttcttctttagataatttagagctcgccgatatagtaatctttgattctttggatgtagcaagatctttggcagttacgttcaaaattccgttggtatcaatatcaaatgtaacctcaatttgtggaacacttctaggggcagggggtataccagccaaattaaacatgcctagtgaaacacaatcagaagccatagttctctcaccctggactacatggatggttactgcggtctgataatctgcagcggtagtgaataccttactttttttggtaggaatagtagtatttcgttcaattaaagtttctttaagtcctcccataacctcaaccccgagagtcaaaggagtaacgtcaaccaataaaatatcagtagatacttcacctgaaattattgcaccttgaattgcagctcccaacgcaactgcttccattggatcaactccacgttcaggttccttgttcatgacagattttacaaattcttttactattggcattcgagtagggcccccaaccaaaactattttttcaatatcggaagctgacaatttagcatccttgatagcttgtagcattggatttctacatcgttctactactgggcgtaataattcctccagttttgctctattcaaaggaatagcaaagttctttggaccagtagattgatcgtatgccaaaaatggtaggtttatttccgtggtgactatgtttgataattcgatttttgccttttctgccgcttctctgatcctcatcatcgctgctttatcatttttgatgtctattccagactggttcttgaattcatttacaagataatctatcaaaatattatccatatctgtaccaccaagttgagtatcacctgaagtactcttgacctcaaatacaccaccacccatttccataatggtaacatctaaggttcctcctccaaaatcaaagaccataagtttgagatcatgttggactttatctaatccaaatgctagtgaagcagcggtaggttcattaattatccttaccacttctagcccggcgatttctccagcatcttttgtagcttgtctctgattgtcattaaaataagcaggaacagtaattacagctttatcgacggtatcgccaagaaatgcttcagcatccttcttgattttttgaagaataaatgcagatatttgttgtggagtatattctttccccaatactttaaacttataatcagtgcccattttccttttagcggcaataacagttccttcaggatttgaaagcatttgacgtctagcaggttccccgaccattaattgaccatcttgcgaaaatgcaactacggatggaaaggatttccctcctattgaggcgccttcagcagcttgtattataactggctttccaccgatcaaagaagcagcggcagaattactagttcctaaatcaattcctattatttttcccatttaaacttcatctccttttgtatcctctttattatcattatcgatatttttaattatctttttggaaacttctactaaactgggacgaagaacacgatcattcaataaatagcccttcctaatctccttagtaataatgttttcttccgtatcatcttcaacataagaaaatcctataatttcatgaaagttaggatcaaaaacactattcaatgcttttatttctataacattctctttttctaaaaagagatcaatattttttagtatattcgtcaatccttcgagaattgaaatatcgactttgtggtgttttagcgtatctaaagcacgtataaaatcttcgcgtaaattaaccacagttgataaaatatcggccttcactgaaagtatcctcaaggcgttttgtttttcaatattttttctataattatcgaaatctgctaaactatattttaatttgttaaatgtgtcgtcatacaattttcgatagtgttccaaatcgtctcttgtgtcctttaattcggcagccatatcttcaacggataattcagtttttaaattttgattagattcatcagcgttatcatctaataacagataatcattatcttgatcattttttacttgatctttgtttttagttttatccataataataattattttggttaaatctaataattacatatcgattatagcgaaacccggaagcaaagaaaatatgataagagaatattgcatacagtcgatatggtgattatcaatcaattaagccaatcaagcataattactttttatagaagatcttgcaccacaagcttcacatatcataaagcctagctttttaattttttctgtcctagtatctgggctaccgcaaacaggacaaataacatagtcctttacatatcgatctattaaacctccaaatgaggatataggttttctgcccaaaaaaataacccgttcaccagtaatataccctgcagatgctaactccttatttagatatagtaataatttttcaggatcacgtcttaatgccttcggaaaatccatgaaatttctaaaaattgttcgttgtccaacccatattactcttggaacaggaacttcaagtctggcaacttctttctttaccacatttcctagtttattttgtaatctatctaacaaggacatataaccagattcatcttggattgacatgttatagattacaatagaccaattaatgtacgttgtgaataataattaatttaataattaagaagtaataagaatcagaatcagaatactgatctaaatccggatgtattattttgaattatccaatcaataaatggattcaaagtatcataaggcaaatcagcaggtttttctacattatagcttaacataaccattcgatttaacaagaaactatgtaattttttatctaattgatctcttttaaaaggatcataaattttaaaaaaacatttttgtctgtagtatgaaatatggtgagcataacagtacataagcaaagtagggtctcggctaatccttttatttatttccctttcttcaaatggagggctattttgcatttcaacataaatttgaagaacccttctttgataattttctttaatcaatttaatattcgaaggagctatgttttttgatagaaaaatttcacgctttagttgatcaatagtttttcgtgtgatatcttttgcagataatacatctaaatcgtttttgactccaaaatcttttccgaagagaaaaaaaattcccaaaatttcatgttgatcgacgaatggaaagtccgaatcgccatcaagaaattttgataatctttcgtaaatgttactaggcaaaaagaatcccatataggaatcagaaactatagtcaaggcaattgaagaggcatgggtatataataaatattttttcgtatgatgtattggttgtttggttgtttaaagtccttaggctttagaatagaatccagcttttctttcataaatttgaccatcgttcatcgccttttttatgtgcgatttagcatctgaatcactaaatttaccggtttttactaattctccaatgaacacattctcttcaacgtcattcttttcttctccggaaagactggaaaatatctccatgaaaagttttagttttgatatttcactaaaaggttttccatgtaatacacccaggtcaactttaccagtattaacatcaacgcctgcggtttccaacattctttgaactagaaacaacgatctctcggcatcctcttttccgactttatcttttaacagcaatcttgcgcgagcagtagcaagtctcaccagaccttctaattgcctgggtgtaacggtaatcatactatctgaatcaacatttctcatcttcatataataatcacggataatatttatcgcctctcgagttagctcgggttcaacaatttgtttagcaaatgccaaatatttactgaataaatctatattaatagcggcttgagatgatttttggacatccttatgaatttctaaaatatggccggcgattttactatctttttctttttctggaaggtcgcgtataacataaacaagatcaaaccttgtaagtagaggaattgggagatttacattttcagtgatatttttataaggatcgtatttgccatacattggattcgcagcggacaggatagaggttctcgcatttaatgttgctacaataccacctttagcaactgaacaagtttgctgttccataacttcgtgaagcgctgaacgatcctcggcttttatcttatcgaattcatcaatacaaaccaacccttgatctccaagtactacagcccctgcttcaagcatcattattccagatttatctctcaccacagcagctgttagtcccgctgcagtggaacctcttccagatgtatataatcccctaggagctatttttgcagcaaatttaagcatttcagacttggctgttcccggatcgccaaccaatagaacgttgatatctccccttcttgttgacccgtcatctaactttttggtaattgaccctacgattaagagcaaaatagattcttttatgacttcgtgtccatagatatgtggagcaaatgatgatactagtttatcatagatatcaggtttttttgacaaaactagtatttgtcgttcgtcttctgcactaattgaaattcgctctattgatcgagttttcttatctccagctctacctccaagatattctatattattaccctccattcgcaatctaaacagagaagtcctttgagtggtggaattccccgaaacaaaagatgcttcttgatctattctaataattccggtcaacataatcctatcccctggtctgcactggtcaaccaaatcaccaagaattgttacctctatatagtgagggagttgtcctgcaggaagatcctcaggcaactcttgtaatctaactaactgaaaatcaataaagagactgctttctacatccatctccatttctttttctgagcaattaaggcatctttgtggtttttttaaagataatccctttaattgcgaaaaactaatttgattgcaattgagacatctataggcaattctttttcctagtggtttaacttctgaggaacgtactaccattccggaaacacccagtaacttgttaataacatcggcatttatgtcacgcagtcctttttgaacagcataatttcctattcttactcgaatatgctctctaatctcatttgtataatctggatgaatttccaatagaattgaaataacggcctcattaaaagctgaaagcatttcatctggattgtgagtgatatcctttgcaagtagtggactgaaactatcaaaatcaatatagtcaatagtaatagaagttgaagatgtcgccatcatattattaattttatcaaaatacttgtaattaccatcacgatccttaaatgaacgtaaaaaaacctccaattcatttgataatgcagatatggtttgttgttcttgttcctgcatatttgatggattctgaggatcagtattactcaatttttaacaccaattttttgaaattagacgtcatattgtgaaaattctcatagagaagtctttcttctaatgatagtttttcttcaagctccggcaccaagggagaggaggcagaaagtttgactatcttttgtaatctagatgctatgaatgggttcaaagatactattaatgattctctatctttatcttcggttgtacgaagataattatttacgcgtgcataaaaatctggttctattgtagatacctcatggctaggtgatattctttctctattcaatgcccttttaatatatgataattgatcatcgtcatgaatttctactagaccttgttctctcaaaataacagagatccatcttggaactgaagtcatatctccttctttagcgctaataaaaataagtggttttatcgatatttcaatatcctttaaatatattactcgtacatcctttagaagatattctagagtagaaaaagtatagaggattgaaatatcatctacacctaaaattaagttatttgcaatataatcaacatcattattggacggcagcaatgaattcacatatgtaattatcatccttagttaataaaatttcaatgtctggataatggtatcctctacagagtattgaataattttaaattagaaaaagattgacattatatcacgatggaaaaaaggcagcaagagcagaagcctgaggttatttctgatatcatgtgggtcgaaaaatatagaccaaaacatctaactcagataattaatcaaaaagaaattgtaaaaggcttagaaaatttaatgaagaaacctaacgaattaccacatttattgtttacaggatctgcagggataggtaaaactaccacagctttatgccttgcaaaacaaatgctaggagataattggaaaagagatactttagagcttaatgcatcagatgaaagaggaataaaaatggttcgtgaaagagtaaaagaatttgcatcgataatgaagatttctataaatcaggaaaaaaatgaaaagccgtttaagatcattattttagatgaagcagatgaaatgaccacagaggctcaaacagctttgagaagaattatagaagatagtgccagaactactaggtttatttttatttgtaactatctttcacatatcattgaaccaatacaaagtagatgcgtaatttttcgattttcaaaggtttctgaggaagaagtaattgaatatttgaaggatatttgtaaaagtgagggagtaaaagtcgaagagaaagcacttcgtaaaatatatgaacatacaaatggtgatttaagacattcaatcaacatattgcaagctgcctcagtaaatggaaatataagcatccagcaggttcaaaatgcaataggtatatctggaaaaagtataatagctgaaataataaaattagccattgattcaaaatttaatgagtctagaataaaattattagaattactatatgtttatggagtttcagaaacagattttctaaaatatgccaatgaagagatttataagcttgatttaaaagatccctatgaaatttcatctataattgcagaatacgattacagactcgcaaatggtgcgcaccctgaaatacaactagcagcctttttagcacaattaggcaaaataaatttgaaaaacgacaaatctaattaaaaatcatcctcgaactcatcgccaccatcctcttctgttacatcatcgaaatcttcttcgaattcttcacgctcttccgcggttttatatggaatatctgcttctcctaagtttccacaaactggacacttaaattcgattgtttgaccttcaaggtctagtagaaattctttggtgaagacctcatcacagttggaacaaacaagagtagtttgtatattttcttgagtgaatttatgcgactgtacccgaaagattgtgttcaccatacttattttacctataaagattcggtctttattataaccttatctttttataaatctaaggtttgtagcaaaataaccatctaaaaatattaactcatacccaataatttatgcatttgtggaatcactcttacatctttataaaaactacaaacttcatcatatattttcaatatttgcttagtagatggagagtcatattgatagctaggctgtagtgttataccactcaaattactaatatttggacgctcaaaaactctagaaagtaagtctctaacttcatctaatgttgtggaatttgtaaatacaatttttataaatgaaattttatcggtcctatttaatgaaatatctaaacatcttagttcattttgtaaaagattttcatagtatttagattcgactacttttgaatcagatgttttaaattcaactttacaaatatcaaaataaggcaaaaccaattcaaaccttttccagtcaaaacaggatgattctaaatatgttttaatctttaattcagttttaacaaaatctgccagagcaatcaatgattgagtttgtaataaaggttctcctcctgtaaaattgactttatataggttaggttgaagatgttgaaggataagatatttagcttcatttatggtataacttttgccgcttttaggagacagagaatattttgtatcacaccaatgacatttgagatgacagcctgaaaaacggataaataaagtctttgttcctgcaagaatgccctcgccttcaatgcttacaaatatttcatttaattgaaccttgttatttctatttgtaatagaaagaccgccattatagccattatggtcctcataattttcagtaccattattgattttcgggttaatgactgacataatttgttttatcctccaaaccagcattcaaaattgcttgttttcgattcatgcaagactcacaaatcccacaatgttttgaaagattagtttttttatcggtagatcctaaataacagctccaagattgaaaaattttgtcacccaatattttatagcctatcaaaagcaattcagatttacttaagttgtcaatagcaggggaccaaatatgaagcttttttcttatcccctttttaattccatcaatttcagacatataaagtactttttctagagaacgtgtaaaagacggacgacaatcaggatattgaatatctcccgaatgagcaccatatatcaccagaggaatatttaaagaagtcgcccatacagaagcaagagttaaaaaaacagtatttcttaaaggtacgaccatgctatagtcaaaagttgatggaattttggatctagatccggtcaaaatatttgttttcccaagcaaggtttttagaaacgatatattaattatttcgtgttttttactcttcaataattttgaaaagcgctttgcaatgagcaattcattggatgcacgttgtccgtaatcaaaagaaattaaatacaattctaatcccatttttttcaaatacgcagctgcgctgatagaatccaaaccaccactaaatatgcaaacagcctcagaaaaattattaatggaactagatttttctttcaataatgatctttaccctcattcactaatgtaaacttgacgatgatactgcggtggcattatcatcagtgttcttaaaataacccactagtcctcctattccgtatgaaactgaaatcatgactctagtaaaaaaaagtataatttcataatgatctgtgaaattataataaattgtaacaattaataaggatgaaaggagcaacgcaccagttattaattgttcgatactgaatattttagaatatttctttaaaaatataaaagttgaaatgttacccaaggacaaaccagtaagcaacaaaaatggataatactttgggaaaaagggaatcaaaagaaatggtagagcccaggttaagccatttatcaattttataagaaatggccaagaaatacttgttgagactctgtttcgaaatacttgacgcattgatactataggtttcaaaaaaagtaataaggaaacaacaaagcaacctatccatataatgtagtaatagaaataattgagattatgaacaaatactatatatgataaaatcgaagataatccaaaccatacagatataaaaaaaaatatgaatgagaatactctggtcattcagtttaaaaaacttcacagagtatataatttaataaggtaatcctaaaaatatgtaacctgtcagaaaaaacatgaaggcctgtaaattatgcaataaggtaaaattttattctattaattatttattttctgacactttgtgcaatgagtgttatataatcctgaaggaaaaatcagtcaaggaaagaaaaaatcagtccatttcctaagactagttactcctgaacatatccacacttattacaaaatttagaagaatatttgatcgtaccaccgcaattaatacagtattttttttcaatatctccagattgtttagtgtttgaagtattttcatgctgtgtggagtaaaaatctgcgatagcacccgtgggtttaaacgtctcatctacgtccggaaggtaactagaaggagaaaatgacatcccggtctttgattcggatttatcttctaagtataaaagtagacgaggagtaggtgtatctgttttggaatctttgatttgttcacccaaccaaagcgcaaatttttttagtgtcatttcaggtgtggaaaaggttagggaatgggtggacatgtaatcttcagtagccaatcgcccattaaagattttcattacatatactaaaaaattgtgtttattaattattgtgaattgccgcatttattacaaaattttgcttgttttggaattgacgcagcacaaacaatacagtttttttttaacccttctgagttaggcaagtcttgtttagtaattatgatatctactggtttgtaggtaggaacttcttgtggcaaaggaagatcgtattcttcactagtaggaggtggggctgagggataaatagaattagagggggaggaaggggaggaggaccccacattaccgccagcagatataaaaccatctactccaaaaccaccaccagcaccagcactaccgccatctatattaccactatttcctgatcctgatggataggaggaaggaatggtagaaggtgaagtaccagaccgttcacctttgccttttgcagaaccagttttatcgagtgctgttttaagttcaagaattacacgacaagctaaaaaatttaaggctgaagaggatacaaggaattcacccattcttgaaaaatattcattactttccatttttccttgtttaaataactgagttgaatcaaaaaaagattcataattatcttgagtatcattaactaattgttttagtttttcgattaagagacccagtgtatctactccaaaggacattacttgaaaatgaataagaacaaatttaaatttatgtaattactgcaagtatagatagcaatctatgataaaattatattcgacaatattatcatcttataaaaataattctaggtgaaatagttgtgaaatttttagaagacaattctgattttgggataaatccaatagataagaaataccagacattatcaggaaaaaatttttttgtattatggtctagtttaggcatcggactactggtaatttctgcaggttcatttatttcttcttcaaatttaggagaagcaattattgcaatagttgtaggatcgattgtaggttctgttttattagccctagcaggcaaaataggtagcgaccattcaattccttcaatagtaagcatgagaccagcctttggtctgcatgggtcgtattttcttacaatcttaaatatctttcaattaataggctggtcgacttttgaaataacaatattatcaaaagctgcaaatatttttagtaatggatatattgatttttatgtttggtcgatcgtttttggaatagtaatcattctcttctgcattttgggacccttgaaaatagttaaacaatggctcaccaagtttgcggtctgggttgtatacggttcaacaatcatcatgcttataaatataatattaggagccaataatgtagatacagccagcataataaattcaggttctagcggttttagtttttttaattctctggatttagtaattgcaatgccgttatcatggctacctctggttgcagattacaataggtttgctaaaaaaagcaaaaacgctttttttggaacatttattggattttcaattacaaactgtcttttttatgtaattgggctcttattaggcattagtgacatatttgcaatactacttgcaattcaaaccttcttttatggatttatccttctggtactaatcgtcgacgaagtagataacgtttttgcaaatattttttcatctgcaatgtcatttaagaacatatggaacaaaataaattacaaatatcttgttgtttttttcacaatagtaggagtaatactgtccaatctaattccaatttatcagtatgaaaactttttgttgataataggagcactatttgccccgctatttgcaattgttttgacggattattacattctaagaaaaggacgagtatctatcgaaaaattctatgaaaaaaacaacaagttcaaaatatcatcttttttttcatttttcgttggaagtattacctactttgttctctcccccatttcgccactccatgttgaagattttgcactaaacataggttcaacaattccaagcatagcagtgtcgattgtagtcttcttagtaatagaacttttaataaaaaaagttaaattgaaaaataaagaatattccacagataagaaaattgagtaaaaagatgatgtaaaatgtcgacaacaaaaaagagaatagtaatcctgggtgcaggctatgcgggaatttttctgagtactaacctttcatcaaaactagacaagcattcaaatgagataatactgattgataggaacaattatcatcagctgatgcaagaaatacacctagtagcatccggttttagaaccgccgagcaattgaaaattccaatttcatccctaattcaaggcaaaaatgtacgttttattcaagacgatataaagagaatagttcctgacaagaatcttatatctttgaattcaggagatatcagatatgatgaattggtagtttgtttggggtcttccacaaaatacttcaatataccgggtgctgataaatataccctacctattagatcaatatatgacgcctcaattattcatgatcatatttcaaaaataattagtgaagaaaatataaaacacaatatagtaatagtaggagccggggccacaggtgtaagtcttggcagcgccttggcagagacaataaatgcttcaccaaataaaagcaatattaaagtaaacataatcgaggccacttcaactatcctacctggatgggatatcagagtcaaaaataaaactgaagagattctaaaagacaaaggtataaggattttccataactcacttgtggaaagagttgaagaacgtactctatttcttaaggatggtcttgagattaattcttccttaataatatggacagcaggagtaaggggatatagtatagacatagagcctacaatcgacaagactaatgatggcaggataatagttaatgagtattgccaaactaatcagtataaaaacatctattcgattggtgatttggcagcaatgaaaaactctaaagggatattatatcctccattagcacaaatcgcggtaagacaagcacgttatttggcagacaatatcgcagaatattatatcgaaggaaataatccaaaagaaaaatttgactatgaaataaaagctcaaataatttctgtaggtagtgatgaatacgttggcttgctaaataattatgtagtgagtggagatcttgcaaagatgattgatgaatttaccaaacaaacttacatgaaatcgttgaagactggaggaaaaaacatatcggtcaatttatatgaaaatgactttttttcgcaagtaatggcaggcataacctttgctggatttacattctttaaaggtttagaaaaattggcataatacttaaagaaaagaagagaagagaaaaggtaatctaatttttcttttgcagtaatcacgcgtcatcttaaaaaccagctcaaaaaaaattgaggcattggacctttagggatgtttatgttcatgtcgatgttcatcggtatgtaaatgtggatgtgagtgagacacaccaccatgactatgagaatgatatattttcttaaagactgcatataaagccgttatcccaaagcccaaagtaacaaacatgacgatggtaggaccagatgaagaatccaaaaagaaactaacatacatgccagaaaaagatgcaaccgatcctatgacaattgaaagaaatacaacatttgaaaaattatttgataacatcctggcagaaatggctggacctactattactgatgcgagtaatgttactccaatggacgacatcgaaacaataattatggtagccagaacaaatgaaaaaagtagttcgatatatgaagtcttgatcccacttattttggcactttcgttatcaaaaaaggaaaaaaccaagcgcttatggagtaaaaaaaagaaggcacttgaaagtattgttaccgaaacaataatataaagatcttgttcggtaatagccaaaatatttccaaataaaagagattcgaaattccttgtatatctatttgtcatacttactagtaacactccaaatgcaaaaatagcagtggtaactagccctattgcagcatcaggtttaattttatttcttttacttatttcaaagattacaaaagaagccaagtagctccaaataattgctccaacatagtagttcaaacctgcaatatttcccactattgctcctccaaaagcagcatgtgaaagtccatgaccaacataacttagtcctcttaaaacaatatatactccggctaagccacaaatacccccaagtaaaactgaaactataattccctttataaaaaattcatattgaaatggtaacagaagatcaatcaaatgatcttcactattttattttgtaatctgaaagtccgtatgtttttagaaggttatcgtctttaagaacatcttgaggttgaccttcagcgatcacatatttattaaagcaaataacccaaggagaacgattagcaatatgagttatatcatgggtagataaaattatagtcattccattgttattgagtgtttttaatatatcaaatattttttctcttgaaacataatccagccccgttgttggctcatccaaaataagaatatcagggtttctaatcaatgccctacccaaaaatacacgttgttgctctcctccagaaagtgcacgtatgtgtcgtttttcatagccactcaatcccaatattttcaatgtatctttaatctggtttttcaattttttatctatccacggaagataacttttgtagttccatgatcccattgctatgacctcttgcacagaaactggaaaattccagtcaatagtttctatctgtggaacatatccaacagaaggataatagaaaatggaatcgcagtcattcttacaaatgtactcaacatccccattccaaggatcataaattccacacattagttttaataaagtagtttttccagatccactaggacctactatagaaacaaatcgaccttttggtatagacaaatcaactccctctacaacaaaatcatgataagtaaatccatacgatacaccagataattttagatagtcgaaggagcccattctaatgatataatttgagatgtttattaatatttaatataaaatttattgtgtgtatgtattctcaggattaatgttagtcaaactactagtattcccacctaacgggattatcattttctccatgttatcaagcatcattcccacatacgtatgattgggacttgttaaattaccaggaagtgaatcgtctcttaaggtatgtactatatctacaccagcttctctagctatttgatcagtaattctgtttgaaaagacctctgatgcaaagagagccggtaccttttcagcctttatttgatcaattaatttggctatatcaagaggtgatggttctgaaaaatctgatggttgcacagcgcccatcacggtcatgttataccttggtgcaaaatatgcccaagaatcatgataggttatcaattttctattttctggaggtacagtttgtacggctgcttttatgcctttatctagctgttttagtaaagcaatgtacttttcagtgttctccgtataatgagcagtattattgggatccatctcgattaatttattttttgttaaattagcaaacttcatagcatttaccggatttaaccacaaatgaggatttggatgaccctgttctttgggaaaactaaaatcaaagatccagcctgtcgaatcaatagtggtatctgcaagttttaacaattgaatgtctggtttgttcttaagggactcatttacaactttttccatattgtcctctagaaacaacccgttaatgataacaagatctgcattgcttaattttattatatcagatgggactggttcaaaggtatgggaatttacaccttctgggaccaaaccagtcagatttattttgtctcctgctatatttttgacaatattagttattggagatatagatgtaacgacgtttaatgttttgttagcagtagcataaaccgaatttagattattatcaatgtttgtggagactatcaccgagagtaaagacaaaagcgctgtaaaggtagctacaaatattattttggtgttattaaaaaaattttcgggcatcctaaattcttgtgaacgattttattaatttttttaaaggcgagttattggctttgagacaaaaaatacatttatagtagtatagaggcctacttaggcctttctgattccactaaaggaaacatttagaacatttcttcttactattctaactatagaataaattatgtcacggatatcataaacaaatgagcctaacaaccggattaataaaccattttcgtctggcaattttgtacatccgccaatagctttttttgtcccagacaaagtttctagtatttcattttgtatagggtttactttatccttaggggttagaatataaatattccccagtatttcataattatttaatattccaaaagatcgtatattttctatcttgggttctatttttgccacatcaattagtctcaatttatcctcttgatttactgacttgactttcatatagcaaatatcatattcaaaagattcattgctagcaaccctgccaggagataaaatttcagaataaatgcaggtagcttcatcatgaaccttaatatttgtaacctgatagaatctagaatctctaaatggtattatttgatcagggatatattctaagtaacaatctttatcaacgttcaaatttattatttgagatccaaaattcttattcatcctgtatattctagtggcactttgagtagtaacgtgtgatttagctgaattggtaagtgtaatgtcaattcgatatctatcaccttgtaaaatgcctccagatggagaaataatataaacataagccatctcgggaaaggtttcttcaaggtaaagagcacgctttatgcataagggaactttgtaatattggtgttttatagatgttttatgactatctggatcattttctagacccagctgtaaaacacctaatttaccggactgtccaacagccaattgttccaacgtattatcataatttagaatttcatcaggaatattttcaggagtacaataagaaagattatacaaactcattgaaaatcattaagattaattgatagtcacagatttaggaggcgcatcaaataatacatcctttacgatttgttctgccacggttttaacaccctgacctgttttgctgttaacaaaaacatatggcttatcatttcgaacaatcttggcatctcgctccatgatgcttaggtcggcacctatgaaggaagcaatatctatcttgttgattaccaataaatcagatgtttcaataccaagtccacgctttcttggatatttatcccctccagaaacatcaataatataaataaaatagtcggccaacgcaggactgaaggtggttgtaatgttatcgcccccactttcaataattattaagtcaagagttgggtgtttagattccatctcctctacaacagatatattaattgaaggatcttctctgactgcagtatgagggcaacctccggtagcaattcctattactagatccgcgggcattagtcctttttcggtggcaaggttttttctcattctatcggcgtcttctctagaaacaacatcgttagaaataattccaacattatatccatcattctttaaaataggaactaattgttcgattaacatggtttttcctgatccaacaggtcctcctatgcctatgcgtggaattcttaaaagtgccacaaaaaaataaaggaaaaaatcaagttataaacatttttgaatccatttgttcatgatgcatttgaattatatcaagttgaggaataaattgccacatactattaagaggtctattgatattttttttcaccgttgataaaatcactggtttcatctcatctataagcatctgcccttcaatatgctgcagaatacccaatctaagagtagctccaattacactaacaacaaatccatatagcaacatcaaaccagatcgctccttagttattttcatagaattacatcctaaggcgaatgatataggataaacaccctttgcattaccgcttttaatattttttgaatagaaatccaaatattcatcgttatgaataaatgcagaaacacatcttaggaactggattcctgatcttgttgaagctgaacgagtttcatctactagcctcataaaataatatgtagtatccaattctaacaacgatttaaagtctttctttagaatactatcatacacattacctataacacagcaatcagtgggtccaatttgctgtacaaggtaagctttgataaaatccaaaatctcgccgtatgttagctttctgtttttatcatagaataataattccaggccatttgaagtggtatacaaaccggtaggaaaaaaagaatcagataattgtaagaaacttaaatccgcaatggacagtgtggatttattagtcttttcagtgggcatgaatatcaaaaccttgatcaggctcgaaaatgaggtgctcggagcgaatttctatatagtctcttaaatctgacaacattcttaagaatagatttatttcatctggactttgaataggaaaaatgatatcacgattttcgatttttaatggcctatgtaagtttccaatagtatgtcctacttttattgccacattagtaagttcatcctcgttagattgcttatgttcatgatcatgtttatgattatgtgtatggtttttaatattcaagatagccacaagctcgggagataattttatgacaatcattttagtttcatcaagaaaaactacatcaccatctttaagatgggttctagagggcaaaataaatccgatatcagtttctttgtctgaaacctttctcattctaaccttctcggtttcagatctcgcaattactacattctcgacggtatttttttttatcgactcttcatatttttgatgtaattgtggatctttctttatatttcctataacagttgtaatggttaacatcagataccatatagaggttaatcttatccataaaaacaatttcaaaattctttaatcctaatttgagtcaatatatgtatcaaaattattttctgagcgtgaacaaaaataactagaaatttaggttttattatctatattgacgttgttatcatgaaattctagattattggtattgttatttagatctggatttgtattccttattttgttcacagccgttatcatattttgtaaattttgagtataatcatactttccgtagtgtttatagttgctaggatttaattctgcaaatactagtcctccgtcagatatttcaacctttgaaccaacctcaaatttttgagctaccacacattgtcttaccaagtgatagggataatcaagattgaggtgagatttgggatctattaaacctgaaatcgaagacaattttccaaatttgacaattacatgtctaatttgcaaagggtcgatgattaacatggaatcatcaatattagatttttcagtacaatgcctaatttgcaacagtaatcacctttttgaatcagcaagtgcttgaggattcaggtcgtctgcagctaaattcttatcaatcctcaaaacagatttggccatttcgcctgatgcttccaatgccattgtttttactaaaactggatctaaaacacctttagaaaccatatttacaatttcaccactgtcgatatccactccataaccatcgggggaagctttagcattcattactttttctaaaccgttaaatccggcatttgttaatatttgtctcataatactttctagtgcagatgttactacttctaggcctacttgctccaatccactgagtttaagttttttaattttttcaattatatgcaattcggcagcaccaccacctggaacaattccgtaatttaatgcagcttctgcggcattaattccatcaattgttgatctccatctctctaacgatgtttcctttgtagaaccagatatcaggatagtgatgatcttctttccactgccgttttccaaatatattataccattattctcatcctcgtagattttctcagaaacaccaaggatatcggtattctttaaatcatctagtgttcgaactggttttgcgcctgtgtaccttgacaaatattctatttcttcgtttgaaatgtgaaccgcaaataatccctttgatacaaacagatcttcaactatttgatccacttcaggtgaagctataaaaagagtatttgcgcccgtttcaactatggcatcaacaattttttttgatttttccaaacgatctttttccatagtaagaatatcttgatatttgctattttctttgatccatgactcttttactggttttaaatccaatctcacaattagaatttttgaattttcaactttgctgggaagttcgggatcgattctttttctttccaaaacaatgccattaaaaattttatcctcaacatctactcttcttattacctgtactgccttatcaaaatcatacaatccgttataaattgcatcttttcctacagtacgcaacgcattaactaccaacgtatgcaatactcgaccatccaattttgatgacaagctcgtttttacgatttgatcgagttcagcagcatcaagactgatctttatggcacttttttttagcaattcacaagaatgttttatgccactttcaatgccttcaacgactttagttggatgcactgcaagctctcgaattaatcttttaccttctttgatcatctcagctgccaaaatgacagccgttgttgttccatcacctactttttgctcttgcctttctgcaatttctactatcattctcgcgacaggatgaattgctctcagtgaaagtaatatggtaacaccatcattagatacatgtctattcattgactgatcgatcaaaagtttatccaggccttttggccctagggtggttctcaccgtttcagctacggccattacggcgtttgaattagactctaaagcattgaattcaatattttcagcaatgggcttccaaactccaaaattttgtggtgaagacataatttttaacattaaagaccaagagataaatgtatcagaaataatactgaatagaaattaaaggaagaagattttaataagaaaaaaagatagttgggaggggtagaggaaccttatgccataaagtatctctgtgctaatgttagttcctttgccggatcaacggtagcaatctgcccgtcaatctttacttcatatgtttcaggatcaacagtgatttcgggtgttttatcgttccacatcatgtctttctttcctatacttctacaattgcttacaggcaatacagttttttctaatcccaatttctgaggaacacctaattctattgctttttttgacataaaagtaaaagaagtcttctgtacagccctacccatggcaccaaacattggcctataatagacgggttctggtgttggcaaagaagcatttggatctcccattatagaccaagcaataaatcctcctttaaagaccatcttaggctttgcagcaaagaaagcagtattatacatgactatatcagcatactttcctgcttctagggagccaaggtgatcagaaacaccatgagtgattgcgcaattaattgtagtttttgcaatatagcgttttgctcttaaattgtcgttgtcgccttcctcatcttttagttttcctttcatttttttcattttgtcggccgtttgccatgcacgaattacaacctctccaattctacccatagcttgactgtctgatgaatacatactaagaatgccctcatcatgcattacatcctcggctgcgatagtttcagctctaattctagagtccgcaaaagccacatcttctggaacagcagggttaaggtgatgacaaaacatgagcatatcaaggtgttcatcaacagtattgacagtgaatggcctagtaggattggttgaagaaggtaaaacattttgttgggatgctatagcaattatatccggtgcgtgaccaccacctgctccttctgtatggtaactatgaacaactcttccatctatagcattaatagtatcttccaaataggcacattcatttattgaatcagtatggattgcaacctgaacatcggttaaatctgcagcacgaagtgatgcatccaaaacggttgctgtcgttccccagtcctcatgatcttttagtccacaagcaccggcttcgatttgctccatttgggtggcaagggaaggatgggaatcgttaccttttcctaaaaagccccagttcattggagtatcttctacagcctcaagcattctgcttatgttaaatgaccctggagtacaagtagttgcatttgtaccatctgcaggaccagtacctccgcctatcatgttacatataccattgctgattccatctatatactgctgaggagaaatcatgtgaatgtgtgtatcaaaatgtccgggagtacagattgtatgctcacctgcagttgcctcagtacatgcagatacaagtagatttctatccacgccatccattactaatggatttccggcttttccaatacctgcaattttaccatctttaatacctatatcacctttgacgatccctagaacaggatcaatcactacggcattcgtgataacaaagtccaaagcgcctcctgcattagtaacaccgggtgtttgagcttgaccatctcggagtgtcttgcctcctccaaatacacattcatctccatgatataagaaatccttttcaatctcaacgaagagatctgtatcgcctaaacgaatcttgtcgcctttggttgcgccaaataagtcagtatattgtttttttgttaattttaagaccaataatatcctctcctaattacccattcctttaaaaccaaagaacttggctttttcaattgcagatttttttatatttgttgaatgcatacttcccattgttaaaccattatatccaaaactaacttttgaaccccctaattcacacaattcaacttcctttgtgtcacctggttcaaatcttacggacgtgccagctggtatatttaatcgataaccatatgcttgctctcttggaaaatcaaggactttattgatttcaaagaagtgtgtatgagatcctatttgacatggcctgtcaccggtatgttttacagtaatctttatggttttcctgttttcgttgcaaagtacatcgtcttcagataaaacatattctcctggaatcattataaatcaatacctccgtctaaattcaatttagatataattttagttgtcatttataattcacctattgaactggatcatgaacggtaactaattttgtcccgtctggaaatgtaacttccacctgtactgtatgtatcatctcaggcactccttccataacatccgctcgttttaaaatatttcttgcagacgtcattaactctgcgactgattttccttctcgtgctccttctacaacaaaattagctatataagcaatcgattcaggataatttagttttactcccttctgttttcttccctcggcaatttgggctgccgtccatatcatcattttttcaatctctcttggggctaacatcatttttaattcacatataacaatcctagtgagttattttaaaattcaaaataataatcaatatatatgaactattaccattatcagctatttagtcgatgtcgactaaattggatgtcatttgtcagaaattttaactggtaaacacgtctttaaccaatataatgttttgttgtagggaccattttttccagttgggagcttgaattcatatttttcttttactgtatgaatgataagtacattttcctttacagcagtgccaagcatattagaaaccaaagttttggtatcagagtaaaatactattttttttatgtcctggtatttgatgcaaacttcttgaggcatgtctcctgttgctgttgctgcctctgctgaatcttgttctttagaaataaatgaatcctttatcttaatgtccgaatattctattttttcagacagaatataataaagatatggcccgattccagcaacaaaacccgggtctgtcagttttcgtaacttgttttttttaaccatgataattctagtcggagtaaatgtaagaagatagtcaatcttcatgggtttgcttttgatataacccgaaagccttaacacaataggttctatattttgaacacccattaaatcatagaacattttaattttttgactatctgacattttagaatcagatttaatttttctcagatttatctcaagctcggacaatacagtagtaggatacaagatgtaaaatattactttaattgaacgattttagatgatacattaggcaaggtaaaggctgaaaagttcaagagtacataaaaagaaaaatgaaaaatgaaaaaatagtaaagcctattggttggtgggttggttaagttaatcctggatagatatatccctcggaactagccttcgggcctagaccaacctatccctgcgggtatgtttgagaatccgaaaatagcaattagccaaacccaagcagtaaatacaaatggcccagtaagtgcaggtaatccccattgaccaaagaacctttggagtgcaggcattactatcaccgaacaagctactgttgcaagcacagccagcaagaatgactgcggtgtaagaggcacaaagcttgttaatgcaatcataactaataccctgattaaagccgtgcaaacctattcttgtttcttgagtaggtaacttcatcaatatagataaagcagcaccaattgctgatcctataaaggccataactccagcaagatataacggcgaatattcattccattgtgctgtatacccatttgtaaaccatggtctatcttgaacaccagctattagaggtgccaattcaaatgtcaaagtcaggcctacgacccagaaaacaccagtcttccaattctcaacaaaggtaacctgagacactcctttgaaggtagcaatgataaattctttggctgtccatttgaagttttcaggttttacttgtagaggattatcgctcccgggaattttatcttctttagcagactgaggaacttctggccaaacatcatgtccataccgcttacttgcatacatcatcgcccaagtggtgaagataaatgatgatgtaaatccgggtattgcaacagaattagcaataccgcctttatcatctggactaaatatatctcccataaaatgtgcaaacgccatccaagctactgcagttatgattgctccaaatattgagatcgtcaatgtcaccctgttggcttttacaaagggtccagaccagaatgccatcccagttaatatagaattgtatccgaacaagccaaaagtgactagcccgtaatcggcacccagtagtaacgcagttcctgcaccaattaatcctgcagctaccatcatgatacctgctttgcgcgaagctattaggacaccagcaagaataaaaataccagttactggtgaactaagtaaaggaacttctgagatgccattaaacagtatatagaagaaatctagaagggggtctcccgacgaatatgttggtattcccatacaaggattttgtacaggtatagtttaacaatttgtattaaatatcagtttattaataaataaaaaatatctattaatctcatagaattagtttagcaataatacgggtttgttagattcagaaagaattttacttgtcacacgtccacacagatcattagaatttcctaacccttttgttccaagaactatgatgtctacatttaagtcattggcagttttaataattttgttagcgggatcccctattttgacaactctttcacatcttttagaattcttaataaggatactagacaacactagccgtccttctttctcgactcttttcatcagctcggcatcgtactcggtattttgttcataatcatcgggccattcaattatatgtactacataaattatagagtcagcttggaagacatggctagcataatctaatgcccttattgaagacatggaaccatcaacagcaactagaattcgcttgaaatttgtattagtaggattttcagaggtattgtttttggatagagaaaatttattgtcgtaatttctaacttgaaactttgatcttatgataaatagtagatttgataaaacgattgaaatttctcgttttgattcaataatcggttttactataagaaaacaagctgcacatatcgtccagacaatacttagtaaaatccaaaacaagaaaaactcgtaggaaaatatatacccagaaaaaaataaaggtaatggccagatcacaaccaaaatgagggtaaaaaagattccatacttgtacccaaatacagttctattctttaataacgattcatcattatcttcttttatcaaagatctgattctttcctctgcaattacgatccgctgcttggtaatattgaaattaaagttgtcgggtttaattagactccctaggataacaagaacaaatccagatgtaaaggatgttaaattgcctaacaggagaggaatatcatgactggtagaagctactgagatatccccatatatagaaaaagctgaaaaaagccatacaaaaacacccagcaaaaggccacataatgctgaaatagaagcagagattttgttggtttttttccatatcaaggacaaagatatgggccctacggcggagccgataagaatacccattgataaataaatatactgcaagttcaatcctatatggaacaaagataaagatagtacgcctatgccgaatccaaatatcaaaacagaatgttttgaaatacgcattaattgcctaccagacgcagatggtttgaaataggttctataaacatcaaatgtaaatagagaagagaacgccacaagttctgctgatcctgcacatgttaccgcagtaaataacatagtcaatattagaataccgcctacttctcccaaaagagtggagatagtaataggtgcaactaatccatgactaacttccaaaggagagagatctaaatgcattgcaattcctgcaagtcctaaagaagtggcaagggcaaacggaatagcaaaccaggccagtccacctataaaaaatccttttattagagatttaggtcgtgctgcaatagccctttgccaaaaggcttgatttacaaaaactgttccaaagtttccgattatattgataataccaaaaataagggcgccaattgaagctaaagttaagaatgaaccgcccgagtttccttctacaggattaagagcacttgccgattgcaggccttcaaataatcctgttatcccccctatgtgtggattgaagaaataaatacccactactagaattagtatcactataaaaataaatgaagtatttagatagtctgcaaagaaagtagcctttaagcctccaaaataagtatacatcattatgctcaaaggtattataaaacaagctattgtaatgtcaattcccgttagggcattcaaggctacggccccgcctaacacaagcattgccataacgatagaattggctagtaaagcaaaaagcaagaataccttatggccaaactttcctaatctaagatacagaaattctgtaaaagtatgagaagagggagctcgctttttcaactcaagagcaatcactgcaaaaagaatgatttgtatacttgcccctgcagcgtaccaaaatgggccacttatgccatatttatatgcgacagtggatgattctaaaagagttgcagcccaaatccaagcagatattacagatgatgccaaaaggccacttttaatactccttcccgctgtagaaaaccactcaaatgtttttcttgttccgagccatttggtatccacaaaaatgagtaataatacaataacagtcattataagaccacccccaatgaagatcaaataacctatttcttcagagagaatgaatgacaattaattcttaaaattgaaatgatttatttaaattaatattaaatacgtgctttttatggtcttttacccatcaagtttagaattacctcgaaattaaagttctaaactataaataatctgatcaattattttttaatattaaatcaatgatagattccatagacgagttaattctttctgctttgagtaaggatgccaagcaagatttaaatgaaatttgggattttttaagaaattatggacataatttaagtttggatgagatagattcgcgtattaaaactcttgaggatgaaaaaataatttcaagatatacaatttctattgacactaaaaaggtaccacatagaataattagagtagttttagttacttttagaccatcacagcacttggcgagtcgaatagaaggattaaaaaagtacctccaagatgctccctttgtcttattttcaggaagaacaagaggtggatatgactggatcaccattcaagtattttcatctcccgaagttgccgacgaggaaagcgatatttatagaaacctgtttggagacataatccaaacttacgaagtgtacgatttttcgcctctaaaggaacctacatttaatgcgtttacctatacagaaaaagaatataaaaaattcttgaatgaatggatgcctccttttcttggaagatagaaaatggaaaattcaaataattatttcgaattattttagatatcttgcagttttagttatttttatgtttttaaatctaatagtatcatcaattaaagagtgaattttaagacgcaagtccattaaaaagcttatgatatctgtactttgacctggttcaaaatttagctgaacttcttctattatactatctagtctagcaagagtaatttttaatgcaagggaagttttcttggttactttaagcgtttttatattcttaaaattaatattttcgtttgcaattaattccaagtcatcacctgaaataccttctttggaaaatacagattttacctctctaatttgtcgaatagttaattcattttctataatatgatcggtaaaatgaataatattgcttggtgaaacagtggtcaattccaaagcctgacttacactcaatttatttagcattattttttctttgacatcttgtggaagttttaaaagctgaatcctgtgcgatacatattcctcacttttacctatttttttagccaattcagtaacaccgccccaccccaagtcctggacatattttctaaatgcctctgcttcttcgagcgcgctcattgattttctctgaatgttttcagttaattgaatttcaaacgcttgtttgtcattcatttcccttattttgcatggaatatgacgccaccgaagggacttgcatgcataaaagcgtcgatggccagcaactatttcaaagttattctgatatggacgtattaaaataggctgtagtaaaccgtgctccttgatacttgaaacgagtgattctacttcctgataatcattaaatttatctctaatggaaaactgtgatggtcgaatcattttaatttctatgtgttccactatactggtatcgaacgcatgcatataataaataaaataagctagtacttatatatttttattttcagatattttatccaagaatctataaaatttttatgaaaattataaaatttacaagattcaaaatcttttcataagttttgtatatcaaacaatattgttaaaatatatttcgtttgtctaagccttttaaatataaaatagatatttcaagtcgcatcaatctattagatttttaagataagatacttttataataatgataaattctagtagaaaaatatgacgttttctaaaattttagttggaatagatggatcagaatattctagaaatgctgtcaaatatgctttagatcttgctgtaaaatatgattcagaattacttctattagctattgttccttctaaagttcatcatggtgactcatccggagtatttggtatggtagctccatcttattttaatgaatataagaaggaagctgataaatggtttgaagaaataataaatcatataaacaaggaaactaccatagatagcactactagagtcaaatcagaggtaattaccaccccattttccactccagcttcaattctaaattatgcagaggaaagagacgtcaacttgatagtaataggcactagaggaaactcaggtcttaaaaaaatgttacttggtagcgtagctgcagatgttgttacttattcttattgccctgttttggtagttaaataagatctgttttactttaccccttgtaggaatcatataagcaatagcacaaacaagattaatagtatctgttgatatcaaaatcaatgttgatatcaaaatcaaaatactttattgggaacggtacatgaaaaggatttatgtatcaaatcagttcatcctggtgtaatttatccaataatggtctcaaattaatgccaatttctttttcccctaaagttatgttggaaccaatgcccaaaactattgatagcatatttctatcttccctagcagtgtaaattgaacttccaaatattttgaactcaagatgattgtcatgtacccattgtttccattttcttgttctttgggcattttcctctaaagagtttatcacataatctaaatcaattccttctgcattatcaagtaattgaagtttcaccatagggagcatgacatttccacctttcactgattgtttttctttattcatttgttctatgattttgtcttcaacttcatgatcgtcttgaaatttatccttatccttatgatcttctatatcaatgtcgtaatttggaaaaaaatagcctgttaaatttttatcccagtcatatattttataaacagtatcaatatattctaatttccatagttgattatctttatttccccttccaaacataataaaattaagtgttagttggtatttttaagttgataaattgtaaaatgacatttccataagatttttgatatgaaaatgaagataaatgacccatacttcttgtatggaaaaatcttacaaataggaaaatttagggtgatatttaaacagcagataacatgtgatgtgatttgacttctagctaattgtaactgtctgatccttaaaaattctatataataaaaaaattagtttagcgaatggataattccttaatctaacgcgtctcttatctttaccttagccttattcaatgtttcagaactgggctttccttcagcgttatctttggctgtttctgcctctgcttcagcgtcctgagatgagtttttaattttctttgcaacatcatcaataacattatctgtcattaactatggatagtcataattctttaaataactaataatatcttttattagacattagatcaacaatttagaagaaactatgtgattaatctgataacaatcaagaaaaatatgttaaatgaaatttacaggattctgaaatcataaggaaaagaaaaaggaaaaatggttatatccgatttagttacatctggagaaatagctgcaaattctattagtacagacagttggtgcagttgtatcgatggtacattaacaaaagaacgcttcattgatagtattaaaaaagcaggatttaccaaatgttgtttatacaaaaggtttgaaaggattcagtggtatcgttggactagatatttgttttttggcttttatatttggatcatcaatgaatcctgctagctcattagctccagcattgttatctggagtatggaccgatctatggttgtactggagaacaacatttgtgggtacctctgtgattgcgttagtatatagaaaaaaggattgaatgaataacaaatattgatctactattggtaacatccggtaactgatgccatttgatttgacctgttatttcgcatagacaatatttgatgtacatataacaatacaaataataaatattagagtttattaagacaattctgcaacatctttgtgatatgttgtttctaaattacctatcttaaaattttgattttcttgttctaatgaatgaatttgtatcactaaatggaattaagagtagattaattgaataaaactaactaattgaattggtaagccggataaagttcgacattctaatgatctagtcttttatagaattaaagcaatattatataatgagtaagaatccgcaagaaaaagcacctttatccgaattaatggtagaaaaaaggagtggaaattctgaaaaatttgatgaagaaaagcttgtgagagggattagtagagctggtacaccgttcctacttgccaaagatatttcaaaatcaatcactagtaagcttgcacaaaatcctccattagacaacttcatttattcaagtaaaatcagagaatatatcacagaagaattaaagcagagaaaccatgattcaatagccgagtcattctcagggtacagcaaaaataatgtaacccctattaatgaagaacacctaaaaaataataaatatgattcaaaagtatctccttcagtaaatactcattctaaacagtatgtaaaagacaaagatagtacgacgggttggtaactaagtatctttatgaggaacaaagttcgaaatgaaacacggaaattgagatcatatcattacactggccaacctttatttgataaatcatttaaatattaactataacgatgaccataatacaaaaaaacggaaatattataacttcaatagacattttcacagtagaggattcatcaaaacaacaaagactgcttgatatgcttaaagatgcaattaaacaaataattaataaacatcaaggattcatttctgcaactgttcacaagagtttggatggaacaaaagtaataaactacattcaatggcaaaataaagatgcaatagaaaaaatgtttaacgatcccaaagtgttgatacatattaatgacgttgatcaaattgctaaagctgatagaaatttatatgaaattgattttgtagacgaaattggctaatttgctgcatttcattacttttacattccatgataatctttaaacgttctcgtaattatcattaatttttaatactactgaattatttgtaaatgattggtatttctaaattaaaggactagataattctttttcttgttggctttaattatattgtcaaataattacctgtgctcttctccggtatgttttatctagttcctcttggctgttgaagagcatgaaatcaaatactaaaactttgtagtcttttgcttcttctttgaacttttccttgtcgtattatgtaccatatccctatcggggtcttttattttatttcccattgcctttgcaccggatctaattttatctactgttcatctatgctgctctttatttatcagctatgtttcagacaacttattaacgtctatgacattatgtattgagataaactaagaatttcatgcttgataaatactatattaataatgctattattgtatgaaatttgtaggttattgggcatcgcaggaacaatattctttacatgatttgataagttttgtaaaagaagcagaaacgggtggatttacggccaccatgacaagtgatcactttcatccttggtggaacgatggtggatttggtaatttcacttgggtttggttaactgccgcagcagaaaggactaaaaaaatgaagtttgtaacgggcgttacttctcctgtttatagatataatcctgcaataattgcacaggcatttgcgtcattggatgtattgtaccctggtcgaatagctcttggtattggaacaggcgaagccatgaatgaggtttctgtaggttttaattggccctctgcagaaattaggctagccagaacgatagaagcaatacagataataaataacttatggaataagaaaaaagaagagcctcaaaccaataatgattccacagttgatttaaaaagtgaaaaaattgatgatgagggctttttaacatatgaaggtcaatattataagacaaaatcagctaaattatatacatctgcttccactaatatacctctatacatggccgcttccggaacagaggcaactcacacagctgccaagtatactgatggcttgataacaattacaaaaccggataagtcaaaagagctatttgatgaatttagtaatgctgcactaaaagttggtaaagatccacaaaaacttgaaaaaataggaaaaccaaaaatatcgttttcggaggattatgatgaagcttttaaatctgcaggcttttggcgagccggagagattaaggacgtatttaatacatccataaatgatccaagacaattgcaacaaaaagcaatggaagaggtttcagatgatatgcttaaagaatctacattgatagtgacatctgtagaagaattgatcaagccactagaagaatattttaaagcgggatttacacaaatctatttgcatagtactagcccgaatgaaatagaatttgtacaacagttttgtaaaaaggtattacctcatttcgcagagggttaaataatctaggagacattcgcaatcactaaattattaaataaattaaagattgagagtgttatttaacttgattcaaatgaataatgaattatgactaatgaaaattctgtaatgtaatgttaagaaatgattgaacaaagcttaagcgttagttaatgtcactaaactattcgaggtcgaggttaagaatcaatgaaccaaggattagactaaagtcctctcataagaacaggcaatgagatttgtttatatgtcaggtagtcatgagtttgaactatttagaagaacccagataatctctacactaccattactctaatgaatgatcaatggggccagagggactcgaaccctcgaccgccagcgccccgggcttatacccaacattggatggtatcctgccaagctagacgatagcccccttgtttattaaaaataaacctcttatttttaaacctaagtatagaattaattgcagggaaattctaaggatacattttaataattagttaaatgctttatagcatatcatttatgctggttaatgaactagatgccatagacaaagaaatacttaatgatattcaatggtcttttcctttggtcaaaagaccgttcttagaaatggcaaataaataccaattaaaggaagaagaagttctcaataggactcaaagattaaaagatattggaattattagacagataagtgcaatttttgatactcgtaagttaggatacaagagtgcattagtagctttttcagtggataaaaataagatagattatgtcgctaatgaaataaacaaacatccaggtgtaagtcacaattacgaaagaaatcatgaatacaatatttggtttacattggctgtatctccggatgcagatatgaaagccgatttagataaaatggcctccctagatggagttttaaaatatagagtattaccaacgctaaaaatgtataaaataggcgtgaaattggacatggtaaatgatgatcctgaaaaacccagtcccaccgacgatgtaaaaaaaatggagacaaaagtagaaaaaatttcagaagtggacaaagaatacattagacaattgcaaaaagatatcgagataattagagaaccattcaaaacaatcacggataatttgggaataaatctggaagagctcttcaacaaggttaaggaatatcaaaacataggcatcatgagaagatttgcagcaattctcaggcacaggcaagcaggttttaccgcaaatggaatgatagtgtggaatgtgccggaggaaaaaatagatcaaataggatcaaaaattgcatcttttccgcaagtaagtcattgttatagacgtcctatatacccagactgggaattcaatctttttagtatgattcatgcaagaacaattgatgccgctgaaaaaatagcaaaggaaatatctgcaataattaaaattgatagatacagaatattgtttagctctagggaatttaaaaaagaaagagtaaaatattttgagtaaattacaaggttttgttaattaaaaatttttaattatgccaataatttaggcatatcaaagtttttttcatacatttgctcaatttggagtttctcatcttcattcaaataattgccatcagaaatttgagcaaacaaatctatttcttcaatgcttgtaacagttggtaaaagaactgagatttgtttctgtgatagaatatacttcatagaaatttcagtaatatcccatccatgagaattagcaatgggtttgagtttttctattttttgcatcgcttgtataatccattccttttttctattatttctatggtcattcttatcaaatactgtatgttcatttactttaccagttaaaacccccgatgcatcgggtactctaaccattattcctaccgaattatttcttttattcacagcattaaaaaatatcctgccaggatcctgctctaatatattatacacagtttgtaaacaagatatattcctgttttctatagcatgaattccttccttttcccatcctattgcgggtcccaaagcaacgccatgactcttaatttttccagaacttaccaattcatctagtttatgaaacaatccatcgttttctatggcatccatcttgggattatgcaaactataaacatcaataaaatcagtttctaatcttttcatgctttctgacaatgcataatctaagaattccggagtgtgcttttgaggaatctctccatgtcctacttgatttgcattatacatatcatacccccatttagtggaataaattacctcattgcgcatatctttaaaggcctttgctaacaacttttcactcttgccctttccatacatatcagcagtttcataaaagttaattcctaaatcataagcatgttttagcatctttatagattcatcttcttcaagtttttttccccaccagtctaaacctaaagtccatgttccaaatccaatttcactaactttaattccggtatttcctaagttacgatatttcattaaattatactcctcactttttcagatagtttattgaaattattgtcatctatacaaggcttactaattgactttagatattcaaatggcttttcgggcatatgattttcaaaatatgggatcaattcttgatcattggagtcaatttgaatccaagacttacagcctacccatccgggtttattggtgatttgtaatggattatttaatttgtatacccgtaataacaataaataaagtggttttttcggattataatcaaatcgagttttaagataatcatcagtccatatatggaaattctctaatttttttaatgtagttaaatctgaaacttcactaaaatgagtaatctcaacaaatgatgtaatttcacttttattatttgaatcaggaagagttttggtattgtccaatccattatttctgtttaactcatccagggcagcatgatattccacgcggattgattctttagcttgatgttcaaaggttgggaataagaaaaaattcttgaactttagttcaaacccgtttcgaaattccataatgccgccctttctgaacaataaaatttgattaccagattctaaagctctacaaactatggcccattcttttaatgccccaagaaaatttgtgtgagattttgattcgtcattaaaattttcatgactattattgacttgggttgccggcacagtatctgaagaaatcgtggaatatggtcctttagaatcaagaccaaatcttttcaatgggccggttctagaattgaaacctgtaatatcattaaaaccattatctaaaaaagaattagaaatcatataaacaccagtatttacaattgtatcgttattataaataaatattattaaccactgatttttgaacaataggatgcttttaacccaggctcttaattatctcctctatattttttaggacacatgggatcatcggcgtatctttaataatatatttgctaacttgagtttcacgtaggtcaatgattagactctggaattttgaaagattgtcagtttcaaaagccaacataaaatcctgatcatcaatgccgaatgaataggtagtattaagtcggatatcaggatattttcttccaactcttatatgttcttccatcatctcttttcttttctcaaaaggcaaaagataccattcccgagatttaataaatggatacactaccgcatattgcaatggctcctcttcagtttcaaacccaagtttaacctgatttgaataaaatgattttctggttaaagatagataagtggatgtaggttctatatattttcccagtatagtagtataaatttttgaagccaatacctgaatattttctagtgatgacgacatagtccaaatcataaattcactatcgtgtcttaaaccaatagtagaataagttctaatttccatcctcttgcgtgcagcatttaataactcaagaaactcgcgtgaagcttcgtctttgcccatctcattcagccaacgccacttgggatcgactttataaaatgtaaaggtaaagaatttttcactgtcatttttgttatcggattcattggtcttggcacccgataattcaggagctttggtagttgtaccgctcacaacatcatcttttattggaatatttaaattatcaattttatttttttttatactagataaattatcaacttctgaagggcttttattcttgtttctcattatttgtatgctgttctaaattaataaatagtttaataattcactccgcgctgatgaccctgtcacctcaacgatagatctttatcttacggtcgttcaaatatgatcgaacaagcataatcatattcaaagagcatgcgtggatttacataacacatccagggtgccagcatattacgatcatgaacctctgccttttaatggtttattgatatattagtagagagttatatcgtcatttactatatgtttaaataaaagacactagaagacaccaaagcgtaatgaattatcctaatatatatgtatatagcaagaccaacttatataacgttagttattagtcatctagccacgtaaattaatatgaaaatgaacaaataaacattgattgtcattaatgttagtagggttttgcataatagagactagcatagatattctgaaaaagatatattaaagacaggatttacatctttttatctatatgttactacaaattataaaaaatactgcaattttgactagtttcaagtcaaactagagccaataacaccaaattcagacctggtgagtgaattcacctctaatcagattattaaattgatatgtctttccatattcatatcacaaaaaatagtcgtgttgaatttagctctacgaacgagcgcttttattctaaatgaagtaattgttggatgttccagacgacagattatactggtttttgccttttgcttgcaaaaggacttgagacgtcttggttgcaatcagtaaaaccgggagagaataataaacttattttaaaataaatggaaaatataattaagattatgagtgtgtagaacttatctagagggtcgatatttttgtatatctgtctcattcataaaataatatcataactatggtacaccactgataacacggtctgtcagtatccagatatattaaatattggaaatgactaagataatctcatattgcctccttattaatctagttaatttaaggagtgtgatgagaaagatctgtttagttaacttggctctagatgtcttttaaacagtacctactgcttcatcagatagtccaagccaagcatatccttttgactctaattcctccgataactcccttcctgctgtttttattattttaccttttgacatcacatgtaccttatctagtttattcaaaaaacgcaaaatcctcgcatagtgcgtaataacgattactcctgcacccgtttcaattaatttatttatggcctcagcaacagactttacagcgtcaatatccaatccagaatcaggttcgtcaagaattgcaagattgggtctcaaaacaagcatttgcattacttcagacctctttttttctcctccagaaaaaccttcattaagatatctacttaaaaagcttggatctaaacctacattatcaagatttctctttagatattcgtggaattcctttacggttatgaaaacttctcgatccttttgttcggctgtcaaagatttacttaacaaattataggcattgcgtaagaaatgactatatcctaccccagacacttcagtaggatattgaaatcctaaaaataatcccttccttgctctttcatctgtttttaaatcaataatgctctcattattaactaaaatatcacccgaagttatagaataacgcggatgacccaacaaaacgttggctaacgtacttttacccgagccatttaatcccatgatggcgtgaacttcgcctttattgacatccaagttaacaccgttaagtatttttttatcttcaatatttacatttagatctttgatggttaagaacgacataaaattttatgtatcaatacataatataaatattcgtcaaaataacggtgttataattataaaatttatatattctatttaaatttgattaattaatttattaaaatataatattttataataatttttaaaaaagaatacaaagaaaataaatttttgttaaaaaatttaggttatagttatttttcctttcatgaatggatgaacagtacagtagtaatcatgttcacctggacccattttttctgccggtacgctggctttagcagcgggcattatgatactggtatcgaaaagtttggcggtttctgggtcttcaggtccggttccgctagtagcggtgtgtggaacagtatcttcgttaacccatgtcactaatgcatcactcgtggcactagcaggatcaggcccataggcaggatttccttgggtggcagaaccctgtaatattttcacttcaactttattggcaaatgcagattcatctacaacttccgatgactcctctgctgcatcggtagcagtagctacaggagccggtggaagttcttgtctgtaaatagaatcaactatacccggttttggaatagctgcagtaaacagataataagcaattattcctactataaccgccatcaccataagcgtagaaaaagctcttttgtcagtcttatcagccatattgacaacaaattgtataaaacgcccttattaatttcttttatgattttatttaatcaattaaatgtaatttcaaatttatctgttattaatggaaaagaatttgctcaatttacgaatccaaatgatataacttttatttctgatttctgacatttttattgcaacgaaagaatgctaaaggggagggaaagaatcaactgcagtatatgtaataatagaattggtgattttaaatatgaggcaatgccacaatggaatatttcaggattcttatgtagtaaatgctattcaaagaagatatccgaacactatataaaacaaaacccagacgaaaaaaaattaaagtaaaatgcactaaactggccttgggttaggctagatctgggctaaaaccaaaacttagagtaattcatgaaattattaattaatcgattttacgaatctcgacagctctattgttttctattatagatctggcattctcaaaaggtataattgccacatcatctttccgatatggaccatatttattcatattaacccctacaaattgctccatcgaatcgaaaaatcttagaattacaaaattctgatttattgaagatacaatcttttctaaagttttcgattttccttcaagcagcatatttagtattatattaattctttgttctctttctctatttccgaaaaacacatatttttcttcatttgtaaggttagaatattcaaatatactttgtgattttgaattattgaaaatttttttgcatcttagtatgaatattaaagtcgttaatttagcaaccaggtttactaaattggaattaatttgctgggaaattttctcagtcccctcattttctttttgtaattctggatactctttttcattttgttcttttaataaagaaataagatttgcaatattttggtaaaaattgtgagggacaggctgaggtccactattaagatgaatttctccttttagaatattaaaaatttcttcaatttttattaaatttgttgactttctatgatccatcagctcttacacaatttgtatacatgataagcttaattagaggtttttattttactatatcgaacatttcatttgccttataaagttatagatggaaaaattgaatctttgaattttactgcagaacaaataatgaagaaattaaaggatgaagaaattaaatttctagatttacagtttacaggtttaactggtagattccatcatactacaatggcatccaatatgttcaaaaaggaagattttgaatacggattgccaaaattagatggttcttcaattagaggttttactgagatccatgaatctgatttgataataagaccagatccttctacatatgcaattataccatggataaaagaagacaagacagccagactaatctgtgatatattatcaggaggagaaaatagaaagcaattcaaaaaagaatcctcgaggaattgcaagaaaggcagaagagtatgttagacataaaggatattataattcattttggggacctgaagtagaattctttgtttttgataaactagaagtaaatacaatgaccccttatagatctcaaagttataatattatatcaaaagaagcaccatggtcaacagaaggtgtagggtatgcactcagattaaaagaaggatatctccccagtgctccaggcgacacattaatgcaatatcgtaatgaatgcgttgatgttttgagtaataattttggtattatttgcgacgcacatcatcatgaagttgcaacagcggggcaatgcgaaatcgatataagatttgatacattagttaatgctgcagattctgttcaaagttataaatacattgttaaaaatatagccaagaaacagggcatgattgcaactatgatgcctaaacctatcgcactcgataacggttcagggatgcatgttaatgtgagtttgtgggataaagaaaaaaatctattctttgatatcaatgattcatatgcagaaatgtcacaactagccagatatttcgcagcaggagtattaaaccatgctcctgcattggctgcaatagttgcacctacaactaattcttatcgaagactagtacctggatacgaagcaccagtgtatattgcgtggagtactggtaatagatctgcgataattagaaatccggctcattataaaggtgagaggtttgcacacatgaaaaggatagaattcagagctcctgatccgtcatgcaatccatatttagcattttcagcagtaatatcggctggcttagacggcataaagaaaaaaacatctatacccgatccaatagacgaagatattttcaaaatgtcaccgcagcgcagacgtgaattaggaattagacaattaccaccatcacttagagaagcgtacgaggaattaaatattgacagagaatttttgaaaccgatatttgacgatgaaattatagattcaataatcttacaggaagctaaggatcatcaagaggttactataagacctcatccacatgaattctcactctatgcagacgtatgaaatatgattgaaatgacagataaaatcaaaagcagagataaaacaaaggttaatagcactggattaatacagttctaaataatttttttggaggggttgtctagactggttaggatacctgccttacacgcaggtggtcatgggttcaaatcccattccctccattgcattcattgcattcatgggtttatagagaatgtttttatctataaaactcaaagtatttgttagtcctttcaagaatgtcgatagaataaaaatataacccaaaaagaattagcaagttttaaatatatttagattcattaaaagatagaataattttgtttaatttccttccttgaattttttagcttagtatttttcttgttaggtagttgtgttgttattacttgttactccttttagcaagtataatattttcaatccaattgcctaatacaactaactaaagaattcaaagaaattcaataaaatatgttcggtaagatgaaaacaaatgaaaaagaaatcaaaaattagagtattaaaagataatcaaaatgatgatagctatactttcgtaatggatttagacttgtcttcgaaccataatttacaaggacctctaaacagtaaagaatcagaagaaaatacaggagctacagatgtagataatttgaataaaatatacaaaaagaaaaaggtattaacaaatgaggaccttagaaaggcttctaaaggtctaaaattcagcaatccgtcgcaaaggaatcactcttctatatatgaataaccgattagtagttccttcttttaatattaatatagcacttctacgtataatacctattaaacaaattatgaacatgaaattgaaagattttatgtgctttttacatgataataaactcattgatctacatagccttcttaaaaaagatgaaatgggatgcattaaccgtttgaagttgcaaaaatatgtatacttagctcaaacgtgtctaaataatgattttggctgtgaatacagcgtatataataatggcccatattcaccagaactagcaaattattattatgaaaaaatagatcctaataagatgtctacggaagtaaatactaggaattggaatcatgataatggttttaccaaaaaatttttgtctttatttaaagacaaggaacccgagtggttggtaatagcttctactctagtagatagtaagaactattttgaagatgagcaagaaattttgaataaagtttatgcaatgaaatcagattatggtagaggctatatagatgatgtttggattgaattaaaaaataaaagattagtggaatatgaatcaggtctaaagataaataatattttgtcagtattctagatttgacttttgtttgaattgcacctataccataaagtttgagaatttgtcaaatttttttaagaagactggttgataatgactttgatttctcagaatcattgttatacttcttgattctcgatataagaaaagataaaagtacaatacgaaatctattaacagtcgtgaaaggaatagagtttattttgttagcggtaggagccattttaggagcttatattcgatacaaattcttcctttcctttaattctaggaatagttgggtcaaatgtcttgtttgtaaatataataggtaatcttatcctgggtattttttctgttttatggttaactggaacctagatcaaaggtattcttttttaatcgctattggattctgtgggtccttaactacaatttcttcttttgctctagaaaatatagtaatgatagaaaacaaccaaatactaagtatgatgattaatacaatagccaatgtgggcttatcctttttggcgttatatggtggcagaatcttaataattcaattattacaataataattttagaataatgatcctaaaacaaatgatctgcttaaacatccgtataaagaaaaatgacaatgtaaatagaaaaagactggagaaaactattattgaatttttgatgaaggcaaacgttttaggagctatagtttggctaggtgttgacggatttggtaggagaggcaagtcaacagttcatttggagggtttaatgataaatcaacctatgatgatagaaacaatagatgaggaagaaaagatacaaccattgttattaccgttaaaacaaatgataggtgataacggctttattactattcatagagtacaggttgtctaagagttattctttgtggtaaaaattggaggcaaatgctaaactataaaactaataaaaacacttcaatttgataaacctacaaagaacaatagagtagcccaatcaacttcatgcaagattttttctaaagaaaccctgcttataattaataatactgcagctcctccaattggaatcatggatacttctacatgagtaattgtctgtaaggagtctgaacagaaatggtatcaagaggtgaagtaggattaattgttgctggagttgatgtaacatcaggagtgctttctacagacatttatacctctataatccgacgttacagtattgatgattcatatagataaaaaatatagtagaaaaaatactgttcaaccattctacaattaagtggtgttactttgtgatctcatcccttatggacaacggaatactggtaaggtccccataatgggtagcattgatggggcgaagtccctgatgatctaatagctgcaaaccatttttggaaagtatgaagtttacaaaagatattgcaccgtctaaattcttagcagtatttggtatggtgactgaaaagaaaacgggttctccataaattattttttgagtagatcccaaagtataattggcctgcttataaaaatcagaatatacacgatcattaagacttatctcttccgggagaatgatgtatggaagtgctcttgaaatagcttcgtgtttgtatgcaactacagcatccaactgacctaattctaatgtggattttaatgtttcttcaggaaagatctgtttcggatttctatcttctccaaatatcttatctttaattgaggaattattataataggtatttgctaatttagcggttatgattccataatatccttttggatccaattcaggatcggttcgtcctaatttgaaaccatcctgagaaacagtattataccatggtatttcaccttttcttgctttttctaaagtatcaaaataaggactagttgtagaataagatattacaatttcagcggatccgaattccacaagccattctgcgataggaggagtgtttttcatcaacattaaaactggaatagttccagcacttacgaatacatctggtgtcctaaatccgtccttaatcaaatttgcaacttgaactgaccttttaccttctcctatgtatgtgtattcagattcgtactgaaattcaggtccaattacattctcgaatatatttgcaagggatccggcgtacattacaaagactccatcagatccatcgtctgaaattccacttacaatggaaacatcgcttatagctattaaagaaaatatccaaaatgcaataaataatattagaaaaagggtatttgtattgttcttcttaggcaataacacatagcaaagtatcgtattctattttaatataaaaataaggctaatagcttcttcggaagtaaatttattatcaagttatatcatagttcaaggggtgagataatagtatagcaatgatagaattactaattcaacaaccatgcaacatcaatcaactagctgatgtgatcaaaattgaaataatgcagtactgtggcatatcatatattagaaaagaacaatttactttgcttttatcttgctgcagctgatgtattttttccatcatattatgtacttatcttatattaactttagtagcaattttttacttagttagttattagcattgaactcgaaaaaggtaatattattttgttgttacccatagctaaagccacagtccaaaagatcaagaacctgaattaatgtatttgataccttaatatcaatagaaattaaaattttaatacctgacgaagtcctataatttggacaagaagttcttatgaaagaagagaaatgcgatgtagtaggcttatgggaaatattaggaaaaagatggtcactacacattctaaagaatttgagtaccaatagaacagtaaggttcaatgaacttaaaaggttgataccagaaattagtagtactgtgttatctcaaaggctactggagctagaaagggaagggctaatatcaaaaaaaatttattcagaaattcccgttagggtggagtatagtttaacactttgaaccaaagaattggaggccattttacaacaattaagagtttggataagtaaatggaaagtgtatgagaaaagaaaagaaatcaagagtatgacgacaaccatagcaaaatctccccctacatcataatgattagaaaaagtcgatcaacacggaactagcaatgctgtgattgttcactttaattttttttgaaattctttattagggtaatttaaaatcttttcattattactttataaaatagatctttgtaccatattttttactcattataacagtcatatcgttgttaagattcattcataaacttaattagtttacaaaatcgatgatatttaccgacaaaatcatgtataatcgtaaagtattgactttttgtacttttatgttaataattctttcttcaaccttttcatcgtatatccagttttcttatggggcttatgctaaagcaccactgtctccatatgggccaaccgtcaatgacgataaccttatagtcgaaaagatagcggaaggtcttgattttcctacgagtatgtcttttcttggaaataacgatattttagttacagaaaagaataccggtatagtcaagagggtactaaatagccaagtacaagacacacctgtactcgacgtgtctgtagccaatagcatagagcgcgggcttttaggaatcgcaatatctaagcaaccggacgggaaaacgtttgtgttcttatcttatacagaatccggtgatgattcagacggtagtgattttgaaaataatgtggacccgttaggcaacagactatatcgctatgaatatgtcaatggtgagttgataaatcctgttcttttatttgatctgactgctattcccccaaatgaaagaggagagcataacggtggtaaaattctgattgggcccgataataatgtatactttatagttggagaagtaggaggtcataggacccaagctcaaaatattggtgatggtcccgagcccaatggtctcggaggtattcttaggatctctcaggatggtggaatagtggacccagataatcctatttttggaaatggcttgccgttgagtgtatactatgctatgggtattcgaaacagtttcggttttgactttgatcctctaacgggtaacttatgggatacagaaaatggacccactgtagcagatgaaatcaatcttatattgccaggctttaatggtgggtggtcccaggttcaaggctatttgtaccaggatttattaggacgaggaataacatctgaagacgagcttgtaactattggcaacagtaaatatactgatccaaaatttgtatgggttaccacaattggaccaacagcattaaaatttttgaattcagagaaattaggtaaagaatatgcaaatgatatgtttacaggggacattaacaatggtttattataccgatttactctgaatgaagcacgcgacaatatactcataaatgatacttctctaggtaatgtggcggcactttctgacaatcaggtcgatgagaccaccgaaaatcaacctttaatatttggtcaaggtttcggcggaattaccgatattcaggtaggaccagacggatacctgtatgtattgagttatacaggcgtattgtatagaatagtacctatatctgaaagtacagtaccaaataatcaacaggctttagccgatcaaagcgaaacacaaagtgccggtgctatacctgtagttattgctggattaaaaggcgatcagtcatattcaccgaatccaattaggattgaatctggccaaactataacatggtataatggtgattccatatctcatactgtaacctcaggacaggataatgacgaggatgagggtgctttatttgattctaatgcaatcatacctaatcaatcatacagtctgacatttgataactctggggaattcaaatattactgcatatatcacccttcaatggttggcgatgtaatagtagaataagataaccatctttttctaaaaacagtattaatacattgggcttatttaaccccctacgaggatcatatacaataactctaattcatctgatatcaaatttgagtgtggaaatcgcaaagaaatccatgtttgtaataattatttgtttagaatatcaaaattaatcgattttaaatttatcgtatatatataatatttaagtaagtagaaatgtgaaaatctctttatcgttgatttcaaagtcacttgtgctcattttcactatttatatatttctgtccttagtcatagagtacgaagtacgagaagtttctagcacaatcatcaacgaatcttcatttacttcgataaatccatctattttgattaatacgacaaaggtatctaactgcataccgcaagatatcaccgataacaatggtagcaataattcaaccgcattgtctaaggccgaatccaacaaaacaaatgaagcgagtactaataaggagaacccaggtatctgtaaaattctacgggtatcagattcgatctcctgcaccgaatataatggtaatcaatccgaaatatcctgtgaatcaaacgattctgatgaaaataatcttaaagtagataactttggcgataatggtcatctgttagccgacacaaaatttgatcaacaatattcatttgaattaaatgatccattgggcctagacaaaaaattcagagtaaccatggattttgataaacatacacaaagcaataataatgatataaattcccctcgaatagaaatagtaagagaaaattcagaaggaataccagatatgtctgctgcaaagaatcaggaaataatttggcacggaaacatacacgagtatttcaaggaacccaaagacaaatttgaaaatgaaacatatgtagcccttcaatttaatacgggacgtcacggaagcaatgaacccgatgaagagcgtggctttggagtattgtttgatgtttctagtagtagtaacccaaatctattagaatatcgtgatgatggtaactacgtaaaatacgattttaatactactaaggaactagcacagaacacttttatttttcatcaactagataaaaaaggtaatcctatatttaacaacaatctgacaaacaaagaaaatatagaacttaaagtaagaacatttttgacagataaagatactagaacgatcgaaacatttattgataatggctcgggtacggcaattccatattggaccttaaataatctctcaaagttaaaggaacaagatggtattgataaccaaagcggattcatggagactataaatcaaggatctggatatgttattgcacgtactgataacatagataccaggccttcgtcctttaaatcattttcttttgacctatagtaatctgatacatcttaatttgatctttatttttgaattggatataaaaataagtcacaagtagtcaaaccataggttttttgctacagaatgtgttaatcagttattaaccggaatggtataatacagtctaatagttctaaatttaatattcacatttaaataaaaaatagggatatatcttgattattcaaaatcaaatatctcattaggagggtcattagttgttaggttttaacaatattgatggccatagtataaccgatggcaatcaataatcttatttactatagagataaatttaataaatgagcgaatctacgaaatttaattattcgataatgagagaaaattcaattaataatttcattaaggatctgctagaggacaggattgaatttgattattcaaagagtattaaagaagacaaaaatgaagtttttaatgcggctatggatttaaaggcaaaaataattccatatctaactgttgaaaaggactacactaataaagaataccataagcttcaagaaaatatattttcttgttatctaagcctaaaaatttatggagtaatacgtccaaaatcaaattaggcttatctttatgtgatttataaaagagaatcacaaacatgatcaacttacagagacaatttgtttgatagtgatcatccttacaccttgctgatcaaaattaaatagtaatgcgcattttttactctgattaatatcctttaaaagacgcacagtccaattagccagtaaagtaaaatcaaaaccaactaaatgaattttattgtttattagtataaccaataaataaattgaaattaacttgatgaatttataaaatattaaaacaacaactaggtagaagatatattggaaagggtacaaagcgatcacgttgaaccgcacataaaagaaagtaattacattagagatgttgtttttggttttggtgatggagttaatacttctctaggtatagtagccggcataggtggtgccactgtgggggtagacatagtcatcttagcagcaataataggaatgtttacaggtgctaaagccatggctgtacaaaattatcttgcggttaaatcccaaatagagattttacaatctgaaatcaaaagagaagaatatgagattgaaaatactcctgagaaagaaagagaagagatagtagaaatctacaaggccaaagggtttgccggtgaagaattgaatatggttgtaaataagattacatcaaataagggagtgtggttgaagacaatgttaacagaggagctaggtctaaatctagaaatcctaggcagtcccataaaaggtgccattgttatgttcatatcatttttagtaggaggcatcttacctatactaccatactttatagtcaaaacgggtttaatcaacaattttacggcattactaatagccatttctattagtttaacgtcctcttttgtgatcggtgcaattaaaggtagattagctaaaaaaagctggataaagggaggattagaaatgtccctattaggaacaggtattgcgttacttggttatggaatcggatctgaaatgaataacctaggagtggttaactttgaataactaatatatctgtcgtattatagatatgcagataggaaacaatttaagaatattttttttttaatttcttagctagttttggacctatttttgggatcgtagatagttttgattctgaaattaataggagatcgttaggtatggtgattccagccccatgaagagatctcgccctggccctgcctatatctttaatctgtactaatggaacaagctctgcctttactccatgcttaattcgactctcgagggaaaaaagaacgggtaaaagatcttttctgtttaacaatttacatatttcgaatattgaagagattaaccaattagatacttcgacaattctatgtatatcgcctggctccacaccaattctctcattcatccttttttctgtagactcattgatccattcatatagagtccatagacttcttgaacaatccattatgtctacgtctgaaaaaaattcatcataattgttataaaacagataactgaactcttcgatgtcttgttttctaaatgaaagttttggataaaaatctgggcaagtagaaatcatataaaggaaaccaaatacattgttgatttttacagactgtggttttatatcattgatggtcttcctaaacgtaacagcagtttcaggattaagatatagatttgaaactaattttccaaatccagtcacattatacatattgttttgtaagcgaattagatcttcttctaaaaaataatctaaagatgaatctattttatcaaatagggaagtattgttactatcttgaaatgaataaaatgtctttgagaataagtcatagatatcatctagactaattccgttaaatgaagcaattacccccagtaaatgaattttaatcgctattatattcccaaggtttgaatttagaggttcaggaatccccaatatataatgatcatacaattcttcataagatgttcttgaatctgaaataattatagattctccaaaagtatcatactgaggtcgtccagctctaccacaaagttgtttatattcaagcacactaataggaactgaagcaccatatacgaagtcatatcgggtaacatttgttattattactctacgtgcagggagattgacaccagcagctagtgtaggtgttgcaaacagggattttatgattccacttttaaatgcttcttcaacaatccctctacttgaaagacttaatcctgcatgatgaaaccctataccagcagatatcaaatttgacaaatttttagttaaatccgtgtcatcaccctcctccaaaatttgtttagaaacctttaaggtatttttcttttcttcgggtgatagggtcttggatacaacctctgaaaccttcttagctaaggatactgcccgttttcttgtttcgacaaaaataagattttgtccattactatttagagaatccatgattaaatcgatagccatagaagcagtatccttacctgactcagaaactttaattctggaatcgttattaaaatatatcattccatcagaatataccccctctatcagttttgttggtctccaagtgctttctattaatcttgatcctaaccatcccgcaatttcggaggcattagtgattgtagcgcttaggccaagaatctgagataatgaatagtacttttttattttggttaggaccatttctaaaaccggtcccctatcttgatctccgattaaatgaatttcgtctgaaataaacagtccaacatttgataaccacgaagcgttatgtctaagaatcgagtcaattttttcgtttgtcataataattatgtcggccgaacttaaatcagcgtttgaagtattaaaatcgctagtgctaatctttattcttatttttctggaaaatataccggatttatcaacagaagtaaattccaaatatttttcaaaagctaaagctcttaatggtgtaagatacactacctttttatttttttctaaggatttaatggcagccagtatggcaattaatgttttcccgcttgcggtaggagtagtaattaatatattagaatcttctaacaagcctttttctatagccaattgttgtggtggatatagagaggtataacctaaaaatgaaagataagaagaaatcctatcatcacttaacttcaattgcatgtataaattactattattaagaaatcgtattacatattaaattattttcattgatatactagttattgttattgaggataggaaagaattttattgataaattttttgcttacttcgtgggtgcattggaatctcgttcgcctttaattaattaacttaattaaactgaagaatacttatgatccatgatatttgatataatttcagtctattgattattataatgctaccaataagttaataataattaataagtaaactttatattattaataatcatactattttcatgcgggagaattataaggcttggatctctttttgccttattgttttaactatagcattattttcttcagttatatcaaagtctattgctaccactaatttatcacaaaatagtaataatagaactaatgaatcagatggtcaaagacaaatttcatcaaataatacaaatctaaaaattttctcatccttttatccgatttatgattttgtcaagaaaataggcaaagacagagcggatgtttcaaccatagtaccggccggtatagaacctcatgattttgaacctacagcaaagcaaataattgaactacaaaaagctgatgtaatttttattaatggagccggatttgaatcctggattaataaaatgggaaatgcaactgtagttgacttgagcaaagatctgccggctgaaagtttaggatctacgccagatcctcatatctggcttgatccaattttggttaaaatatattcaaaaaccatatttgagaaattaatatctttagatcctcaaaatacaaattactatacaaataattttaatgaatttaataataaactagagctattaaatttagatattagtaagaacttgactaattgtgatctgaatgattttatcgcatttcatgatgcttttggctattttgtaaaaagatacgggttaactcagcattcaattagtggttcgtcacctgaagcagacattaatcctcaaagaattgcagaagcaataaagttagctgaacaactaggtgtaagcattattttttcagaagataatattgagcctagactttcaaacacgatagcaaatgaagtaggagggaaagtactaatattgagtcctatagagatgattacacaggaggaacaagctttaaataaagactatttctcaaaaatgtacgagaatttggataatttgaaaatagcgctcagatgtgaaaattaattatttgaattatatagaatatgaaaaaagaattgaatagtaatgattgaaattctccagtatgagttcatgcaacgtgcccttattgctggaatagcaatttctataagttgttcgctgattggattgtttcttatattaaaaagattttctttgtttggtgatgcaatgtcgcatgtagcttttggagggatcgcattaggattgtttctgaaatctaatcctatttgggtatcactaattgtttcaataattggagcattagcaatcataaaattgaattcaagcaaaagaatctattcagattcgtctatctctgttctattatctctagggctagcgatgggattggtattaatcagcttatcaggaggattttctatagatataacaagttacctttttggaagcatattattagttaatatcgaagaaacattaagtaccatacttttaagcgtcatagttattgcatttgttatcctattttataaaaaattagtatatcttgtatttaatgaggaacaagcattagtaaatggcatcaatacagttgtattaaatattttattcattactttggcaactattgcaattgtaatgtccattagattgataggagtacttatggtttcatctctcttaataattcctaatgtttcttcgttgctactaggatatggattcaagaaaactatattattatcaatttgtttttctttgacatctgtaattttaggtataatactagcatatgaatggaatatcacacctagtggaatgatagtaataacagccgcgggaatattctttggagtaaatgtattaaagttattttcttcaaaaataaaaagcaagtctaatacgaaaataacatcttgataattaatagtttttatcatctattgcccgatattattatgtacttgtttaaccagtatgtttttaaagaaatgaattttcgtataagatttgtatttgtctttctttttgcttcatcacttttgttttttacttgtttatttatttttgacattatcacggtctttgctcaacaggaaaataccacaataaatgcaaatgatcaatttggtattgaaaaaatatatcctaccaaatccgaaggcagagaatggtatgttaatatgtctaatcccaaaaatgatccaaatgtaacttttacttttaatcctagaatagccaaacaggatgatggatcttggaaaataagggatgacaaaattcgaattaatgtagacacattaaatgggacagaggaatggaaaaatgttgaaattactggatatgtgaaaatagactcaataatcaatccgcgtaaaagtgttataacagatatagactgggtagcaagaactgatcaacataatgaagattttccttgtcacggcctatcccttcacgggggaatttatccggatggttcagcagcctggaaaaaagaaatatggtttaccggaggatacactaaagaaaaatctgtacctaaaataacagactcgttgatgaacagatggataggttggaaaactgtgatctataatacaaataacgattctgcggtaaaaatggaatcatatttagataactccaattctaatcattgggtcaaagtttttgaaattacggataatggaggctggtatgcaagtagttcggataaagtattctacagtgcaaattgtggtagatccaaggatcatatggttttgaattcaggacctattgttacttttcgcgcagataatgtagttttgaacttcaaagatttgagcataagagaaatagaaccaccaaagtaggatgatactgatttatctattggaaattattcataaatggaaaaaacaaatattatgaaatgatcataataaaaaacattgccaatcataagcatttcactaaatgaacacataattcaagaactagacaaactgcaaaagtttttgggtttttcaggcagatcagaaattgtaagagctagtgtcagaaacttacttctagaagagaaaagaatagatgaattgtcaggagttctacattcagttcttttagtaatacatgatgaaaaatctgatcaagaaattagtgaaattcgacatggatttgataaaataattaatacccacattcacaataagatagacaaagacaggtgtcttgaaatttttgtgctttatggtgatgcaagagaaattaaaaatattactaagagatttcaagggaacagaaaaatggatcaagttaggttagtggtaacataataattcaatatattaatttgaaagccataagtgggatttgaacccacggcctaaggtttacgaaaccttcgctctgccaggctgagctactatggcggcagcattagaaccagtatacaaataatttccaagtattagaagtatgaaaaagttaaataataatgtatttttttctatgatgtgacaaaatgcaacatacatgaatttttttttgactggaattgtaatgtttgcaaagaagaatataaggatttgaagggaactaataagattgatgaagagtcacacgagaaagtagaacccatcaagactaagaaaataaagaagatgaatgattacaaagaatttaacgaagaaaaagctaagaaactctacgaagaaatttttttgcagtatttaaaaaaggataaaataaccgaagcagaagctattgagcgctcaaagagaataataagaaaacaatgtttaatgcgcaacatggagccttggtcgtgggtttaatccagacgcataattaaataagttaaacctaaataacaaaaaaaagttatttaactttattgtcatcatcgaacaatcaatctaatatcttacaaggaagtgtaaataaagacatccttctaaaattgaaaggaaagagaactataaagggaaagctgaaaagttttgatcaatacatgaacctaacactagaaaatgctaccgaagttttagaaggagatagagttcaacaaatgggagaaatcttcatcaaaggcgaaaacattgttattatagcaacagactgattataggaataattagtgattcttgataataaattataaccaagttttttcaaaaaaataagatagattatttaaaactatctcgatctttggcacattcaatgatttccgagtcagatagatagttatctatgctaaatgctctatcaaaacatgcagagatttcctttgaatgtttgttatcagtcttaccatcattgtcgtcatcattattctttatgttgtcgcttaaagcataattatgaaggctattttgagaataactatctcgatctttggcacattcaatgatttccgagtcagatagatagttatctatgctaaatgctctatcaaaacatgcagagatttcctttgaatgtttatttttgccatctagagactcccctaattcgctattagttggattagtatagatatttttgttgattgatgtatggaacgactggaacgaataagggttggatattggtcgattcatattttgctgttgtaactccgagaaggttgaagggttgtcttgaggtggagatttgatgaaggttgaagggttgtcttgaggtggagatttgatgaaggttgaagggttgtcttgaggtggagactggaaagtgtccatataatttccattagccgtatttgatgaatcagaagtaaaagtgggagtgctaacgtcaccgtcaacagtatttttgctctgaaattcatgataaaacggattattcttacttaaattgtatggattgctattagagtgggaagatacagaagtactactatcaggagctttgtctgaagaagaagaagatacagaagtactactatcaggagctttgtctgaagaagaagaagatacagaagtactactatcaggagctttgtctgaagaagaagaagatacagaagtactactatcaggagctttgtctgaagaagaagaagatacagaagtactactatcaggagctttgtctgaagaagaagaagatacagaagtactactatcaggagctttgtctggatatgtagaatttattttattcaagttgtcagtacaatcagaatttataccaataagcgcaccagtcatcatgcttgtaatacaatcagtagtttgggcaatcaatgaattatcaggaaccaaactgatttgaccgtacgaagaagtaaattttgaaccagatatagttgaaaatgatattaataaaaacaccatcaaaatgggactgattttatttgctatgtgcacgaaaaaataaaacaatcatactttataatgagcactttagattgctagtattaacttaacaatatatctattacacaaaaataagatagatttattttacaaattaaaagattgattttagtatgcataaaatgtgtcttagcctgtccagtgcttgttttatgtgttagatgtcaggtatgggtaatacctcgatagaatcaatcaattttatattatcattaaaaacaaaattgtagttttttggttaaatcgacccatattatatatatagataatctataataaaatagttgtttttgcctaattttgaagtgttagtaataggcaccattattgcatctattatcgcttttctaataaatctaattttaatgccaagttttattaaatttctaaaactcaaaggaatggttgtaaacgataatcataaacccaataaaccaaaggtttctagacctgcgggaccgatattattattaagcattgtcataggagaactaattttattttttattacctgggatcttgagataataagcattttacttacaacgactattgccttcataataggaattgttgacgattttagaataatgccaggatggtttaaaccaggggcattgattttagcctcaatacctctcattatttttcatatatatgacaatgaattaaacgtgatttttggaagtgtgtttatcccaatactatatatcccattaatattaatttcaataccactagcaggaaatactgtaaactcaattgacgtgttcaacggagtagccacaggattcatgattataacgatgtttccaataataattagtacttttttgtttggagatctggaaattcttatgatcgaaataccatttttagctgctttattaggattttatatatttcacaaatatccgagtaaaatattcccaggagattcaggtacgctattgatgggagcaatgtatggagcattagcaattgcatctaaatcagaaataattgcgattatagcattattaccagcaataatgaattcatttttgtttttgagtagtgtaagaaagattgttgaacaccgagaattgaaatctaggccaactatactaaatgaagattatacattacaagcttcaaaggataagaatgcaccaatcactctagttagattaattttattagatggaaaactttctgaaagagaaatagtaatgaaaatctataaattggctaccttttcatcgtcacttgcactaataacaatattattgcaatttattatatccagtggatagagaaggaggagaagaaatgaattttctagatctcaaaatctttatcttatttatgtggatactagtcatgatagcatgtatttttattatttttgttatagctccaatcagcaaatttcaaatagatcaaaatgattctctatcttttctaaagacttcatttattcaagcaacattggcagttattatagttggaattttaatagttgtactgaataaatttaagaaagtatatttgttaaaaaaactttcggctaggaaaaaaagttagtctaattctgcattataaacttggattaagttagagaatccttttttctctacaaaattccaaatctttccacaaattgaacatgttataatattgtctttagacgaatactccaagctataatgactacaacgaatttgatattcatatttaagtgactctaattctttaatcgtgtctatatgtctgacagaattttctgtcaatattattatttagatttaacataatataatctattaattatagaaataaatatagttacaaaaaatatatgtgatttattgacttattcatatagatataaaaactgctaatgaataataatataataaccataattattgagaatctatatatatatatcaataatagattaacaataatattgaataaattgaattccgacattagaaaaattcaatttacgggtagatctacctatattttgtcgttacccaaaaaatggattgaagaaatgaatctaaaagcaggtgatcatgtttctatctcaaggagttcaaataattcattatgtattaccccagaacaagagaagagactacaagattctacaaatgaagttagtactcaggtgttgattgatgaaggccctaacaccctaaagagaaagattgtttctatgtatttgtcaggatataacctgataaatctaaaagcgaaatctgcaaggattcaaccaatacaaagggaggcggttagagaagtagtaagaagaagtttgataggaacagaaattattgctgattcctctgatataattacgattcaagtattactaacattaccggaattatcagttaacacggctgtacggaggatgtttttgattgcttcatcaatgcacagggatgctttggttgcagtaaaagaaaaaaatcatgatatagcgatgggagtaatacgatcggatgatgaagtagatagatttagtctttacatactaagaaatttagtcatggctactaacaatgaaagagtattgcaggaaatagggttaaaaaatgcttctgattgtcttagctatagagttaccgtaaaaagtatcgaaagagtagccgaccatgcatccagaattgcttcaaaatccatggaaattcaaagtttaatcccttctttgataaccgaaaaattagagaaattaagtaattctgctttagaggttttgacatctgcagttgaggcattcttaagaagagactataatttggccgataaaattgcagataaatcagataacgttctttgtatagaaagagagatcatgttgttcttagattcattagaaaataaggatattgatagtcacaatatcaatgcaggagtaaaattaatacttgaagatatacgcagaactgtcgaacatgcaagtgatatcgcagagtcagccatgaatcaaactgtaggagagataattaaagtagagaaaaagatagagaattgaaattagatattgttttgtagtaatatttgatttatcttaaaacaaagactacagtgtatattacaattatcatggatgcaaatggattttaacgaattacatacaaaacaccaaacttgtttattcatgtagttaagaaaataataattattataaatattatgaataaataataatattaattagataatggatttgaatcaaaatgctattaaaatattaaaaatattaaatggcagattcgcctctagcctttgttcttatgcttattgcctcctgcacttctaatatgaaaattttaccacctattttatcatcaagtgtatccaataagttattgactagtttatccaccacatcatctcttacaactatttcaactttggttctaggaataaattcaggcgtgtattgcatagtacctctcccaattgaaacaggttgcgctttacccttaccttttccctctatacgatagtagctcatacctccgatgtcattatcctttaaaatggcaccaacagtttgtagttctctgtctggaattattatttcaatctttttcactattattgatcaaccatcctattttttatataacatatttaaaacatcaatgtgttcactgcattgcagtgaaatagtatcataaaataattaaaaaaaataatatttataaaatctattaactatattatgtacatattgctatataaattttaaaagtatattctaaagtagtaaagcgaagtagatcgaatgttctgatcgaaagacatgatcgaatggacagcttttaataaatacttgatcaacaatgttctatttgataataatgaaatatagaagtagaacagaaataactgtcttaatactagaagcagcaaacggtggggctacaaagacgaaaatcatgtacaaatcattcctttcatacgcacagttaaaagaatactttacaatgttaattgagaatggctcattggaatatgaaggtggattgttaaatatctatagaacaacagaaaaaggcttacgactattaaagatatataatcagatagaagaaataataccgcaagttcatgtaaattattgatattcatttattatcatgcagtcaaaaactagaactactaggtttggataaataatattctcactaaatcattgttataattataatatctatttaaccaccagtaccggaattttactatgatgtaacactctatgagaaacactgcctagtatagcgtgtttaaattttcctctacctcgacttcctatagtgatgtaatcaaaattgtttttctcgatataatcaattattatagatccaacattttgtccttccaaaaagatagtttctggttctaaattatagtttctggttctattaacagcattttcaaggacggttttggcttctttttctagctccgccattatagagttcactagtttttgtgattgaatatagacgaaaggagggatttcaagtacatatagaattgttaattttgagtctagcctagaactcaagaatgaagcatgatctaaggatctcattgaattgtcagaaccatccacaggagcaagtattctggaattcattagattatatgagtaaatccaatgatataaatctaatatttaaagcatgttctcatatagagtaaaatatttgagaaaaaattttatatcgtaggtagaaaaatttaaggaagtattattaaaaagtgtctttattggaagtgtttattgtgcttgggattaattcttctatctgattatatatctttaatagtcgtaagcctttttctgttgttctatacttttgagttccatcttcatattctagcaaagcattctcaattaacattgtaaagtattcttttaactgtgcgtatgaaaggaatgatttgtacatgattttcgtctttgtagccccaccgtttgctgcttctagtattaagacagttatttctgttctacttctatatttcattattatcaaatagaacattgttgatcaagtatttattaaaagctgtccattcgatcatgtctttcgatcagaacattcgatcacctgactaacatattaatctatttcataataaatatacatttactagttttaagtcctctgaatatataaaagtaaaacctcgatgaatcaatagggaacaatatatattaaacagggtggttatttagttagaattttattttatcaaattttaggctatttgtatccaaataagcaattaaatatgttgaaattaataagatacattttaataaatttgtcttttccaaaacaaaaatatagatttagaattctagaatccagattacgataattatttaaattacattcagataataatctcatgtcttatgggtctagtacctccgtctgagccttcaacgaagaaactggtcttaatttttggtattattgctataggtgcatttatcattctaagtatttttgtatttcctattaaaaatttaatcagagatgaaattaccgccgaggttaaaatagtaagtaaaaatgatggaatttgtgttgttgatatggctgatcatcctagaggaattaatgaatgtccctacaaggctggagatacggtgcttgtaaaatacaaagagggaacttcagatataatcggtcatgaattaaaaccctaaaaaaattattttattgtgcttgggattaattcttctatctgattatatatctttaatagtcgtaagcctttttctgttgttctatacttttgagttccatcttcatattctagcaaagcattctcaattaacattgtaaagtattcttttaactgtgcgtatgaaaggaatgatttgtacatgattttcgtctttgtagccccaccgtttgctgcttctagtattaagacagttatttctgttctacttctatatttcattattatcaaatagaacattgttgatcaagtatttattaaaagctgtccattcgatcatgtctttcgatcagaacattcgatcacataaaattagtaaaaatacatcacaacaacatggataaaaaattatcatcctttagtgctttggatacagtatcagaagaaacagccatttttattatttgagaacggccatacctaccatggctaacgacatttgatgtgattaatcctagttgatctaattcacttattatttgagtaactcttctttgggtcagagaatcatgttcaatctgtttgcataatgaaacatagatatcataaacatctcctgtcataccagtttgagacttcatgatggaaagaacaatcaattttgtatgtgttgtggaatttttaatgacttcataattagtgtctttttcaatcttttcttgtgcatctcgtatatgattttcagtaaccatatctgcccgttctctttctgctatttcagcggctactcttaatagatcaattgctttcctcgcatcgccattttctttcccggccactgctgcacataaattaatcgcagcctgaccaatagatccctcattaaatgcaagtttagaacggtcattcaaaatctcttttaattgaactattgtatatggattaaatattatttcttcctcactcaaactgcttcttactcttggatccagtttgtctttaaaggtaagactattggatattcctattaaggaaacaaacccgtctcccaacatgcgttcatttgctctagtaaagttatataaaacatcatccccgttcctatcgaccaaggaatcaatctcatctataattagtactacatgaaggttattctttttcaaatattcaagaatcctatcagtggcttcacccatagataaaccagtaaaatgcactcttaatttcttgtcaaagcgattaagcccaatatcttctgcaatatcatataataccttgtatgaagtatttgaagtctttgcgttaataatagtaacggtaatctctattccatgctctattgattttttttctaatcgagtaattacatttttaacaacggccgtttttcctgttcccggttttccaaaaactaagagattagaaggtctgccattttttaatacaactgatagtacttgtgcgatagttttagattcttcgtctctaaatggtaatttttcaggaacgtaatcgattgttaatgtttttctatttttaattaaattggctccaataaccgccttatcaaatatattatctaaataatctgaatccatcatcatttctttccgttaatggtattgataaatcaactcagacacacccctatttttctattcgaatgataaaaagataatgtcatgttaatatgctaactgttattaacatttaattttaaacaggttaatcaattactttatacatattaatcaaataaattaatattaatctattatcaaaattaatactcattgcataagaaatagaggggcctggggctatctcatcaaattaacaatcacattaacagttaaaaatcgtttgataataaacgtgatttgacccctttatttccactggaggggtgttaaatctattcacaatgataataaacgtgatttgacccctttatttccactggaactataaaaatctataaaagaaataacaatattaacataagaatctaaacatcaaaaattatgtgcttattttagttaacaaaaattaatcttttagttatcaatttttattccatattgttaagttaacatatgctatcaaattcacagagacgataaattgtccactggaaaaaaacgaataaaaattgaattggaggatgctgaaggtggaaaatataatttatctctagaaggcaatttatcaaaagacaaaattcaaaaagttcttcaactagtagaaaacctaaacatctcaaaggatgatttagataacaatctcaaacttcctatggaacaaaataatagtttacaaaaatatgatttaggatctaatctatctagtaactcaattggatcaaagatatggtcattaattgaaaacaactttgcatatactcttttacatcgtcaaatgttgccgaatcctatgaagaatcatacggtgagcagttacaacttagtcttatatcgacttatttatcaagatattttgaaaagcaaaaattggtaaggagtaaaagagggaaagagtggatatataagttaataagagttcaaaaagacgttatttcatcagttggaagaccgactacttctcaatcacctcgtttattggattcacattatcctgaagatcaggctgaaaatgactttttgaagcagaatgctttgacaacagtttacgaccttcgactgtgatagtatacctaaagggctttgtactgacatctctatatactaatttctcttcaaataattttttcattaatctagaagtatgttccctagtcctaccaataactctctgaacttctcttgtagttagagaattatcttctaattttctgagaatatattctattgtactattctgacgttcttcttcctgctcgaccaatttgaaagaatcttgtgatattgtgtcatgacccgttagtgatgatcttagattcgggttgcttacgtagttttgcaatggtgatattacagaatcttgtgacttagtcttgtagttagagattatattttcttctaataattttattaacccttgtatatcagttaatttttcattagtctttttagtcctatcatatacaacccgaagttgctcagaaacgaaatcactcttattaatttgatcttttatttgactttcaaggtgagagatttttgtttcaatattatatctcttaaaattattgttttttaacttgttgtaaattttcaaagcaagaaatgataataccaaagctgagccaaatggaattaaggcgtaatttagaatcagtgatgcaatatctatgctcacatattatttagcaatacagtgtgatataactttattgtatgtgattattttacaataaatattatataaatagtgatattttagatattgattattttgctgattacatcttctatcacatttatcacgcgatttatttctttatcgtgatatttaatgtgattatcctcaagaattctaagcttatttaacagagagtttaaggcgatcaattgatcattattgattgcatttattagattaagtagtaaaatagaataaattagtttacgtagttttatctttgattgcctgacttctctataatatgcgcctgagctaatttcctttagtcttttctctttattcttaaaattataaattatttgtatttgtctaggagtaaataaagatttttcaactaatttggataaaaatatattatttatatcttctttgttttccattagctatacaatattgtatagctgattcccctttttaaacagctaattaacacaatcattaaatttaattctactaatatacgtgtagtattatattgagtcgggtagagaactatattaatgaggaattgaaaaagcataaaaaaatatgttttgctttattagattcggagaattttaaagacattgctggtgttgcgaaaaaagttgaatcactcggtgcctcagccattttagtaggaggctcttctgctatagatcaattggatttagacaaattagtaatatcgataaagtcaataatatctattcctgtcattttattccccggaaatgttacgggtgtatctccaaatgccgacgcaattttgtttacatcattactaaattctgaggatccatattttatttcgggagctcaagcattagcggcattattggtaaaaaagtataatattgaaccattgccaacgggatatataataattggcgataatactacagcatggtttattggaagagcaaagggcataccttttgaaaaattcaatatcgctgttatgtattcattggccgcgcagtatttgggtatgaggtttgtttacctggaggctgggtcgggtgcaaaaaagaatgtatctgcagaaatgatttcaaatgttagaaagtattatgatggcttgttaatagttggagggggtattaagaattcagcaattgctaaagaattggcggaagccggggcagatatcttagttataggaacattattagaacgggatcccgattgggagaataaatttaacgacattattactgccatacgttcctaaaatggtgcgattgaataattatgaatttaattgatgaggctaaaataagattaaataatatttcaataccaagctactatttagagtatcaaattagcctcctggaacaggtaaataagcttcatatggtagccgaaaaagcaagaaaaaaaggtttggatgttacgacttatgtggaaccaaaaattgcctatgacttatcggacagagttgcaaaaatgcataatatagacatttcagacagattaagggcattactaaactacactacaaaagagaaagccgctcttaaaatagcggaagaaattgcgaagggggaatatggatccggagatcttagaacaagattagaaaatgcggttagggtaagtctagctgtggtaacggagggagtcactgtagctccattacagggcatatctgatgtacaactgaaaaataataaagatggttcacaatatctctccatttctttcgctggccccataagatctgctggagggactgaagcagcacttaccatgcttatagctgatcacgtaaggagggtatctggacttgctagatatcaaacaaattcttttgatgatgaaactggcagatttatagaagaattaagattatacgagagggaagtaggaaactttcaatttaaagtattagataaagacgttgatttttgtatttctaatttgcctgtcgagatcgatggagtagatacagatccggttgaattagtaattcaccgggagatgaagaggataaaaacagatagagtcagaggaggagcactcagagttatgaacgatggtttgataggtagatgtagaaaacttacaaaattggttgaaacacttgagctagaaggttgggactggcttgcaaatatgaatggtgcaatccaaacaggcgatgatgatacagtgagtcatagaatgtccgaagtaattacaggaaggcccgtgttatctatgaacaagaaaattggtggatttaggttacgatatggaaggtgttttaatactgggtttgccacgataggaatacataacacaatacctatactattgaattctgccgtagtggttggaacacaaattaaaatggatgtcccaggaaaagcttcaacaattgcccttgtagacagcatcgaaccaccaatagtaaaattagatgacggaacggttttgcagattaataccgtagaacaagctctaaatttaagatcacgagtagtcaaaatattatacttaggagatatcctgattagttatggcgattttcttgagaataatgcacaattattacctgcaagttatgtggaagaaatatggatccaggaattatttgaaaaattgagccacatcaatgaagtcaaaaaggactgtgttgttggatatgacaagttagttaaattgagttctaatccctctgcaataccactatttagagaagcattgaaaatttcaatccaatttgacattccactacatcctaaatattccttctactgggaagctatatcaataaaagattttctattaattagaaacgctttgatatcttttatttcactatttagtagtgataaaaagattgaatcaactacagaggaaattaggctatcatacgaccacaaactaaaaagtattctagaaaaacttggcgtgttccatcgtctagatacatctagtaatactatagtattgttggatgaatctcaaattttcgcgttagtgtgtttatgtattcctgaattccaatctatactctcattgttatatgagactcgcaataagatccatttttcaacattttctaattatatatcaaaggatggatttatcaaaaatgtagatgaaattgttgaaagtttacaatcggagaaaggcgaaggtaaaacaaatgtcatcaagctaataaattcaatttcatctattaaaatccgttctaaattttcttcttcaatatctgtaagagttggtagaccagaaaaggcctcagagcgtaagatgaaacccccaattcatgttttgtttccagtaggtaacaaaggtggtcccatgagagacctcctaaaggcttcaaatgccgattccttttattcagaaaaatcaaatcgatactgttataattgtaatattccatcgttaggtactaactgtaactattgcaaccaagcgactcctataaaatttatttgcaatgtttgtaaagttgaatctctagatttatcgtttgatcctgttgataatataaaaaaaaggaataaatgtttaaagtgtggtaacgaatataaaacattttctccaataaaatttcctttaaagaccttgatagagaaggcagaaacaaggctgaactttagagtaacttctccattaaaaggagtgaaggcattaatggggaaagacaaggaagctgaacaaatcgagaagggtattcttagaaaaaaatgtggtttatctgtgtttaaggacggtaccataagatttgatgcaacgaatgagcctcttactcattttctgccatgttttatcgatacatccatttcaaaattaagagaattagggtataaatttgattatcgacagaatgaacttaatactgaaagacaaatcgtagagttgctgatccaggatgttataattccattagattctgcaaaatatctcttaaaaacagctaaattcatagatgaggaattagttgccttatatgatttaccacctatctataatgcctataccgaaaatgatctgatcggacatttaatagtgggattggctcctcatacttcagtcggtattataggacgtataataggttttacagaatcacaagtttgtttgggttctccaatatggcattccgcaaaaagaagagattgtgacggcgatgctgattcgattatcctattatttgatgcattcttaaacttttcatattcattcttacccgataaaataggtggattaatggatgctccattactaatacaacctattgtattaccccatgaggttcaacgacaagctcataatattgacattgtggaaaaatatccactagacttttataaaaatacttggttaggtgttaaagcagcagatatttctgatacaattgaaatactaaaaaatcgaatagggagtgataaacaattttatgattatgggtttacgcatactagtggcactttaatatctgacataaatcgaagtgcatattctacattaaatacaatgagcgaaaaattagaaatgcaaatatccacagcaaatcttattaattctgtagacacaaacgaagtaatctctatggtcctaacgacgcatattattcctgatataatgggcaatatgcgttcttattgttcgcagtcgtttaggtgcaataaatgcggtgataagtataggcgaattcctttgtatggtaaatgtcttacttgtaataatactttattacagacggttacccgaggttcggtagaaaaatatgttcttttagcagaaaacttgagtaacagctttaaagtcacaagttacctaaagagcagagtagaatcacttatcgttgaacgaaattttatttttcaatcaaagaaagaacaacctacaatacttgattatttataataccattgtaatttttgatttattagcttgcaaaatttatttgatatggtcttaaagtggccaaatcaactacaattgctattccaggggtaggagtgattcccatggcgcgttgaaaaggtgtttgggtttgccacgcgccagaattcactaccaaagttcccttatagctatccacgtctattacgtgtacatgaccggaatggaaaatatctggaacgtcttcaataaccatcatatcctctaattctggagcaataggtgttctttgaccgtatatgggtgaaagatgtcttgattttaataaaatcttcatcgcctcggctggtttagaataacttagaccaggaattgtagcaatcgtatcgtctaagctttgaccatgaaacattaaagtttttactccttccatatttatcatacagggatttcccagcatagtaatattactcagagaataaatcttatcggcatattttcttggtattgctggttgaggcaatgctcgtcttcccaagtcatgatttccaggaatcataaagaccttgatgtgtttaggaattttcgccaacaaatttgtagcatgctccatctgggaaaatgaatccttttctaataattctctgtcttgatgcggaaatattcctattccatcaattaggtctccacaaatgcaaatatactttattttagaaacaatgtctttattctcttcctttccatttaaccaattcaaaaacatttgaaattcatcttccatgaagaatttactgcctatgtgcaaatcagatattaacacactatatacctcagagtgagatctatttggaattctgtctggcacatctaatgaaaatatttttcttattacgtggttctttctttttgaattattctcaagttctatcattaccatttgatctaacgttaatgatgaaatctgtttttttaaatcatcatcgtatgcaaatgcttctaataatccactctggtcatcaatagttaaattatagctatttttttttattttcttttccattactaatcctgctatgaataaagattcttccggattctccttagattgtgactttagatttattcttgattggttaagagattgtttaatgaaagctattcttttgatccttttactatctggcctattggacaaaattttcaaggatttatcaaatcggcttctaaacagcgatgtatatccttcaactccttcactgctgttgatactattattagaatcataaattatattattgatataatagttattctcaaaatcatcagtatgagttactaattctaaaataggctcttcattattttttttggtatcaatgatttcagaatgatctaacctatttatgatactagtaccattattagcattatcattcacaatcaatgaactatgggttgaaaactttaaaatattctttacatcgtcagataaaataaccttagactcgtctctctttttgattaagagaatctcttctactatttgatacacatctacctgcagattctcgattaacactaacgcatcgggatgaatctgaaatcctttgctagttataaaggaaattatttttaagagattggaattatcggtcaataatcaaattaactaatcgacgatattctttaaacctttttatataaataataaagtattataattgataaaaaaagtattataattgattatgcttatcacatttaaaaagagactggcgtttttctttatagccatgttatttttcttgagtatattttaccttggattttcctttgaaatggatgaatcgttttctaaggagttatcaaaaaactttatgaatcagataagtgacatagacgaatttgggatattcttaaataacttaaaaatagcattagtaatgtttcttcctgtcataggtctggtaatgggaactatctctggcttttctaccggtttagtatttaattcaataatgaatctatcgggtgttacatattctaatcccctagtcatcttcttaacaccatttggaattctagagctagcatcatatggactagcaatttctcgaggctgtattttattatttgaactactaaagaagaaatttacaaaaaaatctttgttttatctgctaatcgaagtagcattagtttctggaatgctttttgttggagcaataatagaatggatgatgattgaaaatattccaaaaaggttataatcatctattattcacgcatggttttctggattaattttatatcattgttataaaatgccatagtgtttaaatagttttaatgaagatttacctacagtgaattattagatgccagtagcaatacttccagatattagtgaacagcattgtattgggtgcgctttatgtgtagaaatttgtacagctcttggtccagatgtattaagagtaaaacctgtggaaggttggaaaagaggtaaagcatttgtcttttatccagaaagatgtatttctgatggtgcttgtattggcgtttgtccaacaaaagcaattttctggatgagaccaatggattataccccaggacaaccaattccattaaagaaaaacgccatatttacaaaaggctgggaagagggctaaactctccaccaatttttattttttctcaaattatagttattttcccatacaaagctgataagattatattcaatatacttatattctaatatcgttttctctagcaattagtacttaaatatccaataggctactaaaatgcctaattgacaaaagaattgtatgttataggtgtaggtccaggatcaaaaaaatatttgacggatttttcaaaagaaattatcaagaaatctcgttttattataggatataaatacactctaaatacaatagatcacctgcttgataaatcatttaatcaagtatttgaaataaccatgaaaaatcaagaggagacttatttgaatgtatataataatttaatggaagaaaatgatatatgcactgttccatttacaggagatgtaaatttctcagaatcagaagtagtggaccgacttttacatctgttcggtgatgaaaatgtccaaataattcctggtattagttccatacagatagcagctgcaaagtctagagttccattggataaatctaacattataacttttcatgtcactggtgatattgaagaaaaaaaaatagaaatggttaaatcaattgttgataaaaaaagcgtaatattagtgccaagaccatggccgtcagatccatcaaaaaactttatgccctcggaaatttctttatttatcaaagagagaggattagacacttcaaaaattgacgtttggctatttgaaaatttgacgaatgacggaaaggaaacaacttttacgggaaaaatgagttcgctggaaaataaaaactttagcgatttatcaataatggttatagatcagaacaagcgacaaacttacttggagttctaaaactattctatgctttattatttcggttcttaatgtaaataaaatatattacaattaatttcatatattgttgaatgagcaataacgaatttagatgttgtattgaatgtggttcaagaatgtctaaaaatactaaactatgcccagcctgtggagaatctcaggcctaggattagatatttttgctaaactcatttctattttattgcttttatttatcgatcattatgacggttcattgtcgctatactcattattaaaatacctctatttttttataattaaacgatggtaaaaaaaataactctccttattccaataattatttcggcttttgtaatagggattttgggaattatctttgttccatcagatattaaaaatgtaaataccgctttttcaaaaggaaccataaaaatagacgaaaaacttttgactgtcgaaattgctgattcggattttgatagacaacgatggctaacatttaggaatgacaagccaaatttggattctggactactattgttatatgataaacctgatctatattccatgtggttgttaaatataaaatattcattagatttaatgtggtttgatcaaaatggtggcatagtttatcttaaaaaaaatgcccaaccctgtgataatattcttgattcatccaaatgtacatttaagaatacaaagccggcaaaatttgtgttggttagttcatcgggattcatccaatacaataatataacggaaagttcaaaattagaaataatttcagtttgaattctatttttctcttttactatacattgcttatactaagatcaatatcgttatttcaagttcaactacaaaaagcaaaaggcataatcgctttaaactgataacaaatagagtaggatgtctgttaatcagagaatcaagaatatccataccagattattttcatagatgcttgtttatttcttgtagttcatgagttatctcttcaatggatgcctcatcctcaagagtagtgatatctccaatagtttcgttattcacaatagattttaaaagtcttctcattattttgccactgcgtgtctttggtaacttattcacaaaataaatcttttcagccgatgcaattggccctatcgtattcttaatatgcttatttacctcaatatctaaatttgaagatgaatccactcctgcccttaacacgagaaatgcaatgattgtttcacctttaatttcatcctttctactggtgactgctgcctcagctattgaaggatgagaaataaaagcactttcaagttctatcgttcctaatctgtgaccggcaaccttcaatatatcgtctgctcttcctagtatccagtaatatccatcctgatccgaatatgcaaaatcacctgcaaagtaactattatgtgccttttcccagtacgtttttctatatctttcgtcattattccacaatgaaagtagcatccctggccagggttttttaacggttaaatacccttttttaccaacttctacttttttacccttgtcatcgactatttctatttctatacctggcaatgagaatgttcctgaaccaggtttcatttggatgatctcgattccggtacacatacttatcataataccaccagtttcagtttgccaccatgtatctataataggacagttgttttttccaattgtattgaaataccacctccaaacctctggatttattggttctcctactgtgcccaataatcgcaaacttgataaatcatacgaattgggtatgtcgttaccatatctcatatatgatctcaaggctgtgggtgtagtgtatagaatagttatcccatgcttttcaattattttccaatattgaccttggtcagggtaatccggtgcaccttcgtaaagaatttcagttattccatgcatcaatggggcatatactatatagctatgtccagttacccagcctatatctgctgtacagaaaaatatatctgttggggcaaaatcaaagacccattttgccgagttaaacaaatgagtcaaatatcctccacttccatgtacaacacctttcggtttacctgtggtccctgatgtatataatataaacaaaggatcgttactttccatccattctgacacacaatagttagattctttatttactaaatcttcaaaccacaagtctttttcatccatgtctatatcttcattagttcttttaacaactattactttttcaatagtaggagcttgttttactgcttcgtcaactattttcttaagtggtattgtttttccccttctgtatcctccatctgcggtaattattatcctggatccagcgtcattcactctgtcaataattgattgagagctaaaccctgaaaaaataacagaatgaatggctccaattctagcacaagcaagcattgatataactaactcgggtatcattggtaggtaaattgtaatcctgtctcctttttttataccttgccttttgagtgcattagctaattgatttactctatgaaatagttgattatatgtaatagtaacagattttccgtcttctccttcccaaataatcgctgcctgatttttcttttcacctgttaaatgtctatcaagacaattataggcggcatttagttttcctcctaagaaccatctagcaaaaggggggctccagtccaatacttgctgccattctttaaaccatgataagttttttgcacaatttgaccaaaattgttttggatctttttcggatattctctttatttcttttatcttatttccttctagagaaatgatttcttgatgtccatccttgcgatattgaggatcaatcatgaaaaagaaaagatttttctttacttaaatgctatctttatttattatagagtattatcaatatataattataatattccataattgtactatctaatttctctatcaaaaaccatacaaaaccacactaaccaacatagattttatcatttaaaagaatttttccttcagagacaaatataatttcaaattatataataaacttatataggaatgttatatctgattgttgcaataaactaaaataaataaagagaacgaaaataaagtgtgaaatatagaagtagaactgaaatagtggccatgattttggatgcaggcaacggtggagcaaccaaaacaaaaattatgtacaaggcatttttaagttatgcacagttacgtgaatatttatcagtattaattgaaaataatctaatcgaatatgttgaaggttctcaaacctacaaaaccacagaaaaaggcttaaactttcttaaaatgcacaatgaaattggagaactattaagttcaactacacaaaagtaaatcaacttttcaaaattttatgaactcttgtagtttatgatttttgataattttacaagtgcaatcaaataaataaattaaaaatgaaggaatgagcaaaaataattagcttttaatcagatgttaacatgtttcacatactctttgttgttttgtactcattaattgtttgtagccatcatgtggctgggttcgttattttctacattattttctactgaagcttctacatagtttgttacttcgttagaagaacctcccgcgccacgttcctctgattctacttcttgttgttcttggtcttgttgaatctcttgattataacttatatttggttccgattcttgggttagcttttgaatattatactcgagtacctcttctttatcttcattttggacgtttaattgatcatttttgatgtcgttattgtttgaggtaaccgtgttatctactgtttgttgtgtaagcttgttaattatattatttatttcgtttttttctaaattgacatgatctattagttcattggtgtgcatagttatctgctgataaatatcttctgttatttcgttactcttatactgtaactttgcatcgaacaaaaccgcttttattcttttagattccatatctatttcagatattctttgatgaagtctctcaacaatctctttgctgttttcgcctaaatcatccaaccttttttcatactttaaatataccaattctgcatcgtctttcatattgtcgttatcagttacaatttcttgcaaagctttaatcctcttcaaagttaaagatttttctctcaagagtttttgtgcgtccaatcgccacctaggaataaaaatgacatagtcaccttgtaccaacagttgttcatatggtaaatttttgatgccacttgatccacaatctacacttacggactctatagatccttctaaatctgtgatgatgcctacaacttttccaatgaatgttccatacatgtctttaacttttttactgacaaattcgagcttcaattcgctcatgcaatttaatttgtagacgagtataatgctcgcggtgtgaaaaaaattttataatattgtaagatttaatcaactatagttacaattacatacgtacaataatctttattttaagaagttggatcaggaaaattttaataatgtagagcgaaaaaaactcgaatctcatttttccaattcagatcgtagtgtatttgtaataattactccacatcaggtcgatcgtggagctttgatgtctagatattctagaactgataaaacgatgagaaggatatttatcgatgaatttctaccaaatcccaatagaggtctggaattttataacagagttcttttagaatatggcgatgaatctgtagctgaactcggaacagctcaatgtgctttagaatggatatccaatatatctgcacaaaaaatagaagatcataggatcggattatcatttttagaaaaatcatctcgttatgttgcctttgataaaaaaatcaacggagtttataaatattttagggatgaaaaaattatgtcatccgtttatgccgataggtatatacagtcatgtgacttggcatttgaaacttattcaaagaatatcttacctatgcaacagtatctaaaagaaaaaattccaatagataatcttactttttatgattctgaaacaaagactgataacctctttagccacttaaaaaactctatagatgttgatagcgcaaaaaaaatatataattcatccattaaggccaaagctctggatatattaagaaatctccttccgtcctcaaccctcactaatctggcaattacaggaaatggaagagcgtttgaatatcttttgtttaatatgaactcttccgaattaggagaaatcaacaagttaggtgatttattatataaagaactggaaaagtacatcgaaccatttatcaagcgatcaaaagataaacacagtatttcatattgcaattacattgataataccgagaaatctattttaggaattctggataaggatctttatcaaaaatatgataaggtttctgataataatcttttagcccatacttcaaataatatcaaaagtttcatagatgttaaattgctttatcatattcccaatattgaagcagaaatcaaattggtcgcttctattttgcatgaatatggtagagatttattaatgtcttttttactagatcttgttactactttctctcgagaaaagcgacatgagattatccgtgcttattctcattttagagaaaatagaagacatagaccaggaagagcttttgaggtaattgattattcgtttgaattagtaactaattatggaatatttagggatctacataggcatagacttttgaccatgagtcgacagttgttatctacaaagtatgggtttgatattccagaggaaataaatgaattaggaatagaaaaggactataatgattgtatgtatcacagtggtgatacatataagttaatctcctctacaatgcctgcagaagcacaatacgctataaattttgcttataggtatccgtattttataaaaatgaatcttcgtgaagcatgtcatatgattgaactacggacaactccacagggccatgaagattatagaaatgcttgtcagaagatgcattcactgataaaacaggtcaatcccgttatttctgaaggtatcaaatttgtagatatgaatagttatgatttagaaagattcaaatcagaaaaaaatatagagttgaaaaaatctaaaataaatatatctgataatagttgatacattctgattcctcattatggtatctctatacatataactgttatttgtatcaagatcactactttttttcttaaaaccatttgtcaagcgattgacttttcttaataatgcttttttcaagtcttcccaagtggttgataactctttcattggaaaaatttttctcatcacagagatattttatagttttttccttctctatctgattaaattcaatatttaagtcctctaagtcagtaacctgagggttcagaaatatttcccttatttcattgtatggagtagttaataattctgtttttattttttctatatcttcaagtttcttgtacttttgtatcaattttagagcatttttaggaccgatgccactaaatccatcgggattgaagtcagtaccaatcaagattccaatatccacaagctgctggtgagttagattattagtctttagtacttgagagtactctattatttctggtacaatatcaacatacacatttctatttgggatttttcgtttcccactgactgtcaaattccttatcaaccttttcgcaccaaacagtattgaatcataatcttgactcacagatgaatatgctagatcctttttagataagagagcagcggttgcttctccttctgactttgcattaatatatggaattcccattaatgacaacaaatattttgattcttcaatcattttggaggttagaactgaagtcccctgactaaatttttttgcatcatccattcttccctcttccaatgccacattatacttctcagttgcttcttctttgacttttcttcttctttcaatttctcctgatttcagtctgttgggtaatccgtcaaaaatatatactaatttgaccccatcactaagtaaatttatgtttctataaaaaagtccactgagatgactggtgggttctccttggttatttgccagtaattctccagtcgggcctctaattgtcgctaagaattgataaattacattaaaagcatctattgcaaccacttttccatccaaatcagaaattctaatagggttagatgtaatcaatggttttagatttaatcccatattttgatattctatcctttatgatttttaaatatttgacaacttaaagccttgtaataatgtgaaattttttatttatgatactatcaatttcattaaatatacccactaaaaataaaaaatttaaatactgataaacaaattgttcaatacgatttacagataactgctagataactatctaataccttcaaaatgtatcaaattctcaaaagttttgtcaaaggatttaaaaagtacattcttttgattttagtatgtttagatattatcaaatagtttgttatgaataaagttctgatctgaaaattattatgatttacaaaacatattatttggttatcaagtaaatagttctaataaagaaagaataaatgattgttgattaaaaaaagataaaatagttactattgtttaatacaataaccacataaatacacggatctttataattagacatttctattccctgtttttgttttgttatcttcattattgttactaatgaaatcaatattattagtttgcttactagcaattatattattatatctattaactcaatttacaactattttattcgtatttactatatcttcatcaaacccgttctgaaatatataggataatttttgtcccaaaaatggctgtaaagaaagcaaaattctattataggttttttcattgtttactgtatttaactcatttttcttttcaatcactttactttcaaaaccaacttcttatcataattatcttcaatatccttcaaaaatattaatacagcaagatcattaggtatcttattagcttttgcaatttcttgaattgtaagccaaagctgtttaagctctttaagacccagtcccatacactacaattcttcatatatgttcatagtttgacgattgatgtttacaagctgtagcataaaatatgagaagaatattgattcacaataataaaataaattttataagaaattaaaagtatttaataacatctcattattttttactttgaagatattatagtttagctgatattcctccatctagtgtcatcactgttccagttatccattttgaatcatctgaagataaaaataaaatggcgttagcaacatcctctggatcgccaattctttttaatggaaatgatccctctaacattctttttgcgttttcgtcctgtaaatatggttccatcataggactccgaatggtagacggtgctatacaattacatcttatattgtattgtccatattctactgctatactttttgttaacattatgatgcctgcctttgttacaccatatactgaaaatggtacttttggtatggctctaattcccaataatgatgatatattgattatattacctgatttttgttcgatcatcaagggaattactgctttgataggctgaaacgttccttttagattaacattcatcaggttcgtccattgatcttcagtcattagatggaatggtgtaggatcattaattattgctgcacaatttatgagattatctattttatcaaaagcagtcaaagtctgttcaatgacacttaatacttcagattcatgagatacatcagctgctacatatatcaaattatcattattgcccaactcatctactgttttttttaatttatttttatttctggaaactaaaactactttactaccttcttcaagaactttttgcgctactgattttccaatcccaccagatgcacctgtaattatagttacttttccattcagtttcatgaagtaattacaatacaattaattaaaaggcttttcaattttacacatacaattctcgttgtttatgtaaaaaggcattaataatgtagtttgttgttacaaaatgctgaatatgattaattatgagcaggtaacattacttgtctaacgataagaattgcgccaaaatagattaatattggaaaaatcttattttctatatggttaacgaattaacttgtcctaattgttcaaccatgatgagaaccaatcaaagatatggagttgatattgatttctgcccgtcttgtaaaggtatatggttagatagaggggaaatagaaaaaatcgctaatgcttcaaaaagatatgatgaggatcctgcatattcaaatgaacgtcctgcatattcaaatgaacgtcctgtaaattatgatgatcatccaagggaaataagaaaatatcgaaacgacgacgacaattatgatcatgatgatgattatcgttataaatctagtcaatatggttacaaaaagaaaaaacgaggatttttcaccgacttttttgattttgactagcgagtaacaaatatccttattttttgagatattcaaaatttatcaattctgtcctattcaaataattaagaaaccagaacttatcaatcacaaagtaggattcccctctctatctcgatttttgctgttctttttgataatgattttcttttctctgtttaatatgattattatgagaagagggaaaataaaacctaaaagaatcattatttcaaatgtaatgattataaaaaaacagataataatcaaccaaacgtaacaaattgttagaatatagtcatacgtactcttcagcatatagttggatatattttactttataataaactaaaagatcaatgtctaaagtaatctatcaaatatctatcgtcacctccagcaccactcgagcgattccataagtctctataatacgtaaaatttaactactttattcttggtttttcatttggatcatcctccccgacggttgaacattatttatatccttttgaaaaaatatcatatagtaacatgcatagattatgatgagtaaatcggtatattataataatttggaagttctttgattattcttgacatgaatatacgtagagctagatcctctgacaagaataaagtcttggatttctgcatgaatacatttgaatggggagattatattgatagagcttgggataattggataagtgagccatcaggcctattattagtctgtgaaactcatctatcacctttcatttcaaaatcaaatctcgtaggaatcatccatattctccaatgttcgaataattcattatggatcgaaggattaaggataaataagttatatagaaataatggttttgccactgccctcataaatcatagtattgattatggaatcgaaaataacttaaatgaatgctgtgctttagtttctaaaggtaattttgcctcacaaaaaatgctagaaaaattaggatttttgaaactctttaactgcaattattataatatagagttagaaaaattaggatttactggcaagaaattatctgcatctacaaatatgtcatcattgaaattaattataaagacaccacaattggctgatgtcccaaagattctcagatacttatctaatccaaatactacaaagtatatggataatagatattttcattcttggagattctataaattcaatatggattattcaaatttgattttactcataaagagtgacgaattattgataattctaaatgaagatgatggaataataggacttgtaatgataaaaacgtttgttagtcgtgatagctccgacaaaaaatccgtgatacaaattggttactttaattgtatcaaagagtcgttatactcaaaaatcatttatctcttattggagaaatattatgatgataagcgatttaataatgttcaagtttttttaccaaccttccttgaattgagaaaacttcttagtttcgaatcaattaattactctgatcagttctatttgtattcaaaaaaattaaaaaacattaggcagaatctgtaagacaccacagttaaatcaattattatcatattgttacattattatcgcttaatcaattctgatatgctagaaatatccagcagtagcggtgagaattcaaatagttgtagcctcgaaaccgggattgtcagataatccaaaaacattcttagataaggtaataatatcgacgtcaatttgaatagtaaaatatacaaaagtcaaaattcaaataattctaatgaggatgtaaaaaatctatttagtttcctcttttacttcttcttttccactcaatattaacctataatgaactaacattcgcctgtgcatacctgccaacacggctttcccgtaaattaataaaaagtcaaaaataattgtaacaagtataaatatcgacatggcctctccaaagaaaaagaaagtcaattcagaatccattcctattttttcgagtaatccaagcctcaaaattaagccaagagaagtaatgatgatacgcgttacggtagctaatatataacagaagttagaaaaccatccgagatcaacaaaaattatacctttactatttttatagaatcttaatatcttatcagaatatttgttggctaaatatagtactatcccaaaaacaatcaaatagggaactataagctcgattggaactccaatgatgaaaaatgaactatagagtaaaaataatgtaagcgcaaattgtataattgaatggatgataactttcctcttatttggtttttcaacttgtcttattgatttaaatctcatatctttaccgctaattcattttattctttgattcatgaattgtgtcattttgtatttaaacaatatatggttaatgatatctgatttcatatcgatctgatgcttgacttcatctttatgccatttttcggattaagtgtgattccgggatccattttaattttctgatttgggatcagttctaatttccaatagctcgaaacggtagcgattaataatattccttcttgccatgcgaaagattcccctatacaaccacgtagtcctcctccgaatggaaaataactaaaccttggtaaatgtcttttgaattcatcagtccatctgtcaggattgaattcgctaggattgtcataatatcgactatcatgatgcatgacatattgactcattaggattgaagatccttttggaattgtatatttatcaatcaaataatcttcttcaaccaacctgccaatgctccaaacaggtggataaatgcgcattgattctctaaatatcttttcaatatacttgaatttgggaagatccttgatcgttggatttctataaatctttttctttccatcactattttttaaaagtatggaatctatctcttcaaacattttttgttctacctccggatgttgggatatgagataatatgtccatgtaactgcatttgatgtggtttcgtgtcctgctattagcatagttataacattgtctctgatttgctgatcagtcatggggctaaggtctgatatggtgttggtttgaagtttgtctaattcattattttgctccacttttgatttaatggttgatagtaactgtgcttttattaatctggataacaagtcttcttcctgatctactagcttacttgatcctataccatcatccatactggtagttttctttctatcttcaattaattgataaactatggaatcaagtgtctttattgattccctacttttagatacttctggtagaattttaaaatgatctaaaatgtgtcctattggatgttgaaggcgtttaaagtatttttttgaaacttctaatgcagacgaaaatttggatgcctcttcggaatcaatttcataattcatgatagatttacaaattatttttagagtaacattcatcatttctttatgaatatccatcatggaaccatctttccattctttgcacatcaacgatgtcttgtccacaacaatttgaccgtaagaagcaattctctttggcaaaaacaaggggtgaattatttttctctgaccatcgtgcttctcgccttcacttgttactaaaccttcacccaacaatcttttagctgtttgcagtcttttaccttttttaaaatttttatgattatagatcaaaatcttttcaatgtaatctggattgtttattaaatatacatgaccattaccaattctaaagtgagtaatctctccataactatgagcaaaatcacttaaggttttgattggatcttttgataattgacgtaataatcttaaggaaaactttgatgatggtcctggaggaaagtctagtattgcctttgacattttagattaagacagggataacttgcttatataatttggttaacttttctatctatatgaccataaataatttataaaaaattatattatctaaaatgttatcaaagatcactatcttacattggttagaaaaatagattattaatagttatatatctagtgttaaattttagaaacaataagaatcagtatggcgggagatcaattgaagcaatcgattcaagtaagattctagaggctagaactgaagttgcattattgatgtcaaaatccggtgagagttctactatatcaagaccgagaatacctgaaccaactgccaacttaatcagagttatcaaatcaatacttgatagtccacctgctgagggaacagaaactccaggagcaaaagctggatccaagcaatccagatcaatagaaatatacttcttacccttgttgctttttgctttcactttgtccataattttcgcaattccggattcatttatatctagaggtgtaacaatttctaatcctgcttttgaagcattttctaattcttctggctcagccgagcgtgttcctattaaaatgctttcgttaaaatctatccatcttgaggcatcatacagtacagaaccataatagtcatttgtggttgaaacaaagtcgggatgagcatcaaaatacatcagtcccgttttacctttacctatataatcccctattgcatgtaatataacagtagtaatcgaatgatctcctcctataactatgggaattttttttgaagaaactagctcaagtattaatcggtacaagtcatctctactgatattgccgtagtccataatgcattttccgtttattactccgcgcattggacatatcggaatagtttttcctcctctctcaaaaaaattagattcattagatgatattctaagaatgtctggaccctttattgtaccctttctcttcgaatgggatttagattcatcaggtacaccaattataacaatatcagcttttgagacctcatttacatttgaataattaaaagtaaccatgtatccgtattacactagttttcataataatcttgctctaaattaattcacttgacaatgaattgcaatatggaagtagatgataagcaacaaccgtcactttgaacttctacttctattctttctcaaagattttatttttacaaaaaatctttcgagaaaaacagcccatttaatctttaagaagaatacaaataaaatactaaatacgactaatgatattattactgcaacaattaacatattaatatccaaagacatttcagaaaaatttcctattattggttttccaataattatggttccccacacaactattacattcagtagtattttcgaaaaaaatgtgatcaagatgaattttagaggactatatctatacattccaaatggaataaaaataatattgtccggtataggtgtaataccagccagaaatattgttaaacctccatattttctcaggattctataagtttctggataatcttctgaattaaagtttctttttaaattaccaatgttggttccataatagctagccatgtatacaattgatttagcacttactgccccaagtgcgccaaatagaattattaaatttggatctaaattagtgaccaaaactgctgtcatcagaatgggaaaataaggaattgggacaataattaatactgcagaaataaatgtcaatagaaatattgccaagtaatccattccctcaatgaagtgcataaagtcaaagacctccatgataataagtacattaaatattcttgattaattacttttttttatgatccagcggaatcttttcgtgattattgcccgaaaagatattccgatctaattttaaggcttaaaattcgtggtatttcaccagttgtgatcatatctgaacatattagtcttaaacctttttgatttatttaaaactatttaacctacaaaatgtatgacatactataattttaaacaaattttatacattcgtcttatcaaattcaacctactagaatatttttagtagtatctataggtgaattttcatatgttacacacttctgtaaacataaatttttgcaatcatgttctatatttgcacaagttgataaacctagatagtcgtaatttaattctaatattggtagttaattttagaaatgactagatcatgggaatcatcattatattcccggtctgaataattgattggaattgttaggaactatcatctcatcactgtagttataatcataaattctgagtttaggcatcatagtcaatattttagtgataaaatgatggtttttgagatcgttactatattcttattgtatttcaattcaaatcagagccaataaatttatttaataccccataatagattgattattggataataatcagaaagcaacaaaagcaacaaaagcaacaaaagcaacaaaagcaacaaaagcaacaaaagcaacaaaagcaacaaaagcaacaaaagcaacaaaagcaacacctgtaaaaagtggaacaaaagcaacaaaagcaacaaaagcaacacctgtaaaaagtggaacaaaagcaacaaaagcaacaaaagcaacacctgtaaaaagtggaacaaacgataaacctgtagtaaaaaagactgtaaccaaaactaaatcaaagccatctacaaaaaaagagaaatctctgtaagttagtttttttacaattttttcatattttattaaacctgtttctctcttttatttgctctaccatttggatgataaaatttcaatttattggatcatgatacaatagaaaattcaaaataaccagaaaaaggatcatctacattcttgagctcacaagtagaaaaaccctgtccttataaatgtagtattaaaaaattcagtaaaaagactcttctgattaagatgattaacttatacctcgataataactgattaagaataaaattaaagtcgatcaagccggtttatcgaaactattcagtttttttgttacatatatgaaatatctttacctaaaatttagtacattgtacatttaaatctgtaaagtcgcgaaaattaaagtcattcattacttttatctttggtatatcatactataaaggccaacatcggaatagatgtactttgtctatgcaaatatgattacaatgaacaaataatatattacctgtgatgtttgtacaatatttgaatttaaacatggtgttaagattgtcgtataactatcttgggaactgtagctttctatctcgagcattcataaaatgactcttgatcaagttgtagttaatatagataaaggaggactcaagttaagtaggtatgggtattaatatagtatatacttctgaggataataaatttaagccgttcaatctatactttgaaccatatgtttctgacagcaatgccccaaatcattctactttgaagctagttaacaaagatttggcattagaaatttacttggaaaataatgacgatgaacttatcataaatcaaaaaatacaatatgatcttatgttgtcatatgaaaaaattgtgattgaatatgatgatagtaaacaaatattccgaactttgaaaaaagttagaacaaatctagagaacttagttaaccaatgattacagatttacaaatattgctaattaaatagagacgtatagtcaaacatgtctacagctggtaaattaaattaataaattgatgattaaagccaagctcaatttttattatcaacaatgacattgaatacagatacctttttccagtgtacaaagaatatgaaatttgcaattgtaacacatattgatataaagatcctccattaatcaattcccattatacttctatatgtattggatatttgttagtggtacttatgcctatcgaatcaacgtctctcctcctcctgcttcttaacctgcttttttttatatcatcattaaattagctacctaggattgttacttcatgttaaatctgtgaatataatattagttgacaatatagtacaattttacactgcgtaatatatataaacatagtacacaactaaatgtaatgaacaaaaaaaaacaaatgataaaattgaaaattattagtcgatctccatatctaatgggcataagaaagaggataaggatacataatgaaaaataataaagaaacaaattatgaaaagaataatattactaaatatgagcaacttgagtattatatggacattatcccatgatatattcttttattcataatcattttatgaactctagtctacttacatttgtataataaaattgctgtcatagaactataccaacttgaaggactgaacttttaacatcagagtctcgggttactaatggaagtctttcccaccttaatgcttattagtatggaaaaagatatagtggaactaatgacaacaaaaattttcgtgaacctgcctgtgaaggatttaaacagagcaatagaattctttactaaacttggttttaaatttaattctcaatttacggataaaaatgcgacgtgtatgataatcagcgaggatatttttgtcatgttattagttgaagatttttttaaaacctttactaaaaaagaaatttgcaatacttcaaaaaatatagaagctatcataacactctcagctgagagcaaagaaaaggttgatgaaatgattagtaaagcgatagaggctggagggaccgaacctagaaaaccacaagaccatggatggatgtatgatcgtgcttttgaagacattgatggacatctatgggaaataatattcatgaatgaaagtgggttaaaacaaaatgaaaaaaataactagattatgaaagtaaaatagatgactcaattttgatctaatctactttagtgagttagagatctaattattccaactattgtgtttgttatgataaatggcttgtattaaaatattgataaaactcagcttattcatgcacatcaaatacgatggattattttcacaaaaaaattaacgtgtttaaatttaaataaaatggactgttttcttgcataataatataaatgaattctaaggtagtggatgaaattaaaattaaaggtggtaggatgttgacattagttgagggggatattacggaaagaaatgtcgatgtaatagtcaatcctgcaaattcttacttacaacatggtggtggagtagctggtaccatagtaatgaaaggaggacgcattatacagaaggaaagcgataagataggttttctccaagtaggatcctcagcaataacttctagtgggattttaccatgtaaagctatcatacatactgtaggtccaagaatgggtgaggggtatgaggacgaaaaattgagcaaagcgatcaatagctgtcttcaacttggatttcaaaaaggatttgaaagcatgtctatccctgcaatcagttcaggagtatttggttttcctaaaaatagatgttctaaaatattagtaaatgaaacgatatcttttctaaaaaatctagaaaacttatctagaggtattaaattggtagaattctgcatacttgggaaagacacattacaagcttttcaatacgaattcaaaaatcaaaaccagaatcttcgttaatttctttttcccgcaattatgatctatttaacggtagcgaggatagaaaagaattaaaacttgtaaattttccttactgttgattaaaatacctaaatttgatatcatcatttttaagatgtaacattattggcggatgacacgatatttccaagctatttaaaacctataaataggaggaagtaacagtaacaataacagctacaatagtaacgtaatagtcaggaagaacgatgatctcagtcatttatggatttcagaacgcacttttattaaccgattactctatttagataaggaatctattagtagtttaattctcacatatcaaataatcatctagaaaatcttaatattaataaaatagacttgatagttgtgttatatgcatgtaaaaataaccaagaaaaaaattgcattggtaactggggctaataggggattaggatttgaaacttgtaaacaactttcgcaattaggtattactgttctgttaacctctcgcgatcctacaaaaggtgaagttgcagcgaaacaactaatagacaagggactagatgtaatcttttatcaattggatgtatcagatagaagtaatataaaggatatttttaccaaaatagaagatcaatttggacgtcttgatattctgattaacaatgctgcaattctgtatgataaaaatcaatctactatgaatgcaaatctagaattggttaatcaagcattgacaacaaatctatttggtccatggcttttatgtcaagctttcattccattgatggaaaaaaacggctatggccgtatagttaatgtatccagtggtgcagcttccatgcattatatggagggtggaacacctgcctatggtatatcaaaagttgcacttaatgctttgactagaaaattagcatcagaattaggacgtaagaatgtattggtaaactcggttgaccctggatgggtagcaacagacatgggtggtcatggtggacgcccaatagaagatggttgtagagggatcgtgtgggctgctaccttgccaaataatggccctagtggaggattctttcatgatggagaacccgaactttggtaatgattctaatgaaaagaaaagaaaagataggtcccgcagtctatcttatttcaaatcctacttaaaagcataagactgttttggatttgaaccttatcataaatataaaacaatttaataacatattatttggttagattaccttgatgtttattaatattttatcattgttatgatagttttgatctccactattatacgcagcgtaatacttaaataaaaactctataatggaaaatatgggtcgtagtattccatccttcagacaattaatcgaaattgaaaggatgaattggtctgaatttagaaaagaattatcatctaagagtgataaaaaagcgtttgacctaattttcgaaaatgctaaactctatacatcatatctatctaatgcttgtaatcctatcccattggattctatcattatgggaacactttttcataactataagttactatttacattagataacaaagaaagaaaaaaggttattgacagtaatctaaatccagacttaacttttcaacgtaatggcaaaacgaaaggagacatactgtttgatgagacctgtgaaaaatggaaagacttgataaatggcttacataaggaggacagagaattaatgttaaatatgtactccgatatatgcagaaatgaaggtaatcatagttttgcatacggtagcaaagattcaaaattaaatagttttctatatttctatttcattactcttctgcatcaccaaaaaataatcaatgaaataaaaggagagacatgactaataaaaccacccaagagcaagattatccaattgcttgtgtcaacaattacatttcatgactattaaaaattaatataattgcattatggtaatggaatatgtcatcatcttctctagatcaaattccaacctggagttttaaggcagactatgttgaaacatgtaactgtgattatggatgtccatgcaattttaatggttttccatcaaatggtttttgtagagcactagttttatttcatattcgttccggaaggtatggtagtgtaaatcttgatggaattaatgtgatatgtgcattttcatggccaaaagcaattcatgaaggtaatggaactgctcagttattcgttacaaaggattcagacgaagaacaaagaagagcaatcatttctattttttcaggacaagctaaaggagagggcccttttgcactttttgctactacaataaagtttttcctcgagcctcaatatgtggatctaatagtaaatatagatggtaaaagaagcagtttttcagttccaggtataatagacgtaaaatctgaaagtttcgtcaatcccgtaacaggtgaagaacaagatacgagaatacaacttccaaagggttttatctggaagcttgcagaagctgcaaaaacaaaagtgatgagaattactacatcacatcttaattttgaccattccggtaaaaatgcattgtattcagttatagaatacaagggtccttaatttttaatagttgtagtattaaccgatttaataaaacaaaatagtgtaatctgattggataaagttcaaaagataattttagtttctattatttctgtttctgtcattgcatggattttttccttaaaacaacctgacatgatggaggcaatgatgacattaaatcccatagcaactttaatttttatattaagctggactattggaatggctgccatgatgtttcctgcaattattcccataatattgctatataataaattgatatctaagagtattgacgatagtcataataatcacaatagtgattatgacacaagttctatactgggtaactttaaacacgagtttggtacttctaaaccacaaaaaaatggacgagtttcctttatgtcactgcctttcgatttaccaatcaaaacagctgcattcataggaacttatcttttgatatggacattgaccggcattttccttctagtagtatggtctatcataatgaacagtcttcttgttaactacagttcaagagatattgaaattatcgcgggaatagtgctcctgatttcaggcatttatcaatttagttctataaagcgaaaatgccttggatattgtgaatctcctttggccttttttatgaaaagatggaagggcaataatttaagaagcgggctaaccatgggtctctatcatggactgtattgtcttggatgctgctggccctacttccttcttatgattgccttaggttggatgaatattttttggatgggattatttgcaggtataatttttgcagaaaaagtatggtccaagggaatttatgtatccaaagcaactggaatcatatttatgtcaattggtatacttgcaatgataggaacagtatcgattatacctgaagatgaaaatatgggttcattatatgagatggagatgatggatatgagcaattcaaatcatgataaagaatatggtgtaattgacaatactatgaacatgaacatgaacatgaacacgacaaaatagaatagtaaaatatatttatttatactaaaattcttgaaatgtttacattattaggtttttggggaggaatactgaaacaaaataatgtaccttaaattttattagactgatcagtatgtatgactacaaatagtattccattttggaaagcttcgggggattggtttgacgtatgtaaatgtaagatcccttgtccctgtgaatttgcacaagaaccaacctatggcgattgtgagggcgtacttgcatatcatattcgtagtggaaattatggtaagatacctctaaacggattgaatgcaataggtctaggatcatttgaaggtaatatatggacaggtgcaacaaaaataaaccttagtttcttttttgatgaacgcgctgacaaagaacaaagagaggctctccagatgatatttagtggaagggcgggtggttttatggccgaattggctaaaatgataggtgaaattagaggaatagattttgagccaataaaatttgaaatttcagatgatttgagctattggagtgcagaaatccatggaaaagtacttgcaaaagcagaagctcttggcggcccaatgactccagctggtaagcgggttcaaacaataaatccacccggtagtgaggtgggtccaggtgcagtagccacgtggggaacatctttaaaggatgaagtagatgcaatgggttttaaatggaaaagagaaggcagatctagcaaacacataccgtttacttggaaaggtccataaataggattacacggctaaatattacaatagttatctgcataatcattttctcatccactgcagtaagttcatgactgattcgatgatctcttgtgcttttaaaattagactaatttcttaaagtactgtcctaccactaataacattgaaatttggtttataaatgtcgctccattcattgttgtatcatactttcaaatatttgaaattcaacaagaaataaatatcaaatagatagcagcattggttgttaaaacctgtcaatgaattctttgatccctaaactcacgttctaaatttaaggcctaacatgcaataattttatatattctaaaaaaatgaattagacgattgtcggaattgaaattcttgagtatgactgagaattattattgttatatttgaataaataatttccataatctactcattcaaatatatttgcaaagatgagggggttttttatcgaaccgagtctgaaagtcgtttagtatgccaatgatggaagaaagggcttgagtgtttcttgatagggacccctggtcataaggtttgcaggccaaccaatgcgaaaaccattttcaagcaaccaaacaagaatctcctgatttcgagcaggtacaaaaaaaccaggaccaataattctccgagcattggtaatgagttttaaggtcttcatttgatagagctacagcatgaccaaatattcctatacctgccgtataacctttgaccatactatcatgttctaacatggtggcaactccttgactgatggcatgacgcaactccatttctctagtaaatccatatgctgacatacatgattcattgcataaagaaatatcacgttcgttctcaatcaaaagtacattaatgttatggacgttatttttttctttaagtgactgcccttgcataaaaagtaacggctcttgaaggggaaagcctgttttagtatataaaacaagagagcgaatgtgacttggtgattgcaccaatctaatctgcttgtagttctgtttatgagcctgggctatggcagcgtccattaatatcctaccaatacctccctctgtagaaggatgtactgtcagtgacccaattactgaaaccggcgatggcggaaatttatgaaggaatatactacccaataccttatcttgtcgctctgctaaaactccatatgagtttggattaccaataattatcttgattaatcctatggcatattcttcagagggttgttcagatggatagccatgagatgaagaaatagatttgtgagcctcctacccaatcttttcacaagcttccacatcattttcttccactagtctaatttttagactcatttatacatgtatattatctgattagttattattatacatctatttagtatccaagcctggcatgtgaatctatgccttttatagaatgattccctttacatcggtttgatcaaccgagtatagtggagataattagtttctaaaaagattcttaccaaggtttagtaaagatgatatgagttttggatttgattctaaataacagtaatttagaaacagtatctataaatcaaatacaaatgatgaaaccaatttaacagatttcatgtaaacaaattctcatttttaagtttttgaactcattctcatgcttttttatcataatttaatacatcggtaatagctatttaagggataatgttctagtctaacaatgcgatacctgctaccttcgatcttaatacttattatactaataactcctgcaacccaagctgtgtatgcacaaaatattttagatgaaattagccaattgtttgacagtttgacatctggacttttaggaaataaaggatgatgaccagtcttcgaccaactcttctaatgaatcggctgcacttcaacaatccgtaagtcaaagtcggctaataatcacttattaaggtaaaaccaaataaataaaaaataataaattatttcaaaatactgaaagctaatttcagaccaaatatccccatattcctctcattgaagagtattaagtccccaactccaaagtaaattttgaagaccaatttcttattcttaatagatcttaatccataggtatgtgcctatgttgtatatttagaaaattaataaaaactaattgaccccttttatcttattttcaattccttaatctaacaacaagatttgggtattactgtttacaagatctgtgataatattgttgctaaaccggaaacggttacccttagtaaaaaaattattctattctatatctttatttggaaaaatttagattgttagaaaataatctttgctgcccaaggggataatataaaaactttatggaaaactattacaaattttttaaatagaacaaaatttgcaaagtatattcaaaaattattatatcatatattattactaaaggaatcaagaatagaatgttaaagtcaaataacacaaaattaaatgcagtattagttgtagcagtatttgcgatagcaatgacccttggtcctgcaatatctaatttccagacagcatttgcacactacggagtagacatagatcaatgtaaggatgacgaagattactatgaagataatgaagaagcatgtgacaagaacttaagagcacattatgatgacgattatgatggtgattttggttctaaatccatagacgacgataatgatgacaatgaccatgatgacaataacggtaatggaaacagtgcttcacaaggaataggccaatctcaatcgtcaaaacagaattcccaatgtgtctctggtgacgatacaaatgactcttgcaacaacgtaagtgttcaaaatcaggacaatgatggaaataacgcactaggccaacaaggcggcaacggaaaaggcaagggcggtaatgatgcttcacaaggaataggccaatctcaatcgtcaaaacagaattcccaatgtgtctctggtgacgatacaaatgactcttgcaacaacgtaagtgttcaaaatcaggacaatgatggaaataacgcactaggccaacaaggcggcaacggaaaaggcaagggcggtaatgatgcttcacaaggaataggccaatctcaatcgtcaaaacagaattcccaatgtgtctctggtggtagtttgggtaattcttgcaacaacgtaagtgttcaaaatcaggacaatgatggaaacaatgcagctgctcaagatggcggcaacggtaaaaaaggcaagggcggtaatgatgctgaccaaggaataggccaagaccaagacagtgaacagaattctcaatgtgtttcaggcgaagatgcaactgtttcttgcaacaacgtaagtttccaaaatcaagtaaatagcgggaataatgcgttagcacaacaagactgacatccaattttttttattggtctttttaagaccgcattaatttggaaacaaatctaatataccaaaattttcaatcttctaattaagcaaactacctgattcattcctaatcatctcgtgtgatatcttaacctgttttaatttcttaataaatactaaacagacttttgatctgactttcctagttgttcatttttaaaatattccaatttttattatcaaataaaggtcaatttacctacatgaaaccatgctactagattacctatttaatatataatctataatttgaagcatgacacatgtagcaaaaataatagaaatagtaggttcatctgacaagagctgggatgatgctgctcaggtagcattagctgaagcgacaaaaacaatccacggtataactggaattgagttaaccgatatgacagctagggtggatccaaataccggaaaaataactgaatatcattctacagtaaagatagccttcggagtggaacattcctaagaattagcagattaggaactttaatatccatttttccataaattggcatgaattttttgccgtaatacgccttgggtagagagaatattgattgtggttttttgaagatccgtatcttgatatatttatcaatataagaaaaaaaattaaaccagattgaatagtctgggtatgcacgaacttcgttatatactatgtattgacagcctgtagttatccagtctattgtatttggccgtctactaatattatgatgggattcgtcaaattgtttaaaaacatcacatgattcgctgttttagtatatgatgattttctaatatcaaaatagtaagaattcttaactgacatcttgatatttcttttattctaaatgattattttgtgtttgtgagtaaaaaacataatattattgcaaagttcattgtaactttttttataatgacaatgggattcttgtcatctatttctacgccaacatcatttgcacaaagcgttggtatgcctgatcttccatttcttgattttaataatgatgataaattggacaataatgaaattttttatggcgatattagcgatgaagagaataacaatttagaaaaattatacgagataattccaggtctaaatacaaaagacaatagtggccgagacaattcagattctaaaactggtaataaagatgccaatgaaaggtcgtcaataaaggatctataaattcaaaaaataaagctgaaagcgaaattaatgattatacagtttattctgatgatgtagtatatgacatcgacaactcggactctggaaatgaaaaacataaaggaacaacagcaacaactcccagcattcttatctctatcttggataaattaccttattccgatgttttatcaagttctttgttaccatcatcatctccatcgccttcttcctcagaatcccctatgggacaggtaataccggaccaatatattgtggttctaaatgaagatgctttgaatttgcgtgacattctttcagaagttgcaaaacaggtaaatattgagggaactgaaatactctatatttatgaagatgtattaaatgggtttgcgattagcgttccaaatgaaagagttatcgaggtgctggaacaaagcccatttgtagattatatcgaaaaagacaagacagttaaagcatttgctcaaacactgccaagtagagtaaatagggttgatggcgatctaagctctacaaagtccggtaacggtggtggagccgttaatacagacatagccatcctggatagtggaatacatacgagccattctgatctgaacatctatcaccagaaaacctttgtttcaggtacgtcgtcaggaaacgatgataacggacatgggacccatgttgcaggaattgcagccgctaaagacaattcgattggagtagttggagtagcacctggagcaaagctatgggcaatcaaggtcttggatagaaacggttcgggtgccttatcgaccataataaaaggtattgactatattagacaatatgcaagccaaatagaggttgctaatctcagccttggatgcgaatgtaaatcctctgcttttgatactgcgataaacaatgctgtaaaggctggaatcacgtttgtagtggctgcgggaaattcgggaaaagatgcttctacattctcccctgctaataaccccagtgttatagctgtttcagccatcggagatagtgatggcaaatgtggaggcacgggtcctagcacgggttctggaagagatgacacactagcaagttttagcaactatggctctgtagtagacctcgctgcacctggaaccaaaatatactcaacttataaagggaactcatattcaacaatgagcggaacaagcatggcctcaccacatgttgccggagcagctgccttatatgaggcatcttatcctggtgcttcacattcagaagtacgcaaagcgttattaagcaatggatcaacatcctcaataacctgtgatggaaaaggccgtggctgctttactggtgatagggatagttatagagaaccattgttgtatgcgagaaactattgatggtgttattaatgctaatatttatcacctccagtatgtaagcaagtttagatacagaaaaacgaacgcgtatattttatcttaattttattattccctgattgatagccggaattggaactcgaacttacgtctttcggacgtaagttccattaataagatcactgattagaatagattaaagcacgattataaagaggagggctactatagcaacatacatcctgttatacagagaatatgactgcaacaactcttttagatactaataaaactatagatacgctgaaaataaaatggaattttacattatcataacatagttgctttaactcttctatttatttgtcaagatacttttcttctaaattttaatgaattggttatactcgtcttattcatttcattgtaattgaaaattgatgtcttagttatctgtttagtgcgtatatctaaatattattttgataattataagttagactaaacatctgtattatcaagtttgtcgaaatttgactcgtaaccattacagcatccatgtggggcaattatattatatagttttccaaaaacatcgggaccttctttgtctactatcatacattttccacccaaagaatcaatccaataaatacaattatagtagaaataacctgagtgcagattggcatctttaaactcttttcgttcgacataagccgattttaatttagatagcttttgaagttttgttatattcccaacaacatctgcagccttttcaattatgtttttatccgacattttatttaatctccttttcgtttggtgtccaaagcgagcagataccataaggtgctattacatttgatacattaccgtctacatcttgtccttcatcggtaacaattgcacagtgattggatttcataaaatatatacaattatagcaaaagtagcctctatgtgtatcagagtttttaaaagcagaaatttcaaaatatcctgaggataccttggtccatttattaagctataatgcttcctgtggtattttttgggtagatataaaattagaatttgcactcatgagtataactgtgaaacatactttaaatatgtaaaattatattacttatagttcagtaaaagctatatctaaatactaaatattttatcatttcattgtatattgtaattttattaaatgagattgtacatgtttaccattggatagttataaacatgaaaaacaaaagcctttccctattattctcttttaactaatcctgttgcactaacaacttctgatgcattattatatactttatcttctattcgtcctaataattcagctatattcttatctgtattatcgcttataacagaatttactattgtatttttggatgccggataatcaagaccttttaagatattcgctaactccattaccgatgaataatctttaacactgatttcattttcctgtccacgaaggctattttgctcatttgctgttgcatgcgaattatagtcattactcataactaattgtatcttacatagtattaatacagtgattctatgtgtgtaatatttaaaggcgtttttaattatttattatgaatgttggcctaataacatagttaaacaattgcttgatgaagtagatatattacaaattattatcatcccaaatcaattcttttacatcatacgtagcaatataactacaatgtgagcatctttcttcagttgcagatcctgtagagtgagcagttttaagataatcctctcctgcaaatgctactccttgtattttaaaaactctcccgcattttttacattttgctgttgcattcatatgattaaaaaatagtatagaaaaaacattatataattaattaatcttaaagtgctaatttttgctaatatttaattttttgttattttctgtctgactttacttatacatatcctgaaaatacatagatggaattatgagaatttcatctcactattttttgctttggcagtatatcagagaatctacggagctatattaaaaattttttgttagcatataaaacgtgattgtaaattatatgataaatgtaataggtatattcgaggtattactatatgatattcaataatagtctgaaagtatcttttttaaactattttgaaattcctgtccacgttgattatctatatccttatctatagtcgtccgctcttctgataccaagttattaatagccttgtctgtttcggccactccaattaatgctttatttagcctattagataaaaaaaatatagtagaaaaaatataactgattttatcattatcaaattctaatgtagtagagggtggaaaaatcgtatccagcctacttctcaattcgttgccacattgttctatacatttaggatcgcctttacagctctgtaattcttgtgtccatgatgccagacattctattatttcagtcgaatactttgtcataataatatcaggtacttatagtacttatagtacgatcgagtatgcttatctagatctgaatctatcgttttgattcatgaatcaggttaaacgaaccaataattattattaagaagagatatgattaagttattaaaaataactgttcaagttataccatcatactattataaatttcagctccgtaaagttaaggatatttattttcaatttttcgttaaactgagttgaatctaaagtgaacagatccagaaaaacaaataaaagaataaaaatctgaacaagcattttcatgtattaagttgaccggtacaaagcatgatttaagattaagacctggagtcatagatgatgcaaaggagattggaacaataatttttgaagcattttcagagattgcagataagcatggctttcctcgtgagtttcccactgttgatattggaataaatgtagcatcttattttctctctaatccgggattctattcagtagttgccgaagatacagagggagggggtaacaagataataggaagcaactttttagatgaacgatcaaatatagtagcaggggttggaccaataacaattgatcctaaattccagaataaaggggcgggtcgacagttaatgagcaatgtaatggagagagctagaagcaaaaaatatctggcaatacgtttgctccaagcgtcatatcataaccgatcacttgcactatataccagcttaggatttgatgttagagaaccaatctcaacgatgcagggaaacccaatttcagcagtcattcctggaagatcagtgcgggtagcaacagagtcagatttggaatcatgtaatgcaatctgcaaggcaattcatggccatgatagaaacggtgagttaaaagatagtataaagcaaggaattgcgaaagtggttttacacggggaaaaaattactggctatacaactggattgacatattttaaccactccgtgggttttactaatgatgatcttaaggccctcattgcctcagaaactgtttgttatggaggaccaggtattcttattccgactagaaatgccgagttgttccgatggtgtcttgacaacaatctaagactagtccatcaacttaccctcatgactattggaatgtataacgaacctgcaggatactacatgccatctattctatactgaaatagtcctagatcgatatctatcaatagtatattcagtttgaaaaacgagataagcatcttaagcttctataaaaactgggatctattttgtaaaaatttttaataaactactatgcttgatttgtatcatttaaaaattcctctatggccttatctaattcaactggattatgaagtatcagccaatgaccctctccattaatgattttaaatctgaattttggaatatcttgtttcattgttttcttaagatttaaaaatacatcatcttcactgcctacaattccaaataatttacaatcagaattttttaaaaaattatttatatcttttggcattgtcctcaaggcatttcttgaagctataaatccttctaccatagttttcgtaaatatttctttaaatcgattccaatctttttcatcttgaaatgctttttccttttggtagtttatctgccgttcatactcagctactgcagccattccctttgtagacgctatttctatcattttggaatcttcaagatcgtcttcagggataggaattgatgagccactgataaacattattgaatctacaacgtcaatgttcttttttgcaaaaacagcagctattttcccaccaatcgaatgaccgattaaagtacatttcaaaatatttagatgctttagcaatttatccaagtcatcagcgagatcttccatagtgaaattagctttctttcccatagaggatctgtaatgaccgcgtagctcgtacgaaatgattctatattttccagatcttaaaataagggatatttcttcttcccagatcgatatgtttccacctaatggatgaattaaaacaattggataacatttttcgtttccataagtttcatagtaaatttcaagatcatcctctaaaaatataaaaggcatgtagttaacaaattcagttttagattgtagatagcttcctctagaaatcataagtaaatatcataaagtttatcagtatctgacttacatgacattgcctcaatctaattatttgtattttcaattttgtatgtcctgcatgagactgattttgtctttattagttaataattgtgctgtgtcaatttttttataatataaaagttcattagatttgcatgaaggttaccaaaatattgcaaactaccttataaataatagtgtggattgcggaaattatttaaaaatatggtatgattccctgttttaggcgccgggagtgggactcgaatctacgtctttcggacgtgggttctaacaatttatctttagatccactagttaaatctcttattaaaggaagggaaggagttcgtatacatgttaagtagtcatggtttgcactcatccattgaagtcaatttagataatatggtttcttactacagtcgtctcaatctcatattttctaaaaacaatatttagatttgatatatcaattcctatagaactgagataatttgacttctcttgagatcgattcaatatcttgcgattattcgctcatatatagaggaatgatttctttgtgaaggattattgaattttagacctttagaagcctttctaagatccttattagttaatacctttttcttcttgtatatattattcaaattatctccatctgtcgctccgatattattttctcctgtttccttactggtttgctgtgcttttagattacgatcaagagactggtttaaatccagtacgaaagtgtaactatcatcactggttatcttttaatactctaatttttgatttctttttcatttattttcaccttttcgaacaatttcggagtttctttgaatttgtttagcaatcttcaatcaaattgaaaataaaccctctaaggaataattaacaataacgattcaattactagctaaaaaattactaaacagaaaaattcaaggaagaaagtctaacaaattgttctaccttttaaagaatctaaatataattaaaattttctaattcttctcggattatattttttactaaaaccaatatgaattagctccatgatagatgaagttcttattcattggcattgatatataactttattatgaaagggtttcaatcacacatacgtatgaaatgtgcagattgcaattgcttaccagatggatgtgcacacagtacatcagataaagagtgtattaattgtagtttagagaaatgttgttgttggtacgtgataaataaatgataattgcagcaaatcagaggctagtctttcatcatttgtataatagttaatttttttattcgctgtctaaaattaaaatatatgactgactgatatacgtttgagctttaatcttgattcataccgttcacatcaatgtctttaatattgaaccgttaaactgtttgttaaacgattaaaggatcacaatttatagttacattatatttgtattgcaatgtcaaataatttctttaatagaaatataaaaacttcggttggaacattgttcttcttggttattttttttagcatgataactatgccaattctgagtgttaatgcacagacagaatcacaaatgaatatgtcaccacaactaacttcttcagttctaaaattggcaaataccaacgttccaattgatataccacttcttaaaggatacgagaacggaaatgaaatttatttcattgcaacagatgtttcagatgaaaatacagcatctcttcttacaaataaaacaggattcaaggttaattacgctcctatcttgtctcaaacacccgagtccgctaaaggtcaggtatttgtatttacaaacggaattgatggaaatggatctttaggatttcaaaatgaagtaatgaatgcaaagccaggagataaaaactatagtccgctatttcaaattaatctagtaagatggaatgataatgctaatgtaagtgaaatcagatcaattggacagttaaatcaatcattgcaaaataatgagttaaccataaacaaaacagatattgttgctaatcatccagccattcaatggaacaacggttctttaatgattagagaagacagtacgaacatacatgatgaaactccatatatgggcggtcaagtattggacattaatactgaaaaaatgatcgtaacaatggttgcacatagaggatggggaccagatggaagtaccatttattatatagttactgatgcagctccaaagatgcctgcagatatgatgggtgttccttttgtagaagccgattctcagttggttggtaaaggagcagtcgatctattccagtttacaaacggaataaatggttcaggtcctatgggttttcaagctggtattggagctgctaatccaactgatgagagctacagtccaatgtggtttattaaatttatagaatggaaggagccatcacaggctagagtgttacagactttaagcgatatcactagcctgcaaagttcaggcgccatagaaataactccagctatggacggaaaacatgtagtcaactgttcattctttgacgaagaaactgtactaaagcataagagcaaacaaatgggattgtaaaataaacgaacaaaacatacctttttgtttcaaaaattgtcatatagaaagaaaggaaaaatcgattaatatcatttaactgaggttaaagtatacatatatgcaaagaacattaacactacaaattgcaacttttggtcctaatgataatgaagcaattgttagtggaataaagagttttccagtacataaacttgcaattatatgttttgattatgataaatcaaaagcagaagacttttcaaggaagattaaatcagcattaggattgcctatagatctttatctagtaaatgaagagaatgttgtccgtgatacactagagcgaatcaatgaaatattgatacattccaaagaatacgatcaaatactagtaaatgtaagctctggagaaaaattactgggatgtgctgcattatcgtcttcatttgtaaacggtattaaagcatacggtatggatcgtaccaagacctttcctattttaatgcctgttcttaaactaagttacaatgaaattgtgtctgaagcaaagataaagatattaaaagcaattgatcaagcgggtggatctttggatagcttagaggatttagaacaggcatctggttttggcaaaccacttttgtcttatcatgttcaaggtggaaaagacgccaaaggattagcttcgcttggattattagatgttgaaagaaaagagagaggtaagatttctgtcagtattacagtgttaggaaaacttttgataagcaatagtagtgactctgcttttaagacatcaaataataatgcaaatgcgaaataaataatagatagaaaacttgttatcattagctaataattaatcttgaaagttttgtctgacatactgattattgtgagaaaacattattcttattttcatcatctggcttttcatttattctctgttctttaagtttttttaaaatcttgttgactctgtactcttgatgtaactttttaatacctttcatcataattggagctaaaatcatgccgactatcatgcctaacgacatatcaataatattgaccattaactgcttcaaaataggataaacctcgaccaaattaaattttgcaaattatcaatttgtttttctctcttctggttaacaaagttctcaatcaatatgcgttttatagccgagtaaatttgaagctcacaaaaatagggaatacaaaaaaagtggaacatcgggataagtagtaggatgggatttgaacccgtttcttgcattcacgggtttatgctttaacaaataaagacattctttatcttcaatcttgaacattgagactgtattcatgataaatatcttttagtattaataggcgaattgaacctacagaaaagctcctctagaattaatcttctaaattttgatagtagcagatgtttttctatttattctgaatattcttctttatccattcatgcttccaacaactgtagcaagtgccaatcctaagttgattcagctttcagtttatctcatattctatcaacattgagagcataacaataggaacattaaaggccatatatttcctgagtattgccttaagtatataaaaaaaggttattgaaagaaataatcttccttattataatcagaaaagtgaccgcatttagtacagttttctgaattattagaaatagtactggcctcaagagaatcttcgcccatttgaagagcagaaggatgttgaaatccgcattgcttacactttaccatcattgtcatgataaaaaataaacaatgatttcttatatgtaattcttgtttgcaattgcgtaattaagataattttaatttgataattgattatccgttgatcaattacctctgtgcgttaaaatgatctggtattaaatagtatgttgattaagctattctacttttatttgatgtgtcagattctgaggagtttgagcaatgaataaaggggtaataaggctacaatcatgtcataagttagccatcgaattagtcttccaataagcactatcatgcaacccgcctgatagtctcgtggataacaaaaacatgggaaggtctgaggttctctatgtattagagatgccaagtttactgccataagaaacaagacctttattgataccttattacatttgaaaattgttttgtatatattatatagttataaatatacaattaagaaaatataaaaaccattattgctatactaatatatgtctaacatcactaacacaggtctaactaatagagcgtatgatatactacgaacattgggtaaagatgctgactttttatatgatactatcggtagatatatccaagatgctgaaaaggacggacgacaagatttagttgatatgtggaaaactataaagcaagatcgagaaaaacatattagattattaaaagatgcattagaaaaagaaattcatcaatagatcggacatatcatcaactttttaaaattttgtagaaagtcaatacactttttatattttaaaagaattgggatattatttcttaatgtttttctaataataaattcaccttaacagtaggtttgcgtctttcagtaatccaactactagttgaggaatgtaatataatacaataacggatctttgacgtgttcgttcgttcaaaaattctttggtaatcgttttagtaaataaattaaatttaggtttaatttatgaaaaaatatacttatcttcatatatttgtaataatactaacgaattacctattaaccgtaacaatttattacgtagagatcaaccctaaaactctcaagaacatagagactgcaattacgatcaaaactattgaaatcataaacttcatagttgactcatttattttgttagtaaactttgatcccaaaaatgctcctagcatagcagttggacccattaaagttaggatgacaaaatctatattattatttatcaagtgtcctattactcctactgttcccataaatgctgatgaagccagattagttcctattgcaattcttgcgggaagttttagaatagatatcatagcaggcattctaatgcttcccaatacgagtcccaccattccgccaaggagaccaacagctaatccgatcaccatttctttgattatttcaatattttgctttttgttgatatagtctactctcgttttgtttgaatcataatctgctgcagttaggctagtattatttgaccatgaacctgttagattggtattactattcttgtacgcttttttcccaacttttccagactttatcatcaaatcaattgcctcatacgatacaataattatgattatgcttaggaggattacaatggatactaaattggtcaaaaaggacccaacaaatgcacctaatgctccagagaatgcgattactagaaaaatttttaaatcaatgttgttttggcggtaatgacttattgcacctgatattgcaccaagtgtacttatagaaagattcgttccagccgtaattgatgctgaagtttcagcttctaaaataaacggaaatcttattactcctagaactagtccaaccattcctccaatgaatccaataactccacccagaactgaatagagaatcatggcaaacacatccatcgctattgttcattgactgatgtcctaacaagattaaaatgtattatatcaaatgacccaaaagaaattataaagaaagcattgaaattttggaataattagcatattctattattatatttgtaaaattgattctaaagaattcaacgagtcttaattagactacttgaaccttatgaattgtaataaagccattatcacctatcatctgttttagtggtaataacaaaggttctattttttctttctcatctattgattcaatcatcataggctgatttatcattaatccttctaaatgaacagttgattttcctcttctaccaaatccgtctattcctaaccaaactatagcgcccaaaacatttgatttcatcaaaaaatctataatagttttctcaagtctttttccatttacattatcatttttctttatacgaatggcaagacatatcatttcttttaatgtcattattaacaggttttattgcagcaattgaattattaagattcttcctccataaagagccaagaaggacagtcctacatttgcaattgtattaatcatcatgtttagaatttgtttattttctatcattacaatattttctagagcaaaggacgacatcgtagttaaagacccgcaaaatccaattgctactaaaaaagagtacctttggtcgagattccaattgactaataatatagaaaatataccgagaatgaaactgcctataatgtttacaatcaatacgtttgaacctattattcctagaattaaaggaaaagaggtaattttataacgaatataagcacctaaaactgctccggctgccaataaaacaaactctattccttttcatgaaagtgagtggttttttacacacttatttttttgcctagatatatgaaattagtatcaatgggagtataacttatttatttattcgaccattttctcatccattgtaacagattgataatggatcctacaagttcttgtcctttaggggtaagacgatattctactctgggaggaatctcattaaatgattgtctgttcagaataccactcttctctaattcctttaagcgtattgttagagttttactgctaaagcccttcattgattttctaaatgtgatatatctaacaggatcagtagaacaacataaaggtatcaatatttcaagtgttcctcttttagtaattatatttctcaattgagacgtttctttcattaaactttcaatatcataaccatagaaattacaaggattattatcgtcctcaagttttggtagtttcgatgattttagtattgctttattaggtacgttttcttttggtttccgtaatttcacttactttactattttactcttaccaatttatatagtttacttggtaaactaaaggtaatgagtaaacaatcaaccataaaaaacaagattaaagagcaatacagaaaaatagcattggcggagggttcgttatcatgctgctctacgtcatcaggatgttgcggtactaacgaggctttgatatcacccatagaatcgtctaaaacagtagggtatgatcaaaacgatttgaaatccattcctcagtcgtctatcctaggtttgggttgtgataatccatctacctttgcgcctcttaaagagggagatatagtagtcgacttaggttctggagcaggtattgatgtatttatagccgcaaatattgtcaaagacaaaggaaaggtcattggtatcgatataacagatgcgatgttagagaaggcaagaaggaacgccgaaattcacgggtaccagaacgtagagtttagaaagggtgacatcgaggcaaaaattccagtagaggataattccgtcgatgtagtaataagcaattgtgttatcaacttaacagaagataaggtcaataccttcaaagaaattcatagaatcttaaagccaaatggagtaggaaatttgataatatcggatgtagtgacctccagagaagtagaaaagacgttaatcaatgaggctaattggtgcggctgcattgacggagctttaacaaaagataattacttggacagtattaaaaaagcaggttttaccagcgttgagatcttagaagaaagaccaggtaacatagtagaggattatactgaggacattgaaaagaagaccggaaatataactagcataactgtaaaggctgtcaagcattgaatatgagactatgaactttctacacaaaccaaaagagtatgagtgcatacagagaaaacccttttttatttttagacaatttttcctatggtttccgtaatttcacttagtttacccaatttctcttaccaatttaaatagtttttctagtaaacttatacttatggataaacaattacatctaaaagaaaaaattaaggagcagtatggaaaaattgctctagatggtaattccaattcttgttgtgtgccctctagtgattgctgtggtaagtcatctgagattctcagttcaccatttgaatcatcaaaagctgttggatatgacgctgacaaattgaatctaattccggaatcatcagtgttgggagtaggatgtggaaatcctactagatttggtaatattaaagaaggaaatacagtagttgatctgggttctggggcaggcatcgacgtatttctcgccgctaatttggtgaaagaaagtggaaaggtcattggaattgatatgacagaaaatatgctcaaagaagcaagagaaaacgctgaaaaacatggatataaaaatgtcgagttcagacaaggtgatatagaacaagaaatacctgttaaggacaattctgttgatttagtcataagtaattgtgtaattaatctgacaacaaacaaggaaagtacgtttagagaaatttacagaattctgaaatcagaaggaaaaggaaaaatggttatatccgatttagttacatctagagaaatagatgccgattctattagtacagacagttggtgtggttgtatagatggtgcattaacaaaagaacactacattactagtattaaaaaagctggatttaccaacattgagatactagatgagaaactatatatggaattaagtgaagacagtgaccaagaaaatccagaaaaaagacaaattactagtatctccatcacggctgttaaagagtaaaacgattagcgagagaagtgatttagatgaaattttcatttggcaaaaaagatcataatgatgcaaaaaaaactgtcctgtttgtatgtgttcaaaatgctggaagaagtcagatggctgagggtttctttagaaaatatgctccaaaaggctatgaaactattagtgctggtacagttcctacttctcaaatcaatcctattgcagtagaggtgatgaaagaggctggaatagatattagcaaacaaaaacccaaagatttgacagaagacatgatgcgaaatgcaacaagtattatcaacatgggttgcatggatgataaattctgtcctgctttattcataccaaaagttatagattggggtatagaagatccaaaagacaaaccaatagagaaagttagagaaataagagatgcaattgaaaaaagagtattggaaataattgattcagccagagacaataaaattccaatttaaaatgctgtttatttagttcgattaaagtgatattctgacaataatcgattttcatgtcaaaggaatctacttttgaatctgtagtcgataaactaactgttaatcaaaagaagtttgtcgcagaactcataggaacctttattgttgttgttttagctacaggttcagtagttattgatgcaaagttaaatggtgttttaggtatacccttcattgcatttgctcctttcgtgggtgttgcaataggtgtatatctttttggaaaaatttctatggctcattttaatcctgcagtatcgttaggattcttgataacaaagcacatcacaagaaagctacttgttttgtaccttttagcggagattgtcggtgctttgttagcaagtctttttgtaagtattgtaataggtaatgaggctaatctaggagcaaacgcccctaattattcatatcctttacctttgatatttggaatagaagttttggcatcagcccttttgatggcggtgatattgactgttgtttatacaaaaggtttgaaaggattcggaggtatcgttattggagggattgttggattagatattttatttttggcttttatatcaggtgcatcaatgaatccagctcgttcattaggtccagcagtgttatctggagtatggaccgatctatggttgtactggactgcaacatttgtgggtacttcggtgattgcattgttctatagaaaaaagggattgaatgaataacaaatattgatctactattggtaacatccgatatgcactgccatttgatttgacctgttatttcgcatagacaatatttgatgtacatattataatacgtctattaaatatcagagtttattaagacaattctgcaatatttcatagtataatttttctcaaaaggaaagaacctgttaaatctaaagaatacaaaaaataaaccagacgaatttgggactcgaatctacgtctatcagacatgggttccagccaaaaaaagtataccttcttaaaaatcgcaacttacccctggttttacattttattcaagaatattcaaattgggatagaatatagtgtgagaatatgaaaataaagtgatagataattagacgtcgatttcaattactactggacaatgatctgatgacttgggctttttttgacctatgccttcaaatcgggggcctgtatacttatcagcacttaacggaagccctttgcgaataatctttggtatagaagataaattcacatccgccaatgtcttagataaaagtatgtagtctagttgtttgtaggtttttggatgtccacattgcgaattacctgcataataatgggtccattggtcctcagagggtaatctttttactacattttcaactttattccaatttacaatttcgttaatgcctgtttttccttgagaatcggtttccagataatcattgagatctcctaatataatataattaccatccccactaggaaattcgtcttctaccagatccttgactctttcagactgaatctgtctctttctgtgagaattactcctgccattacatggatcatttttatcaaacattgatttaaaatgatttacaaataatcttatccgtttattatctggtagaacaacatcacattctagacaatcccgtgaaaaggtataccatcttatttctttgttccattcatccacatgagtatcaatattctctaaagggtatttgctcataattgcaacatctatgaatctcggatcgttaccatccaataccatgatatgatcataacctttttgcttgagatatttgtttctaaatcgacgcaaggccaataaactctccacctcttgtaatgcaattacgtcagctttagtctcttttattgccgaagcagtcagttttttcgattcctcattatttatcgtaaagttagttctgtctgcaagccaaccatcaataacggcgtcctctggtttaacatccttgttaaacttaaagcgagcaaatagattttcacaattaaatgtggctatgcgaatttttgtcatagaattacaatatcaattaaatatttaaattatttggtctaaaagtcaagttgtaaaagaagttcgagactcgaatctacgtctttcggacgtgggttctttcaattatcacattacataactaattgatagagagtacttaataaaatagaaagaattttagattaactatatggtaattcagatgaaaggccgcttaaggatgaaagtgtttgacctaaatctttaccacctgtagtccatacaattaatgtttgtgtatctcctgttccttcttgccctcctctcaagtctttaaagtcatatgtgttatcgacagtaattcctgcacctgttatctgtgtaatatattcgccaatatcttgcgttggtatcatcagaataccgactgtgtcaatattgctagaatttgaagttgttgcagcgtctgaactagaggatgttgttacgggtggttgtatattacctacagtaactgagccagtcattgttacacctgggtctccttctgcttcatagttaaagacaccgggattactgaatgtaaatggtggagatgcttgactatcaataatttctccggtgttaaatactgtattaccactagcatcttttacatctatagcgcgttcatggccagcatcaccattaaaccattgtactgtagttccagtgttaactattgcattttctgggacaaagtgttggtctaagaaacgagcttcgttgtcttcaccagcagcatgatgaccttcatttgggataagaataacgagattttttatattgtcgcccaaagtcattgttttggtattaaagatactttctgcgttgatgtttggttgaccttcagaagaatttgtttgtgcaaatacatcgttagataaagcaaaagaaacgactcctgatgaaaataatatgccagcaatagcgaagagtatttgaatatttgaaattttatttttattatccaataaaaaaaggagtttttgaaggtacataaaagctactctcattctagagaatgagaattatatgatagtttattaataggaagtgagattgacaacaacaaaagatcatcttttatcttgtattcaaattttcctttatgaccattttttctatctgaatttggagtttatcctagtcacacaaatcctaacaatggccaaaaatagaagataggattagtcatgagaagctggaagtatttgctttcttggatatccttgcgatagaatggcctgttaataatatcgagagcctccattggccattttaacgatatcatcttcttgtctgattcaaatgggtgtatgttaatggggttaatgtcatcattttcgtgtatcacaacaaaacaattcattgtttctcttctgtcattgtctattagaacgggattggttccatcaaacaacggtatcatataattattgtttttcactggatttccatttttcaaaatggtgaaagtttttcccctccctgaaaggtcaaatcctacactagcattctgaatgtggtattctttgattagcttggctgccttaatccagtcaaatacttttactgatttatctttttttatgattgccattatcattatttatttgatcctcctcattttgacgtgacatatctttgttatcctcctaaacgaaaattctctatttaacatttgacgatttaatatatggataaatgtgagtatcaaaatggaattgaacccgtatgcctagttagcaggctatcttctatagcatctaattgaatagaaataattattgcatttgcatgatagtaaataatattatatacatacttgtggatgttttccttgcatcatttaggcttggtgcttcacctgggttaatcttggaaaagactacctggggaaaatcactctcatatctagatcgactttattctcttgcctttaaacctaaaacattgattagccaatttataaaatttatacataaatattgcatatcttgtaactaatcttgtgagattaagatatatgatgaagttattttttgattgtgaatcttgtaactacatcgagtatttcatctatggaggaaggttttcttaagatgtatttagtaccaccattcatcatttcatttatttcactgttctgcgtggatgaagcagtaaatattattacattatttgaatttaacatattctcttcctttagtttgttaaaaacatctaatccgctaaattctggcatggccagatccaataaaattacatcataatatccatccttctttcgtatttcatctaagccatctatccctctattaattattttacattctatatcttctgtttcgaggtagtcttttatcaactcagttatatcctcattatcatctataataagaactcgggaaataggtgttactgatgatgatgatgacgacatatcaggactcgttgtatctttattataaccgaattcttctcggtttaaaaaggtattgtaaatctaaaggctgcaccatgattatattctttatcaatccatattttaccaccgtgtgcctcgattatatctcgatatattactaaacctaagccgtttccaccgtatttccttgcaagagcagtgtcgatttgattgaacttgtgaaatagtttttccattttatctgctggaatacctggaccattgtcttctactgaaaatatgagatagtttttaccagagtttgaacattatctgcttcctttaattcctctacttttaagataattttcccggatttatttggaataaaatcaagagaattcttaattaaatttctgtgttttatttcatgttcactatgttttgaaatctgttcaatggtttctgtgggcctaaatattttaccataatacatcattaatgctgcaactacatcaattactaatccaatcacaattattaggtctatcatagtgtcaaaggcgacacaattttaggtagaggttaatttgatacactgttgctgctgctatttgcaacaaaatgataaactagcggaaccatgagatctgttttatcattatcaacggttgtaatctctacatctatttcatattcacctgcttctgaaaataatggtcccttaacgactatcttgcccgctggatcaggaacaatagcgttggtcagtacatcaaacgtcccgccaacaatcaagtgcggtgaatcgctgtctcgagctaaaattgtcaagtcacctgtgtgcgaatgaaagaattcagagagctttaattgatcactatttgatatagttagtctataggtaacatgttggattaattgtcctgttttctgatccatcaggtgcatagttagctgagcatcttggtctgaaattattttctttggttcgattgtgagattcatagagatgcttcgatctcctaatgttgccattggaggtggtgcaccatgatgttgtgcaaaggagggttcggtgttagaagatattgctgtagttacgataaggaacatgctcatgacaataattatcagcgacttactcaaattgatattcgattgtagtagcattgctttaattgcaactctgttcttatggcacatgggatctatattctccaatgaaaagtctgatcctagaccaaatccactactcattttatgattatcttatctatcatccatggatgtaatgtacagtaatattcaaattctccttccttatcaaaaacgtgtttatacgaactgccatcacccatcaagattccagaatcaaatactcctgtaggaccagtacctgaattacccgatgtcactgtatggggcatattggtgtcgttattaacccaagtaacctctgtacctacttgaacttcggcattaggaggatcataaaaaatcttactatctggacttgaagagcctgaaactattgatatttgactagaattggaatttacattgtttgattctgtgatgtttgttgccaaagtcttgtctacggctagagaaaggtcttcaccttgtttttggatgttttttgtttcatccatttctttcattatctttttttctgctttgtctattcctttatgatccgactgtgcgactattattggattttgtagttttttttgcagttcatattgccaattaaacatcgatacactttctgttaattgttctgaggtgttgttggattgttgttgtgggaggttggaatttgtagcagtattactatcattgccgactcttgaattgagtccttctgataactcattctgatcaaatacttttatctgtcccatatttcccttttcttcttgaattccatgagtatggaagaaatagttacccgggtatttccatttggcttcgattattgatgcatcgcctggtgctactgagacagtttgagagtagataggggaattagcccataggcctgatgggtaagttaagaaggtagtactatgaagatggaatgacgcaggtattgtggtacccaaattaatcaaataaatacgcataaggtcttgctgattgatttcaagtggattgtgtacatattgatcagcatatccgtttatcatgtaatagtcggcctcaaatcccatctgatttttaagactatattcacccatgaccatcacaaactcctttgcaggggcaacttgttgtttatttaaaggatcaactattagggctccatacatacccattctaatatgcaaagacgttggaggagcatggcagtgatacatcaatgcacctgcaggttcacctgttatgttatatagatacgtttgtccaggcatcacttgaggaattactccatcatttacatcatcgtgattaccatgaaaatgaattgtatgtggtataggagatttatttatatatttgatagtcacattttcaccttctgctaatcttatagttggacctggtaccgttccattaaatgtccaggctttgactttttttcccggagcgatatcaatttcgacatcctctgtaactagcgttatgagcctcgtcgaattatcattacctttgtttgctgcctgcttactgattttagccacattatttttatcgttaaccgaaattgtaggcaacggagtttcattatcactattattttcagttgcagcattttcatttggttcaattcgggttgattcttgggctaaaacaactgccggctctaaactagtataattaacagaaaggctaattatcatgattaaggcacacatcgagaatattaaaaatggtaagggggcaacaagttccttttgttttaattttaccttcttatcaattttgtcacaaaattgtatatgtagatttgaattactatataatgatagtctagactcttttgaaccgttttctatcaatttagtcgctttattctgattcaacaaaattattacttgttgccataatataattttgactaatgttgttttacattgtataacaaatgttgttttacattgtataacaaatgttgttttacattgtataacaaaaaaatatgtataaaacaaagcatcgcataatatgtgattgtacagtatagcctgagattaagattcttgtgtaatattcctgcaggtaaaaaacaaattgaaaaatgctcaaaagaacgaataaacgatactattaaatataaattgtatctggagtgaacaggttttccttgaggcagcctcatactcatactcatagtcaggtctccattatctacgcttcgctatcgatgtaatccagtcatgttaatttatacctatatctaaaatgactaatactaattacaggtgcaactggaagtgtaggagaacatcttgtaaatattctatctttgtatgataatgaattctgtatatctcttagatcgactcgttgtcctaatcatttagtgagtcgtaatatcgacgctttcagagatcaaggtataatcaaatttattgacatggactacaataatttagaatccattagccacgataaactggaaggtatcgaaaaaatctttttgctaacaccgtatctcaatatcttatgtaactaaaaaaattgttacagaagcacaaaaaaccaaatcagtaaaacacattgttaaattatcagatatggggacaaatttgagtcctattacgtatggaggaatgaagaatagacaagctgaaaagataattgcagaatcaggtcttcaatttacttttttgagacctaactactatatgcagaacttcataaaggtgtcatatagaccttcgataaatggaaagaccttttatcttcctttaaaaaatgcaagatctagctttgtagatattagagatgtggcggaggttgcagctagaatccttcatgaaaaatccaataaacactacaataagatttattatataacgggtggacaactgcttaattgtaatgactttgctgacattcttgaagcaatactaggcgaacccattaattatgttactataaccgagcaaacagcaaagacagaactgataaaggcaggattctaatcagaatcggtagactatatacttgatttctacaggattataagagagggacctatgaggcaaatctcaaaaatagtcgaaacgattttaggacgaaagccaataccgtttgaagttctcgtccagatcatgtagagttattcaaaagtagacttgaactgaaagtccccagccgataattagatatctcaaattattcatgaatcaatgaatgcattctattacatcaggtattgaataatgtatttattcagtaatccgccggagatgctatattatacagatttagaagtatctctaatttataacaattcaattgttttcagaagcaccaattagtctaaagattatctgcctcataacaatgcataataacgtctggcaccgtagttatatgctgaatgtcaaaaaattcgactacagataccgcaatacgtatacaactgaaatctattagaaaattgaatttcaggcgtccactgaagataaaacaggatcagcaataataaacaatatacttggaaaacatgtatcattggatcaatttgtaagtgatatagggtttgttttttttcaaaaaccgtttgtgcgaaatatcttcgaacatatttcagacgaagatttggtaaaagcagcaaagacttcatgttatacagggatgaggggatgcaatttcttttattcacggaaaaaatgatatagaaagtattgtagatgtattaaagttaggttttctccatccaattttaataataaagttattcaagtcgacgggaaaatagaatttagaatccaacataacctggtcgaaagggttcgttatatatcggtacactaattagttctctttttgcagatttaaacatcaaatcaaaagaagctttgccaaaagaccattccttggttatcgtgtttaattctacctcaaaaaaatgattcaaaaaaacatagagtagtgtttattaaaaatacactattctatcaattcctgatatcaataaatttggacctgcgcattttatctaccaataataccaattcattagtacaatcataattttttacaaaaatattgtcatccaataagatgttctgttaagaagtcatttacctggatagcgttatgtttgattctggcgtgccagctacatatccttgaattacctgtggcattccttaataagcgtccaattatacttatattctcgcctgatcaagtgctttctcttgatatatttttcttccaagtatcaagattgtcaggttcaggcaaatttttagaatcaagatcagattgcaaattatcgatttttctggggcctctttagaaattgttggaggacgtaatttgaattaggatcgttttgacttgagccttatccaaaatcgagaaatcatagatggtatacaaaaattatacagataaaagaaatattccaattaatgaaggaaacaatatcgaacttttcgctacgtttgataaaaactcttgttactcttattaaagatgtttgttatctaaaattttgaaagacggtcataaaatatttcttttatgttaaactttgcataactaaaatttccagattgagtattccaagctacttcaaggaccatggggatcatcatattctctattttagtataattagaatagtaacctgcccatctctcttttacatatgagtcacttctggatctgaagcgatcaccttccatcttgataatctctcccttttcattaaaataaaatgtcaaattgagtgtaagtcctgcatggtttactacagctcttgcacagttcaaatcaatttcttccaatttaagataattgcttggcaagagtgctgtagggaataaaggtgcctctccaagccatcgcattagttcatcctcgtctaatttcttgccttgaggggaatcagcaattgtgagaaaagacattaactttatcttaaaattaccttttccttcaataaattcatctaatcctgttaaccaaatgaatggcaataattgtattttacctatccatatcaacccgggtagttctgttgaaaagtattcttctcccttaatgggcatccatttttgattttcactttgtcggaataccccttcgtgcttaatttttacattgctgatagaatgttgtccttcatttaaagagtattcaaaatatctttgaacaggtgcaggcagattctttgtctgatcgaaataaaattgattgttggacatatttttggaaataatggatagttttttgatgttttcttttaaatgggagtcaaacaatgaaatggatatgcctgcataaatgataagtgttaatacagctaaaattgtaaaaataaatattacctttatagtatattccaagtttctattaatagataaattaagttttatggaaaggtttcattttccaagactcttgattgatctgcaataatagatatttgtaattgaagtaaatataatatatctcattaaatgcttatacaaatcaactttgcattcaacatgatgatttgagttttatgtatgtctatgagaattagatgtataaggttagagaatattattttggtaacgaataactgtttcaatcgctatatgattcattagaatattagaaattaggtaatatgatgaatggtggctgttatctaaaaaataaaaggtaagaagattgaaagattggtttatactaatctattttaattgccttacctgctggtttgttgactttctttttgtcgaaagttatctccaatataccgttgttgtaaactgatctagcagtttcgagatctgcttgttctggaacgtctatatttttgtggtactttctttgagcgtcctttgaagttgttacctcaacctgagaatcatatgcttttatttgaatgtctgtttttttgatacctggcatttcaactacaactttgatctctttttcggtggtattaacatcaactaaaggttctctttctgcagatatttgagacgatgattgatctacttgtcctcctatattttttatattgctattacctaaggacttgagatttccaaattcccttacctgtggtttgccatcaggtccaatggtcatcgaatatccatatactataggtcccacttctctaactttgccgccttcttttgtttcatattctctgacaagttcctttggtgcattgtttgatatattgttaaatacatcaaacattctattcatttcttcatgtatatcatcgaaatccgcaaaaagatctcttgtgtctaatcctcttctccaaggtcttccgaaatctgtatcaaagaatcggctgatccaatcgcttggtattatatctttattcatgtagaacgcaatatatgtaatgtatattacataatataaagttttcttacatattgtacgaaaacttacataaacacggaagaaagccatcagagtgtgattggtaacgatcatattgtctaatgccgtatgaaaagacaatggtaaatctaaaatcatgtttccagtcgataatcctataggtcatcctttttctattccattgataatagtattgaatattatttttcactttcttttcatatacaataagatgagaattaggaatgggaccgacgcaaatgtaaaactaaaggcgtaaatattgccaaaaaaatcaatgaatgaacttcgaattaagatcaggatagccaaggataagcatatgtagagagtgatgaaaaatgggaaaatcccaaataagatgaatcgatgactacgtaattgaaacttttcgaattttctatatggatattggaaatgatggtatataacgggcatactaaataaaagcgtagcaacagttatggagaacaaagcgagtaacaataacactttattactttcaccaaactcggcaggagaatttacagaaatatttaataaaaatccaaacaggatacccgcaacggtagttaataatgagctttcccttaaaatcgaatcataatgttcgattaatttatctttattaccatttgaatcttcattaaggtcccccattacctatcaagatctaataagtgtatttacatatgtttattaaaacattattttaggctgaccctttaacaaatgtattttagaaaaaagactatcaaagagttgaatcaaaaagagttgaatcaatcaaatttattaaaggtaaaattatcatctatcaatctaaccaatgtaggataatattgggacgatctaataatcggatatttttatagaaggtataaaatatccagtcttgaagtctaaagcatttgaaattcaaaatatgtgtccacccacttcggccgaaagttcaagcagaaaaaatccaaaaaatattgcactctctagacctgaagatttcagaaacagatccggatattgcattagtgattggtggagatggaacattttctcactatggaaggaaattgtctattccgatgttatttattggcgttcctactgatgaaattttaggaagtaaaagtagactagctgaaatctctctacaaaatcttacaaagaccttgagaagtattgcgaaaggaaactatgtagttaccgaaagaagaatgttggatgtacgacacagcgcctccccagtaattagtgtattgacagatgtttatttagagcgtggactttttgcaggttgtattagatattcaatttctattaccagtaaaaaggtcgacaagaggagtaataagaatagtaaactcctatttacggactatgttattggtaatggagttattataagtacttcatttgggtctagtggatattattcttatttagatcgaatatgctatcctgaacaaaaaccaagtgaattatttaatgatgacaaattggggatatgtcacatcctaccgacgtttgctacaagactcatgagtgatggagtaaattataaaaaaataactccaatccgatatacagtcccagttagcagtactattgatataaccgtcactagagaagctaatatccgcttatacggtactaccattcattctgaaggagttaaaatcatctggaacaaccctattactgttacatcatcaactaaaaccgcaaaaatcattcgtgtggtttaatgctaatccaaaatccatttaataatctttgaaagtattgggtatataatactcacaagtcatttagctttcggattcagtataagcatagtttatgacaactaattttgtattttacatctaatactttttcattgttcaaaatacaaagaaatttcttagttagggttctaaaatcatataaccaataccccttagcttcaaataatcatgctcacctctagtaatattaaattgcaatttcccataaacatggtctctaattctaggtttacgctctagctcctcaagtaaccgatgagctttgtatgcttcaaataccgaataatattcgatcttcattactatcatattatctgtatttacgatttacaagtttctagatattttattaattcaatcagaatgaacaaagtaaattagtgtgtttttatcctttgattttaatggtctttttaatcttcatagaaaatttaacctattatattattatgttatagaggagttgagcttattggttttcgaataacagaaacgagtaggcaaataaaaatgaaattggagcaatcaatatagattgggtgaaattatgataaaagtatgataatcattattatgaatatatagtttcaagcgaattagtaattagtaactttactattctcctcttggaaaagtatctggaagatccttgtccttaacttgcttgatatgtaatggatatagggcattcgtaatatcgataaataataagacatcgtatctcaaagacagtatcgttggaacataattaccatatctttcatatcgaggattgtaaactactcctatagctcgctgacctcgagtttcataattttcatcataaataagattatcttgaggcttttttaaaaggctattaatgtgaatgtttctctcaaaaatgattgttttatttctttttttgttagctggctcatcagacaggttgtgtaaaacatggtcccaactatcttgtactgcttgaggtaaattcattatttccattctcgctccccactctctggctgcaattaccgttccctcataggtactaaacccaatcaaaacagtattttgtattccctttttttctctaacaagttgaccaatatttatcatcctagaaggtgacatgtcagtaaaccttgcatctccgatatgtgtattatgagcccaaattatcgctttagttcttttttagtgctttcattactatgaaaagcagtcaatctttctaaagtattcatcatatgagtatctcttaaattccaggagtttacatctcctctaatcattgttctataataattttcggcatcttttacagttagtgcattttgttctgcattaaagtaatcttctctgttttcatggttcttaccgtataaagtctgtttgtttcttaatgctactagcatttcaataacttccttttcacaattctttggaacaaatgctgttgctcgagcatatgcttctacttctttattataaggttcaaaacaattataggcttttatggcatcctgtaatagtaaagggtcaactttcttaagatactgaattatttcttccatcaattctcataaactgtaaagatccaatccgtagaagcccaccttctgattctcctcgaccctagcagtcttattataatcttttaaccattcgactaattcaatcatttccgtatttgcccacatccatgtgggccatctattaaagagcgaagcagctcgtttgcagttttataggcatcgacatacctttcacatacttatttactttataacagtctggccaatcgccttccactgcaataaatgaaaatcctttttctataatcaatcgtttggatatttcactacgccattgataaaattcagaggtaccatgagaggcttctcccaataaaacatactctgcttcaccaattctatctaataaaaaatcaatattttttggtttatctaaaaaatcataaaaaatttttgcatccatatatatccctacttatatagaactaacaagtttataaataaggaaaagaaaaaaaactaacgttcttattttatctatcaaataaaccaagggaaaattactatcacattatttgggatcattaaacatataacaaaatcaagcagggattttcatattgttctgggtttactaaagtttgcatgtttgtgatataggtaatgcattgctagtcaatattactccatctcctatgcatattttttaattcaaagtcaattttactcatatcagtggaaaataaattaataggtttgcataatttatcatcatcattattacaaggtgtcattccggcagtatttttttctaaaggcgaatttgaaataacattatctctatatgacacgatcttgcattttccgggcgtatagagatagggactaggataagtttcgtcgggaccgcacttctcagccatcatacgtagcaacgtaacaccatcttaaatatacttttaaaaaagtcattcaatatgtatactattatctgtatccctcatttgacaataaaatcaatgtgaacatgcatttcatatctcagtcatgaagttagatataatgatggtgatatgaaagattgatttctaatatattataaaatttggtataataacttcatctatttttagtcaaatcaatctcttcttttcaattctatttattaatgatcaaacgtgtaaagatcacacgctgaaatggtaagttctcattatcttttttacttcctcatcgcttacctgatcaaattttcgatagaattgtcccacggctgaaaattcttctggagaatataagataatcactctgtctgcaattctggttaaaacatcaacagtttcagaggttgcaggtgctaccggaactgctacaattaattccttgtaaacgtagtttttatttagccactgagctgatgcaataattgtggctcctgttgctattccgtcgtctactaatatcaaaattctgtcgtttaatttatctgcataagaagtagtccccctaaattcaatcagtcaccgagcaatttccttttttttgaatttcaatttccttctccaaatattttcgagagattggaagaattttcaagatcctttcgttcataaaaaatgttccatccggcattactgcacctatggccagttcttcgtttaactcatgtctaatttttcttgaaactataatgtcaagttcacattcaaaataggatgcgataacatttgcaagaataatacctcctcgcggtattgctaaaactattagctctttatttgaggaagtaatattcttttgttcgtattttaaataaatttctatttctttggcaagtttggttgctgcttctattcgatcctcaaatagagtactcataagtaaatcataaaaatacaagcaagataaagttaacttaagcccgatgatgggattaatcaaaccgcatacatgatttactaagaataataggcgaggatgtagatttccttgacgatgagacaggaaagtgtattcaggatacagataaagataatagatcaaatttagtagtcatgaggaaaacttaaaaccagcacaaagaggatatctccattagtatgcattaaaaaggaattccatcagtaatttttttatcaaaacattcaatctaaaatattaaaaagatattattatgattacttgacctagataagttataagatcaggagatgctcaatcgaattcttaatctttattttgttttatgtcatctacattattctgattatagaggaccaataaaagatttgaaatcggaaagggattaattgtgagcagatctgttatatccgaacacaactgcaaaatatgagttagaggttgatcttgaagatttactctactcttataacatcaagtctgaaccgtgctattatcgcctaagcttaatttttactaaaatttcacctccatgacgctatgattactttaatacaaatcaatgaaattgatataagggcaggatcttttacaggtattattatcttaaaaaaatggtattttttgcaattccaatcatatgactattcacaaaaagtcttgtcaaaggacttttactttgtaatacttctcaaattaggtaaattttcatacatctacatggcttgtctgttagtgtgttagtactgattttacaaatcaccctgagtaagccggagctttaaatacagattgcttatatggaaaaataaatcctctttatgagttccaatcataataattagcaaattcctctcagctggaactaattcaatcatcctatacttttcctatttttctcctactgtccgatttcaaattcaggatcagctcataagacatgtatttttccacaaattctccacctctccctacttctcttgtactgggataataattgtcacgggtctcatgtaaaagtcgaactaatgtgacgccattaattccctcaggactaataacgatactttcaggatatgttttgttaatcactttcatgatattttcatagccaaaagaattgttagttgactcgtcagtattatttggtatccaagtgaggtcaaaatattcaatatcgttatcgtttccctttttaagatctcttcggctaatttttagcttcttaccatccacaatttcaggtactttgatcaaatataatcatttttcgttttccgtcatggagagtgattttgaattaatatatgaaaattgaagaattgaatttttgactattttatctgaaaacaatcccaaaccttgttacaatgaatagattttagtttaagatttaatacaacttgtaagcaaaaatatcagatcataataactgatgtattttatatggatcctatttgttattcttctttctcttctttctcttcagagatttcatttttgattgattttagtatttttttatcttcttcctcggtattgttttcggattttcccacaacgtttgattcctcttcagcaaattcattttcgccactattgttgattgatgacatattagtgacattagcatagtgtggatatattatttttctatttgattattctttaagacatgaattgaagaagtagtctgatacaaaaggaaattttgagacagtcttcgaaaatttactatattaccattgaatataagatcaaatattgacaattttattccatgatcgactccatttccacatatacttaattctatttaggatatcaactaggtgattagtaattgatattttgtcaagatagggatagggacattagcttattctacactttataaaaaaagtattaaaagtttatcgagtatgcaaatgtttcatgtatcagaaaaaatgtttttattttattcttcttagcttacattaatcttgaattcctcatcgccttctggcttggttgggtttttctttggtacattgatttctaatataccatcgttaacttttgcatcaatttgtgaagggattatttcttgggtaaaaggtatttgtctatgaaacgacttgtaagacctctcgctgtagacgtattttttacccttttcctttgttttttctgtttgtgtccccgacacagtaacataattcttcgttgccctcaatactattttttccttgcttatacccggtacttctaaatttatttcatatctgtctcctctatcaatcacatcacataatggtagcctggtatctgtaattctatcaaagaattcaaaaggtgttattcctctcattggagccattgatgaaggccatgcttgtttcataatattttgcatattttgcatattttggctaaaagtttcaaaaaaatcatcgaaataatttgggtacgaaacgcttgattcgcctttaatgccgttagctttatttttgccctcaatactttctttattggatgtaatctttgaatcatttttggatgactcagacgtcgatgatgacatattacatgttagaagaagatatttatataacttacatatggcatcaatatagataaaaatactctagtcgattgtcttgattataaatatctgccttacttgaccttttttattctcattgaataactttgtttggggtgacaataggattgcttttgtcttgttatggaataagttaaggtcaggattattctttaatttaatagtttttacatcggagttataaggtatggtataattctctagagaagacattaacgaggcaactataaaaaaagaaagactggcatcggatacgtcgatgaataaattatcgtagtgtcgggcctgtatatagtatcaataattataaaaatgtggctgaggtctccgttatttcgacatgtatattgagaatggaataggattccgagtattttgaattaaaaataagaagttctcttttcgaatgtattactctaaaataaaattcaaatagtcatcttattattataatggggcatcttacattttctgatacttttctagatatacttcctaatcccttgattttcgctaatccattcaatccattgcttccaataattatcatatcaatcgcattatcgttgacgtattccacaatcttattagctggctcaccataagtaatagatgattcgatactaattccctctatgaatttatatttctgctttttctcattaatatcctcttccatcaagtctctaatttcctgataaatactttcaacacatctatcaaatgttggcttttctttcgcatatgatgaagtcattttgtccaatattgcctttgtaacaggtaattcatggattacatgaaatatcaatatcttaatgtgctgactgtttggattacttttaaagagagcatttgacaagtatactgcataatctaatgcattctccgaaaactcggaaccatcgtatggaactaaaatcctgcggacctccaattacaaaatataaacaacactagacagtaataattatctatgtaaaatacagaagaagccaatatctaaggattattatttgacttctaaaatgtcattgatgtcctctcatactaagactggttaaagtctgtgtttaaggtagttattcggtagatcacggaggcgattcatctggcagataattctcgtaaaaatagtctagggaaatttattcaagccaaataaattgtttcacattcaaatgcagattaatagtattaaggccaattcattattagttttgtaagatccaatcagcaacttcaggccacaattgattatgtgctgatgagcttatacataacccaacatgacctcccttaaatttgatcattttttttgcagtgctagagacacaattctcaatttccattgttgaccctgctgatacaagatcatcattttcagccacaatggttaggatgggtgtatttattttccgtagattaatactgttattatttaattgaatattatttttgacaagtgagttatttttataacactggtttactatgtctttaaaaagctttcccggaatattgggagtattgtaaagccattcttcgacagatctgaaaagatccataaattgtttatcgttatattttttagtcatagtaatatacttgtcagttgtatatcttactggatttcgcagtataaatcccatatccagtatctgtccattaaagtgtccaaattcatcaattattttgtcagtatcaatattctttgcccaggttgacagaatagtttgatctttgctcgaatcaacaggaattgctaaaagagtcagattccttaggttatcgttatgcaaactggcataacatattgctataattccaccccaacaatacccaaggagcgatattttgttcttcttagaatctttatgattctgataatctctattgttatcatgaacactggatttatctaaaaaatcattttttgtaactgccatttccatgctcactaggttaggcttgttgttttttattttgtatatcacattagcatacatagaatttgaggtttgtttttggatgtattgtacggcctcgtgcacatatgttatgtaatcatacaaggaaagatcattatgttttgagctgggataaccacaatcaagtagatatacgtctattcccttggataaaagggatttaacaacacttcgattaggatgaatatccataatgtgaaattgatttattggagcataaattatcaagagaggattatgactcgcattggatgtatgctcattcgcccctacaaagtgcattaatcttacattgtattttttatatgctactttaaattctgtggttgatctatcctttctatccgtataataagaattccaattgtttgtaatattttcatacctctcttcaaagtattgtatagggtatccttgagctttcaacattttgtgtaattctagatgtaactttacatattctgataatgacgaagagaatctatttgctataatctactaatagcgatgatgaattgaaattattcgacaattgtttttaatcagcgattcattatgtctacattatgtggggccaaatggatagaagtcaaatggaagattttcttaaatcacaggtagttggaagattgggttgtactgatggcgacaaaatatatgttgtcccaattacttatgcttatgacaacggttacatttacgggcacactaaggatggactcaagattcgtatgatgcgaggcaacccaactgtgtgctttgaaacagattgggtacaagatttgactaattggaagagcataattgcacacgggacttacgaagaacttgaggaaagcgaggcaaacatgggattggaagtcttgatgaaaaatatcatatcttctttgaaaacaaagacagtatctagcgttaaccctgaacaggattccagacaaatagagaatctcgcctttcaacattcatttttgtctccatttatacatagcagcaacaaagaaatttctgatattatcgtttacaggattaagatcaacgagatgactgggaaatttggaaacaacagttaagtgatataatctggtataatatatttataagaaaaatcctcaaaaaatatactttttatatcgacaaggggtcaaaaatgctttttcagttcttattttgattactacaggacgtcaacaaggtttttatttttttgcttgtgaagaatatcagaactattaaatggatcaacggatcaagtaaattgtttaaaacagcaacggatccttgacgaatcaaaaaaaggaatctctataaataatgagaagtattcttaatcctaactaaacatatattctctccgcgatacttactaggcatccgataatatagtggttgttactatcagtagagttgatcgaatttcctgtcaaatggatatgcacctatgaatcactattcaagtggaaccaatgtatatgtttggtcaacattgttaccacaccaggtcactctaaagattgcttctaccgatctcagagtatattgtttaaaagggttcattttttggagttgaggtttcttttgatattatgtgctatttacaagtaagaaaacttccaactttacatgatttatagtccaatatatcaaatccaaaacgaaatcaaataaagcaactaactgttcagtgaattaaaaaaaaacaaaacattaccgatatatgtttactactgcatatcactcttaccatacataattaattctaagaatatagccacaccgtttgagaataccaccacagatatggacagaatagaaaatatttatatctgaaactcatcgaaaggcttttaaagaaaatatagatggccatacaatgggattctttaataatagaaatgactttactggcaggaattatatggttttccatatatattgaacactgggcccatcaccgatccgctaaaaaagaagatgaaaaatctaaaaaatattctaaaattcatcgaagatgacttggaacatagaattagatttgttaatgaatctttgggacataaagactataaaccattccttactgatatgtgggatgcagtcataactgcaggtaaacaatctctcttagatttcaacttatttcaaatcattcaaagatcatattcatggatgaaatactataacagtgaattagagtggattaagaaaaatgaactggataacaaaactcttgatgaactattgattgacgtgaaaacatcaatcgaaagggcattaaacaagattcatgaatttcataattatcaagagtcgtaagaaagaaagaagatgaacattttcgttctttagatcataatctttagatacgagtaaacttttctagacccactagatatttgtgatatcaatgtattgactcaatcttaccaattctcattgccaaggcaacagtggaggactttgttcccggaacaacagtctcatttactgactggtttgtgataggactgcctcatgcaattattgggttactaatatcatggaatatagttttcctacttctacacccaaaaattaattttctgccaaatgtcagggatcaatttaagaacagcttaggcaaagttagaaaaatcacaatcgaggaaaaagcagttctaactatactctttgtggcaatgtcattgtgaattatcccttcggttttaagatccttttatcatgaggatggaaaaggtcatgtaaatgcgagtgtaaactctctgagtggtttgtcagacctactgatcggtgccatgaaggacattccggagtccataccagccatattgataatattattgataggattggtcagaatcaaacttaacaagacagtcgatctgaaacaaaatacaggagagataaaatcaaatgtagaaaaacgtttaccgaaatcatggcaacccatattatcatggaacgagattttaaagtctatcgattggaacatcataatcctttttggcggcggtttaatattgggtcttgggatagaggccagtggtcttgcaacactgttgggagatttgatagctgagaatatcggtgcactttctacagaatggggaatatttgcgatgagtgctgttatgaccttttcgatattatatgtcgcctcaaataccgcttcggctgttatagtttgtcctattgcaacctcactcgcaattggtgctggattaagccccattccaccaattattgcagcaggatttggagcctcaatctcaagctcgattccttccaccacctcgccaatggcaatagtttattcttcaaatgcggttacacttttaaatatgttcaaaacgggaataatctctgatatacttagacttacaatattgataatacttggaccattcctgataagtattatctacggctgatgaattctctggatagtaagaattagaccatcaaaattatatcttgttttcatgacattaagtattgcattcttatgtagtaacacttctaaaccttttcagttaagagtatgttattcttgttgattgttaaatttttgtcttcactctcgttagtgtccatatgacgataaaaaatttttgactattagtaataaacatttatcttttatgagcccattgaaaatgatctttcaatttggagtgcataaaatagcgataccaatagctaatataattatctaatcatttgctattttattgactattcttaatggttcagtaataggaaaaaaagatttttgatcaaatgagtatatatttttatattttcaacataatagaacataacaaatgtttccaattattttcccatccggtcgtaaagttgtgcctgcattgattattgtggatatgcaaaatggttttgtaagcaaagatggttcttatgataaattaggaatgaatacatccaattatagagaaataatacctaatttgaaagatttaattcaattttgtagagagaaagaaattccaattttttttaccgaagcagtaagggaatcgacgggcatcgatttgttaacaaaagtacataactttttgcctaaatcaagacaagaacgtctcaaatctccaatctgtgtaagaggcacttgggatggagccacgattgacgagcttaaaccacgggataatgaaaatatagtcattaagagaagggattcagcttttcaagacacagaactaagagtatggctccagagtgaaggtattaacttgctcatatttgcaggaatagatacatccatctgcgttgagacctcattaagagatggatttaatctcggttatgatgtaatattgatatctgacgccaccgcatcaggaaataaggagcattacaagacgactttggaaagagtatcagaatactatggcttagtaatgaatatagcacgctttaagaaggccatgaatgatttggataaattaagaaaacatgaaattgatttgaacaatatttctgatacagaattaaacgctttccttgaagaatttaatttactcgatcctagaacttttgctctatctcctacttgagacgcgaaagtttaaaatctattgttcatgtaaagttaagcaggcaaagttgacgatgcaaggtctaagtaaatgagtcatgttgtttacaaaggaaaaagcattattaataatatattcaataatttacaaacctacctcatttaaaaattaaagtattttcatctttgtatttttatccacacgtttgatatccaaaaaaagaacataataggataatttcaataatcaaaacaattttgtttatcgcatttagaaataacaataaatatgctcgcaagatttaatttttttgatattagaagacagtatcgaccacgatacaacgatttatctcctcatccttatacgttgcgattcacagttgctttatctatttccttcatagttttataacaatataggggtccaaaataccagatgaatctagatcaaaattacatataataaaattagtataattaggttacgtattcttcggaacttaatttatcccaggcacacagtatcattaaaaaaataatatgtttacctgtatagagctcctgaatagcaggtacagacagtcatatagtatctgactgttaagcacctattcgtccctttttacagcatcaaaggttatttagaaaaccatcagcataatactaattccaatccggttatactatctaacagttccagttttctaagtgtgtttaattcctcctctgcaataataaaatcgatctcccaactataacacacgataattatggtaatttctagagcccaacgtttctatagttatcaaatctattatactttacagcctcattcagcacagtgaaggaaacctgctcggccattctacgcaggttcccaacctcatctcgatatgcatcaagggacgtatgatctttatatcccataaatacttcttttatcttaaatccattcattaaagtttcaattagcaaccagacatcgataccccagccgtcaggagtttgacctgaattattatgttctatcagcgtagaccagactttcattgctgcacatacttctccgcttaaaggttgttgaaattgtggtgcctcaggaaaaaaaacttcaagcattggtcttgcaattagtttagtcacagctccgtctcggggatgtctatcgtaatatcctctcgtcatatcatatccttctttaataaccggagcaaccagcagatcgacccaatctgttgaaagattctttatatccgaatcaagaaaaagggctaaatcatatctgttgtgattttcaatagtagttgcagaataatttacattgctcttacttttgttagaatatttaccaaacaatgcttcctctaaacccgccctcatagcgattcccttgcctggatattttttcaatggctgctttatcaccgtcgttctttctaacttttctgcaattttgatagtattatccgtagaaaaaccgtcaacaactataacatctggatcataattgctttgtctgacttttgatattgaatttgcaattgtagtctctgagttctttgcacaaaaaattattactaatttaggatttttcaacataactttaacttcaatatcttgttttgatttttcctcagtttttaacatattcttggataagtatatctacttgttataagtttctgtaccgaagataatattagaggtttattttgcatatacatggctatttactacaagatcctgaaaatagagaaaaatccgacaccaaatatatctatagagagaaagttgtatgacgcaaagagttttctgcaggtctagaaaaggttcatggtagcagcctgtctctactgagtgaggtacatggcatactcaagtacataaatcatggtcatcgatcaccatatccattcctccttgaagaaaagcctcatagaaagaacaacatagcatatcaagacagaattgaatgattcggtgaatatttcccttgtaagttaaagcataataaattataacatataataaactagctggaatctgaatgttgattattactaggaattgcgccgttaagttaacagtcttgtaaaccgatacacaacttctaactgtaaagaagttttgctttcctagacttgcgtttttggttgtattcctgcgatcttatcatacaaggcaataactagtccctgttcatttacaaatgtaggattaattagcccgcccgtgcatccataaccatcttactcctaacaggttgagttcggaaaatcctgtttggagaaatattaattgaatctttgaataatattttggctgtcgtctgcgccacgttatttaatttgtgaatcgtaaacgttatctaatactcagtaaattatctttataaggtaatcacatttttgatggacccgttcaaaaatgaggtccctccagatatttttgccacgatggagcactttacatcttcgtagagaagaacagaatcaacaagtaacttgctgtttcagtgtattctgtatcttgcattggtttagtgatcatagtttgatttcttacttcagaaaagcagagcattcatctttgagtatgatcattatcgtacgataattagattccttgtaagccttatcaacaaatcataatatttgtttctttcataattggtattttccacgagcaaagtatcgttcctattatctataaacccaaatagttagccaaaagcgttgttgattagtaaccaaacaagcacctttagttcacataatgatgaaggatataatttacaagaatttttacagtgtctcaaaaatactcaaaatttgtttttgttccattcaaggattatttctatcctggttatctcttcctgtaatttgctgatctgcaatccgttaaatggaataactgaatggagttttcctctaatttcctttaattccatcagataggaatctaatatgacttttactatgttcttttcataaataggaatatcattattattataacttaatacaaaactatcgtatacggtatctaatttagcccaagcttctgtgattatttccttgctaaaagtcttttcggctaattgttcttccattaacctggaaacctcttcttttttaaaaagaaaagcgttcttgattgattcgttatatttataatcattggaattagatgtagacttttcgaaattctcggccattgacctccatgtttatcttatttttacttaaaaacttattgtccatattatgacatcactttatatattgcagatatatgtcgcctttttaattaccgcaagtagaacacctcgtactacaattggctctggattgtagatatactatttagatctcaataagccatctgaaagattatttcgattccatactcgaaattatgtttccatccggaactgcattcaaaagttgtagtcaactggatgaaaagtaatagagaatatcgcagttaagattatcttaaaggtaagagcagagtagatttggcgtcgggttacaattgaccatgaaaagagtcaaattctcgtacttctagatctaaagaaagtaacatgcatgttgctaaaaaatttgtgagaaaagaggaatatttacagatggtagtagatgtacccaatcgttaatagattcttaaatcataatgatcagatcagatccattcctcctaggagaaaaatacaatcgaagaattctgtagtacgcaaataacataatagtaaattttcttgcatcccacccatctttgtaaatgacgacatcattttaatttgccgtatgtaaattttttattacatttattgaagaagaggaccaatataatagaagtattatctataatctggatgtcttaaatatagataattatcatagcatttatgaagaattataagccataggtttatttatatacaccatacgatagaatcgaattgtatccattaatattggagtttttaacttgaaagaaaactttatgctataacacaataacttaaatcattgactaaatgctttgatcatagtccttttcaatatcaatagtcaaaattctttgcttaaaccttttttccgattatatcctttatagatactgttccaataatcctattataattttttagtcgtcttccgaaatcatttcaaatccctcattggttattatttcaattatcgctactatgtagacttgttgacatacaactaaagggtttcttgtcattatatccggtctttttaacacatcaacacttttattttctttaattgcatggagtgtatcgatgatactgaccatacccattacattataatcgttatccatgattggcgattcgttaattgctttaaattattcttgttccaatttctactacggtcacattttctttagtaacttcaatgaataccgacaatcaatttaaggctttcacattctaatcgtttagttcaatagtaaattcctatggatttcataggtttccatttttttagaataagttactgttatcattctacatttttagcacagtaatttcatttttctatattaatattaatatcgttaattcgggaactgactagatctgcaagaatttgctggtaaaaaaccataggaataagatattgctattacgatttataaatttcagcgaatgtgataaagatagataggatcctaaacaaacaaaattttcttcattcttttattctaacatatgtttgcccaactaattttagattgaaaataatcaaatttggccatatatatgagattcgacaaataaaaataccattgtcggctttattatttgtttatggcaaaaataacaatttctgcaatcaaggcagatataggatctataggagggcatacgcgtcccagcgatgagataattcaaaaggtaaaagatcttgtagaggtcgaatcgaaaaatctgttaatagatcattatatcgggtatacgggagacgatatccacattattatgactcatagacatggaataagtagcaaagacatacacagaattgcttgggattcatttactgaaggaacgaaggtcgcaaaagaacaagggctgtatggagcagggcaagatcttctcaaggatgctttttcaggtaatgttaagggaatgggacctggagtagcagaaatagaattagaagagagaccaagtgaagtcttttgtatttttgcagcagataaaactgaaccgggcgcatttaactttcctctttggagaatgtttgtcgacgcaagaagcaatacggggctgataatcaatgaagaactagctaaaggagtacttataaaaatcatggatgtaatgacaggaaagattgctgatctaaagctatggaatgataaagcagaggttgaagcggccctcatgtacccaggcagatatgtagtccattcaattttatctcataatggtgaacaaatagtatcttgttctacagatcgattgcataatattgcaggaacgtacgttgggaaagatgatccaattgctattgtaagaacacaaaagaattttccagcaactgaggaggcggggagtacttttaataatcctcatatagtcgcaggaaatacgagaggaagtcaccatatgcctttaatgcctgtaaaattaaattcggccgccagtatcaattatgctatacctattgtttcttgtcttgtatttagtatgcataacggaaaattagtaggtccacatgacggcttcggaacggtggattgggactatcagaggatgttagcatctgaaagggcacagatgatgagagttcaaggttttgtgcatccagcaactcttgttccagaggaacttgaatataacaaaggctatgaggcaagaatggcaaagcttaatgaaaagttcaaataatcctatttagcaataaaatcctaaaatctgattgttctttatattctataattattttgaattctttcctttattacaataatgggacacgaactgacaaaataactaaacgacatgtatgtttttgatatttcttatcaatctagttcctttaattcgctaacacgttgtataaaatagcaggacaaggaaatagcattaatattggagtctattacaatgggatgaaatagttataaacatttttaaaatttttggaattttagtgctgaacaaaacacttccaaggagagaatcattttcctgttgtgaaataaatattcgttgcaagctttcaacaactatcaaaaaatcagtatggcaagatttacaatgactataatgatattatgctattaaagatatttcttaaaccaatctgcggcatatctagccacttcttctaattttcctttttcttcaaagagatgtgatgctcctggaattattatgatctgtttctccttgacatttggaatttgatcatttatgacttttttgttccaatcaataacgggcaagtcattccctcctacaataaataaaatggggcagacaatgttttctatagatgtatattgagaagctaaatctactctccctcctcttgacacaacagcttttaccatattcttcattttctctgcagcaatcaaagcagcggcggctcccgtacttgctccaaaatatccaataccttctactttacctttttgtttataaaaatttagaacatattcagttactaatactaatctatcagctaaaagaggaatattgaatcgatactctgcagtaatgtcgtctacaagctcttcattctcagttaataaatctacaagtagtgttgaaatgccatatttattcaaaaccctagatacgtatttgtttctcgggctatggcgtccgctaccgctaccatgggcaaaaataactattttatctgatttgctaatactattgaggtttccttcgataaactcattgcttataggaattcgtatcgtatattcatcattatcaatattgtaaatactattcatatgcatccttagaagtggtaaaatttatttatttaatgttaccaatgatactttgcttatcgaactctgcttaggataaggcgattcagtgagatttcccattggttcacatactccatgttcaggattttgtcacaacatcggttatggaattattgactggtggcagatctcattttttcacatcttggtaagttagttcaagaaaatttgagtggttgataaagaagggtattgcggctacgaataatttttctatttcaaactcggcaaaagaatgtttaggaacattcattttaataacattcaaagcactggctgtgatagatttgattttacaactaatagcaaattcaaattgtaattcttcctagaaagatgttcatctgaatttataataggaacaaaatttgcaaactgttttccgatttcaaatcttttaatcttatcgctgtttaaatttatttgaagacttgaacaaaataaacaataaggttatgattgaatatctatggatctccaaaataatttaaaattaacaatcagtatacgaacatactatttttaagttagactagaatgttaacctaaaaaattactgatggaattccttttccagtgcatcctttagcaggtgaatatgtctttctcggtcctgttttattgttttccacatgtcaactaaatcttgtctaccatctttctcagcatcctgaatatacttacctatgacatcatataagaaatcggcatccttccctagcgttcttagtatatcataagcgcggttggttaaacctgtatctgttgtatcggacattatatactctatataccatattgttcttatagtttagttgatttaattacaaagcccattaaatttgcactcgctttgaggttataactttgtctcggttcaaaagttcaacttaattatttgtaactgcataataaagttgtgaatacactatttgaagatcgaatagacgcggcacagatgctcgccaaaaaaattgaaagttacctaaaatacgaacaaaagaatattactttttcaaataaagagctaatagttttagcaataccacgaggaggtattattcttgcaaatgtaattgcatcctattttgattgcgagcttgacataatagtttcaagaaaaattaggcacgaattaaataaagaattggcaacaggagccgtaatgccagatggaacaatttttatgaacgaacggatcttaaaaattgctccaatttctcaaaaatatttggaacaggaaatagagtttcaaaagaaggaaatttccagacgactgattgaattcagggggactacttcttatgctgataaattaaatgacaaaattgtgatcttagtagacgacggaatagcaacaggagccaccattattgcatcagcccattggttaaaaaaaaactatgcttataagaaattaattatagcagttccggtggcacccgctacgtctgatactgttaatgttttaagcagaattgcagataagatgattatcttgtatactcctgaagaattttcagctgtcggtcaattctatcaaagatttgatcaggtagatgacgaagaagtaaaagagataatgagaaagtacctttttgatgtatgatttcacattgtctattattgagaaatctaaagaagaattcgagaataagatgcatttgtcaataaagtgaatggcaaagttgctttgctaaattttatacccattgcaaaatatcaatcattctaaatatctattatcataattcacttgatgatttagatttgaaatctttaataatactaatttttattgtcaaaagacaaaaggcaagtcattgtttaggacactgaataacttttactaaaaagcatatttaaaaaagcatcatcttgaatcatatgggtaaagaacgagatatcgacaatagttgtcctcagatttgtccctatgatcctgaaaaatagaatactatgatattttacataaatgttaatttatctttaccttcagaaaaggtattactaaattgactacttgtaatagcgatgacaaaatatccagacctattagtttattctcgagtgatttaagaaaaattgactagtaatgcttcgctattacctttgagcatgaaactgaatgtgaaaataaggatacaagatctcgtttgattttgttaatacttgtaccaattacacgagtcttaaggtagtttcataatagttctctcacttttccttataagtttgttaattcctaatacaacattagggataatggatgagcatacaatttagttatgattcattagagaaaccaaaagatatagatttcttattgagtagaattggtgaagcagagtatgttttattgggagaagcctctcatggtacctctgaattttatcaatggcgtagtgaaatatccaaacgattgattaaagaaaaaggatttttatttattgcagtggaaggtgattggccagactgttataaagtaaataagtatgtaaaaggtatgtctgatgcctataaaactgcaaaagaactgcttcgctcttttaatagatggcccacatggatgtgggcaaatacagaaatggtagagttagtcgaatggttaaaggggcataataaagggatccacaatgaagatcaaaaggctgggttctacggattggacctttatagtttatgggaatcgatggaagaaataattcagtaccttaagagagtagaccctttactattacaggatgccataaaagcgtataattgctttgaaccttataataaagaagtagaagcatatgctcgagcaacagcatttgttccaaagaattgtgaaaaggaagttattgatatgttagtagcattaagaaacaaacagactttatatagtaagaatcatgaaaacagagatgattacttcaatgcagaacaaaatgcactaactgtaaaagatgccgaaaattattatagaacaatgattagaggagatgtaaactcctggaatttaagagatactcatatgatggatactttagaaagattagtaaattatcaagctaatggaagcagtaaaaagaaacccaaagcgatagtttgggctcataatacacatatcggagatgcaaggtttactgacatgtcaccttctgggatgataaatattggtcaacttgttagagaaaaaaagggaatacaaaatactgttttgattgggtttagtacctatgagggaacggtaattgcagccagagaatggggagcgagaatggaaataatgaatgttcctcaagcaagggaaggaagttgggattgcgttttacataatcttagtgtagaattgaatagtaaaaaaagagatagaacaattgtttttgatagaaattcttatattaatagtgtcttaaaaaagacagatgataatcttatttatgatgaaaattatgaaactcgaggtcaaagggccataggagtagtttacaatcctcaatatgaaagatatggaaattatgttccaaccatattatctttgagatatgatgcgttattatttattgataatactaatgctctatacccattacaccttaagcaggtagaggataaggatcttccagatacctttccaagaggagaataaaagagaatatccaccaagtcgattgcagatagatctccacgacatggattcaaacacttgtaatagatgcatagtaacaatctcgtcattcacatttcgtctgtccttaatcgttctaggcatcctcaaaatatatagactaatcactctgcttaaataatgcgatttacaagtactaaaatctttatttaggagtaaaatatcgtgaaaagtttaacagttattgaatatccagacttgcaaattgtacctcaaaacgagagataggcataattcgttagaaatgaaatttgcaatcctcttaagttaacttctccatggattaaagaagattttcagccaaatcgaaaaaaatataattttagttgtgtggctaattaaattcacaggcgatgttgattttgccatcatactgacaattttcgttggtgtatcaatgttgaaatctgtattttagatgtatagtaatcatggtgttcctttatatagaatcaatagccatacttacatttttttgacaataaattttatcaattcgaccattcgacatgcaaagccccattcattgtcataccaggacagtactttgatagtgttgcttttctttcctaaaaccattgtgctgaggccatcaactatggaagaatgggggtctcctattatgtcagaggaaactattggatcttccgtatacgataatatatccttaaaatctccttctgccgcctgctttagtgtgttgttgatatcatcattagtgacttctttttccaaagttactaccaaatctattatggagccatcgcttacaggtactcttaaagccataccgtctaactttccttttagttcaggaatcacttctcctatggattttgcagctccagttgtagtagggatgatggattctaccgcagatcttgccctccttagatccttgtggtgtaaatccagaagattctgatcattggtaaaagcgtgaactgtagtcataaaccctttcactattccatatttatcattaattattttggcgactggggcaagggcattggtagtacaagatgccattgatattatattgtgattattggcatcatacactttttcatttattcctaagatcatcgttgcatcagggtttttcgcgggagctgaaattacgactttttttgctcctgccttgaggtgcttgctggctccatcccgatccttaaatttcccggtagattccaaaacaacatcaatttgaagcggaccccaaggaagtagctgcggatctttttctgaaaatattttgattttgtgattatttattaccaggtaattattattagtatccacaattacagtgccatcaaattttccatacactgaatcgtatttgaaaaggtgcgcaagagtatttatatccccaagatcatttattgcagtaacattaattatactaataaatttattatccttcaatgctgctcttaaaaaagtcctacctattcgtccaaaaccatttatggcaatatttttcataatttataccagagataatctattttaagtattattctaagtaagcgatgaatgcaatttctctttatacgatccatgaagaaaaattactgaaaacgagtcttcactttaacacataaaaaaattttctcctcaactttcttagaaagctgtccaaattgtttctcttatctcgccagcagacgcaaaagatataaaagaaaattatgaacgggtaaataccatctagaatggatagaagatatggttacaattaggactagacacaattgttattgactatctataactttatactcctaactcatcagccagttttaccaattttttactgtaacctataggaaaactctgaacttgatctatatctgttagaaacggaatcatttgaacttgttgggaatgatatagttgtgttgcatccaatgaaggcaaagactttacaataaaaccattttcaataatcttttctaaaagagggagagaaccttcgacgtgctcatctgcaagtgaaattatgtcctggactaatatcttccggtcatcaagtattcggtgtatttgtttagggcccgggtatgtatgtttgccaggacttgtttttactttatagatgattgatttttgtttacttgcttttccttcagttttctcaatgtcactggcaagtctaattacttcgttactgatatgtgatttgtcctctttttgtactattgtagctaccattttataaacaccatttattaccggattatctcgtgaagtacaaagctctgtaccaacagcgaaactatctattggagccttatttttgagtaattcctttataatattttcattcagatcaccacttaccattatttttgtactatgataaccaatgtccccagcctcatccaggatttctcttacttttttacttaaatacaacaagtctccgctgtccagcctgactccttttggtaatattccttcattgattatcatttttatggcgtctaatgtatcgtaagtatcaactagaagaaaactatcaggaaataatttgcagaactctttaaacgcaattatttcactatcaaaactcataataaatgagtgtgccatagttccataaacagggataccaaattgcatgccggccaaagtattagatgtacctgcgcatcctcccacataagctgctctggctgctaaaagtgcagcttgtggtccgtgtgctcttctagaaccaaattcaattattggtttgttattagcaatattacaaattctagaagcttttgtagcgatcagagtttgaaaattgattgtcgataaaatataagtttctaataactgagcttctatgataggagcctcgattctaagtattggttcgttagcaaatagtacagttccttctggcacagcccaaaggtcacctgtaaacttcattttaagcagaaaatcatagaaatcttgacttattcctttaaagacgtctagcgaccttaaatattctatttcatctttgttgaacttaaaattcaaaatatattctactgcttgttgcaatcctgctattaccagatatgacctgtttttagggagtttcctcacgaataattcgaagatacctattgttttccaatctttgtgatattgactgaaataatacccagcagccatagttatttcataaaagtccgttaaaagagctgcattacattcggtactactaccattaatatatttcaattcagtttattttaataaagtacataataaatcctcacatcacactatcgcattttgtatagattaatcattaggaactttgtaaaagaaatcttctattagctctctaacttggatggctttgcgtttccatcatatatatcgtaaatcgcgacaccattgctaaaagacgtaaccgatattgtgattttggagtataccgtgtaagaaaatacacataataaatttacttaaaccaatgtttccctcttttttgattagatcaatcaagatagataaggtgctatcgtatttgtttcataaaaatggaggagaacacaggtttaacaattgattagacaggattggcaaaaatataaagggtaaaatatctaataatgtctatatcaagtagatttagttgtcgcgtcatgcaattttagtaatagatatgcagaatgattttgtcaagggtaaactaaagtgcgaaagagcatcaaaaattattcacaacatacaatcattattaacagaggccagaaaaagtgacattccaatattttattgtatagatgaacacctacctatggataactacgaacttgacctgtggggacctcatgcaatgaaaggaacagaaggtcagaaaataattgatgaacttaaccctactgacagagattttgttattccaaaaagaacttatagtgcatttgatggaactggccttgataaagctttaaatgggttatatggaggtaaaggtgttgatacgataataattacaggattgcatacaaatatctgtgacagacattcatcatacgacgcatttacacgaggctttaagattatagtagcagaagatggtgtagaagcattcacagaagaggaacatatgtcaggactagaatacattaaaagaatgtatggtgcagatataaaaaaaataaaagagattatagaacttttcaaagagaatgatcaaggtctaaaatagagaaatgtataaggtgttaatcatctgaaatattttttggaaagactgtaatttcaatcctaatataagcccccctttcgagtagagattcaattctgaaacctaagatagtaatagtccttgtagatgctataaagagcctaaatcagaatactttctataatcaggaaacataatctatttggatatctgtgactaaatgcgataatctcttagatgattctacttaatcttattacattattatctcaaaacatataatatccaatatcgcaatagtgtcatcatggacgaaggcggaatcctaaaaagatatccaaataatcccatactccgtcctaatagaaataatttgtgggagagtcaagctgtttttaactgtgccgcgttatatgacggaaataggattcatttgttatatagagcgattggtgaatatgagaattatgtatcaagaataggatatgcttcaagtggagacggctacacctttaatagacgcaatgaaatagctttcgatccgattttagagtatgaacaatttggtatagaagatcctcgattatctgaaattgaagaccaaatttatatcacctatgtagtattatcagaacatccgaaagctgggccagaagtatcaactgcactagcagcagtatccaaggattatgtagattttgaaagattgggtctaattacaagcgaagaaatggataacaaagatgtggttctttttcccgagagactttcttcaaatttaaacaaagcaggtaaatcatatttctgtttacatagaccgagttcttggatcggcaaagcatatggtgtagataggcctagtatttggcttggtgaatcctccacagtgactaagttagaacagcatactttacttatgaaaccagagtttatatgggaacaattaaagataggtgccggacccccgcctataaagaccaaatatggttggttagtaatataccacggggtgagtgcagatagggtttacagcgcgggggctgcacttttggattcaaatgatccaagtaaaatagtttgtagatgcaataagccgattttgacgcctactacagaatatgaaaaatatggtgatgtaaataatgtggtatttccaacagggttgtgtaatatcgatggagaattattcatttattacggaggcgcagacaagttctgttgtcttgctacagttgagcttaacgatcttatagaacacatctttcaaaacaattaaccatgaattagaaatgtgattaatagatggataaaatgcagactataagtaacatccaaaaaaaagcccacgaaagactaatatttcattaaaaaccaaatttgctcttcttttctgccatcattatggaaacttattcctttaatatattaagctttttacaatgctaagcctgcttattcaacccttattagattaattgttttactttattgcatcaatggaacctgtttacttaagcaaatcatttagcttagagatactctatctcgttatataatttcagaaataaaacatgttcaatatatgtttactacggattatatctgtacttttcagactagctttaataagagcatgcaatagacacgcattttcagccgaaaccacgtttccatttgaactggattcaaaagtataaacctaaaatggtcggtagaatgaaaatgaattatagaatacgggtatgtgaaactttgatcaaagtaggtttgaagtatatgtatagattcaggtagatatggagtcagagaacagacaattcttatgctatctatttccaaagaaatatacagtctaatagcataaaggtttacctcttatagaaagtattcatacaaaacatctagtttccccagattgatgtacaaggtacctacatgcttgtgagtatctcaaaacaaatcatccatgctttgtttctctcctcttgagaagggcattatagaagaactattcaagcaagacaaaaattttcgatgatttttttcttgtcgaaaagaaaagtgcatcagaccctatcaaataatggattaaggatgtacttattattatatcaaaaacattcgagcctaactttacatagcctgcctttagtatcagaatatttttatctcattctctaaatattttaaaaatacatctataaatacaaaacttgatatataaaaagtatggcgataggtaagcctagcattttagttccctatgacgctactgaactttctataaaggcgctagataaggccatcgaaatagcatcaaggatggattatgctattcttttattgtatattatagacgatactagcctttgtccatcaagaatagaaaagtttatttcaaacatagctgaccttgagaaagccaaaaaatatctcgtaaatctaattaaacaaggcgcagagaaatacatgacaggggtagttgacaaaattaaagaaaaagagttatttgtcaaatacattatacgagtgggacaccctgatgatgaaatccttgctgtttctaagaacccaaatatacacttaatagtgatgggcagcagcggatcattcaagaaaaggcataacagaaaaggggtaggaagtatttctagatggatctcagagatagcatcttgccctgtagttttaatgcgctaaaaatatgaatctctaaaagagatctatgattgtatatctatctttaaaaaagcgctttgtacaactacctttctaccgtattaaatggaatttattgtagtcaaaatccagattaagaaaattcagatgacagactgacgtttttttattttttatggtgtaaaaagatgaaaatattaaccagcgtatccaatatttagatataatagaaggttgtgaatactgagttgggaccaaatgtcctgatggtttctacggaatatcctccaatacctggcggtgttggaagatatacaagtaacttagttaaagaactaaaaaaaataggagttacagtttatgttttatgcaacgagaaaggcaatggtgatttttttggtcttgatccttcaaatcaaaataattcacaagtaatactaaatgttatcgataaattgaaccccgacgttgtgcacgttcaattagagcatggtctatatgggttaaaacaaagatttagaaataattcaaacaaagctattactaacatagaatgtttttatgagaaatgtcctattccaataattactacgtttcactctgcgtacccattcagacaatggttaaaattatcaaaactgctgtataatcaagaaaatgatgtaaatacaaattcaattaaccctttgaggaaaatcaaagaatttatgatgaccttgtcaacctatcatgcttttaataaatccaataaaatcaagatgaaaaaaagtagttacaatattgtattttcagaatacttggcccatctgatatctaatagaacagtcacgaccaagtcgaattttaaaaagaacaacatggttgttgtttaccatggcgcagaacctaccttacctgtacctctagaaaagaaattggctagaaaaaagtttaatttaccggtagataagaaaataggattactctttgggtttgcaacacatactaagggttgggacctgttaaatagtctaaatattccccataactggacaatagtgattaaccaatcaaaaaacttttatggcacaagaaatcattcatcggccggaacaattaatgatatagatcacaaaatcaaatgggatgctaacaatagggatcagaaaatcatcaatttaaatcagggttttttaaccgacatggatctctctattttgctttatagttctgatgttatcgttctcccatatactgtaacctcgggttctggagttctttttgatgccttagcccatggtctcccttttatagcaactgatttgggtttttttaaagagtttgaaaaaaagggcctaggtattacagtaaaaagaaaaccaggcgagtttgaacgtgcccttaagaaattggaagtgggtaactcagaatatgttcaaaaagttgaagagtttaaacaaaagttaacgtggaataatattgcacgtcaacatctagaaatttataacaaatcgatatttgatagaaggataggaaaagtatggtacgcatactgcgtataagatatgaaacaataggtatagcgtaattgatactggcggccgaatttaattttacaggcatcaaaggtatgtgataacttcatctggtatcgcctgcaaaatagtgagtattagctaatatcgtagtttcccccattattaatccataagacaagacaggtgaattgagtatttttggctgtctaatacgataattaattggcttttccaaatattagtaagtagtacccaaatcgtattaatttctaaacaacagtgtcataaatcaaagataagataatttgcttataattcattggatttaaatagattctttgatattatctgttactcccttcttgaaatcgttaaaggcattcttaaatacaagatcaagtcatatgattaaatgagtatatggaattcttaccatgatgaatggctgaaaaggttttttggaaaagataggggaataaaatggccaaaacacagttattttgatgacatgttaagagactacgacgatatgagaaaggatatggaaagaatgttccaggaggagtttaaagatatggaaaccaaagcccctaaagaacttgttagagaatatactactgccgagggagcaaaagtaagagaggtaggtccaattgtgtacgggtattcgatgacaataggtgctgatggtaaaccccacgtaaaagagtttggaaatgtaagaacttctacatcaggaacatctcctatcctgagttctgaaagagaacctcttgttgatattagtacgaatgacaaagagataaaggtagtagtagaaatgcccggtgtaaagaaggaaaacataaaagtgaacgcttatgactcttcagttgaaataagtacggatgatccacaaagaaagtatcatgaggtcattaatttaccgtcagaggcagatattgaaactgcatcttcaaaatataataacggaatattagaagtcgtcttcaataagaagcaacaatcaaaaccgaaaggtaaagaagtaaaagtggattaaaacatttttcttttctaatgagcttgtatcttctatccaactttttctttaattttagccagtctttgttcttcttcaaagaccgttgttaatatagtttcaattgcgtctcgattgcttgaaatactcttgataccatatctaacgagaattcgagccatatcagattggctaccactttctccacagttagatgtttccacatcaaaacgattacagacatcgattaccaatttcatggattgcaggacggcaggatgatatacggatgataatttagctaatcgttcgttatttctatctattcccaagatcaattgagtaagatcattggtaccgaagctaacaaaggctatcccctctttgcacaagtcttcaattatcataactgcagcaggagtttcaaccattataccaatctttttctcaagtatagggaattcttgtctgcaaatttgtttagtctttgctacttcttctaccgatatcacaaaaggaagcatcacatatagattggtaagtccttcatcatgcagtctttgtattgccgttaattcagcttttaataaaggaggttcatctaggcttctacgaattccatgccatcctagcattggatttgattctattggttcatcttcacctccaattagattcctaaattcgtctgtccttgcatccaatgtcctgacccaaaccggttttggataaaaaattctagctattggcctgatcccatcaattaacatttgaacatacttatccaatcgattctctttcatcaatttagcaggatgtataccaaattgggagatcatgtgctccaacctaagtaaaccaactccatctgtttttggttctacatcattgatattcttagcaaatgcaagatttatttttatttttgtctttgtcatttgtttatggtgtaaccgaccagtatctgtttctctagggccatcggtaggaaaaacattcttaatattaaccatgccgtcataaacgattccattataagcatccactgtaatcatcctgccattttgtagtattttcgtagcatcttgtgtgcctacaattgccggaattcccatttctcttgagactatcgctgcatgacacgtcctgccaccaaggtcagtgataatggctgcggatttattcatacttggaactaaatcaggagaagtcatagttgttacgataatatcacccttttgtatatttttgatatcgtctttggtgcagacaattctaactttaccggtagcaatcccaggagaagctgcactacctattagcaactggttttcctttataatatcaaatgcatcttttttaatcaaatgggtcgttatgggcctgctttgcacaaagtatatgttatcatgatggtctactgcaaattcaatatcttgtggttggtcattataatgtttttcaatcatcaatccatatattcctaattgtaggatttgcttttcagtaagtacttgtgtatttaatttgtcctttggcgaatcgtatttttgggtagttttagaaataaaatcgaatttaatgatttttgtttttgacgaagtctttatgtctaagattgcgctaacgtctgaacttttttctttcattttcggtttactaacacgataagaatcaggtgacacctcacctccaacgatgctttctcccaaaccccaggtcgcttcaattagtattacttcctcacctgttgtaggatctatggtgaacatgattccagatttatcagcgttaatcattttttgaaccaccactgcaatgcttgcattagagattctatgattggagcgatagaaaatagcacgcggctcatagagagaagcccagcattttttaacacattctttgaattccaattcattttttacgttaagaaaggaagattgttgtcccgcaaatgaagcattaggcaaatcctcagcagtagcggagctcctaacggcaaccaagggaaaagaatctaaattttcagtccttttaatagtatcttcattattacttaagagatcttgataatattctgttatttttgcttcaatttcttgaggaatcctacaagaaagaatcatttcttttattttcatagaagaatccattaatgagattgcatcattgacgtcggtattatttataatctcgtttatcgtttctccaatgttactatcccgaatgaatttctcaaaagacgatgtggtaataacaaagccagaaggaactgaaataccaagttttagcaattcaccaagatttgcgcctttccctcctacggattttatatcctcttttccaacttctttaagcattactacgtagtcatacactacagtatacgaaactttcaactagaaaaatatttgctattttatattgtagaaatttccatctgcaagaaaactggaaacgatactatatttgctgaatccgccctctaaaattctatttgaggcagagaaagtttattttgaagtttcataacttttcgaaaatatatatgaagattattctttcttgtatggatattgaattattttctttagatggcaatagtaaatttcgttttatcatgcttatggctcgcaccagtcgtgatattctgatagtattttatcttttgagggatttaacctaaatcctggtggtttttatactggctacctttctttttcaacatacaaactaccatccttcccaatgtaagaactttggttagctttgtacatcttaagtttattgtatatggaagaactaaaaattaatttttaaaaagttttactgatctttatttttacccaaatctactattgcctttataatatctgttttagttattattccagctaattcttgtaaatcgtttactactggtattccactaatacaatttccgatcattgctttggcggcttccatcaagactgcttcttgattaatgagtagtggacggggtgtcattatatcctctgctgtaaagggtattctcattttggaagatgaaaccctattattatttgccatattttcaaattcttttggtctatcactgttactgtaatttaaaactccaaaataatttcctttgggtatcatatctcttgtagttattatgcctataggtttattttgactcactacaactactcgcgatatattatattgattcatcaatactggtattatatttacattctcttctgggcttacagtaataacttttttagtcatatattggcttacggtaaaattgtccagattacggctagcaattagtgctatcaaatctgtctttgtaattatcttatttaccttattttcttcgtctacaagtaatagagagctgatatttttatctagcataaactgagcacagagacctagtgaaaaatttttgtttacagcatataattcgtttttgtgttgaagtaattcatctaataatatctcgcctaatttacgcttatcaaacgcttgaatggatagaaattttgtcaaatccttttccgtgacaattccaattactcttttatctttaggcgatgacacaataattctttttatattatatcttagcattaaatttcttgcatcaagaaatgtcttatctgatcctaatgatacaataggtttagcaatatgaaaagcatttagtacaaaagtgttatttctgttttgtggcataagaataaggtttatttccaggtaataagacttttttttattccgatagtttttgatctatatttttatagccaaagatatccagttattcaaatgccgcttgatgataacgaaaagatagtccttaaagccggagatattagcagacctttaatttcagtcgatcaacaaaaaacactattagatgttagagatattattttaaagtacaatataagaaggattggaatatcaaataacgaaaaaatcattggcatcgttactgagaaagatttatttaattatttatacaagaattcacccgacagaaaactactgagtgaaatacttatcaaagatctactaaaggatcctaacgagttaattactgttcaaaaagatgcttcaattcaattctgtgcccaatctatgctcaataacaatataagttctctattcgtagctagtggtgaaggccaaatcaaagaaataatgacaaagactgatttagttgaggtatttgcatatcattgttctggtttcttttctgttaaagagcgcatgacaagtaaagtaattacagcagctccagatgataatatcaatttcttatacggtcttatgcagtcacataagatatcaagagtagtgattgttaaagatggatttcctatagggattgttacttcaaaggattttcttccagctagtatattttatgacataaactttgcatcaaacaagtttccatcccaaaattcaagtaatacaaaagacaaaaaatcaatattcaaaatatcagatgtaaagtcgttcttaatgtccagtgatataatgacttctaaacctcttctcatggatgaagatgacgatgtagcagaagctgcaaggataatgataaggcatagaatcagtggactacctgtcatcaatgatacaatgatccttacagggattataactaaaacagatattctaaaatcagtagtaaagatttactaaaaatgattctttacattggagctgatctgctttagaattatcaacgtaattccatgttgatgaacgggattatcagcctaggaactttagatagatgattacataaaaattatcgatcaatatctctgaaggaatactatttgaagaattcacacgtggttttaaagttaacatgataaaagcaaagttcaaaggcatattttcttcatagaaggtttagacaggaaaattttaatcgaaggctaccacaacttcctagacgccgacatggatgtgacattctttagcgaattgaatccgttggaacagacacttatagcgactttttttacatggttagttgccgcaatcggcgcctctaccgtgttttttacaagaagttttagcaagaagtttttccaagctcttcttggatttgcggcaggcataatgctgtcggctagttttttttctctacttcttccgtcaataatacagtcatctcaatctagtgacatgccatattggattcctgtagcaactggatttatactgggggcactggtaatctgtattgcggatctcattctccgacaccttcatcacaaagatataatcaagaatcccaatagttcagacatagattttgagagtaagactgttttgatattggctataaccattcacaatataccagaaggattggcaataggagtagcttacggtgcagcgtcccttggaataccagaagctggattagccgctgctatttcacttacgatagggattagtcttcagaacttccctgaagggctcgcagtctccatgccattacgtgctcagggaatgtccaaaatcaagagcttttggtatgggcagttatcgactacagtagaacctgttgcaggtatattaggagcaatgtttgtgcttgcggctcagccccttttaccctatgcactgagctttgccgctggagccatgatccttgttgtcatagcgaaaataatgccagaatctcaacgtgatggaaaaggcgtactttctgcggtttgttttctaataggattttcactgatgatgatactggatttggcatcatcatagatctgaactgttcaaatcaccgagaaatgatttccgtcaaataatatgtatcagagttttatttaatggaaatttatcattcacttcatactgccatagtcattctctaaatcataatggatattagatggctcatctgaaaatgctaaacagccttaacaatggctacagttttgagatagattctcatggtacttgaaaagatcatatgagaaatggcatgtggactacagcataacccatcattattgccaatgacaatatgtgtcctcggacatctctcgttatgtgctcttccccattccgtacaaacacttgctttctatagttccacactcataatagttgatcacatgttcattgaaaaaagttcaatgcattccttgtggtagtaaggctttaaccaatttaataaattcttgatcgatttaagtctgatttatggtcaattgaatttaataatagacatgtaataagctaaaatctatatttttatattaatccaatatagaatttgttttatcatcgagccgtataactaatcaaattaagaaattatcagacttttagcaagttgattgaattttacttttgaagtaattcatctaccatctttaaaaaaacaatatacaatatacagaaataatttcaatatgtttgaatatgaaattacctctaatattctgaataatatgactaatatactattactagcgaaaaggttatggttaaccatgagccttaggaccaagcgacaataaagtgttcttggatttagattaatttattactattgttgaaaaataattttctttcatctattgctcggattatttcggttttgctgacaacacttccaatatacccatggtgttgcaaacaagaatcttgtcctgattttctttaatcattattgatagtgccttttcagcagcagtatcttcaaattttaacaactttattttactcttttgggggacatgatgttctttacaatggtaatatctctttgaggttctgaaacaattaaacatcttttgaaagttaccatatcaattatctcatagtttaatttagttactggtgaattaatacaggcagaaataaaatagcggttcctattatactcactatccaattgtgtacatgatttaaacccgatgagtactgaggtataaaaccatatggaagagtccacgcaatcaaaaaaaataccaaaacaaaggaatagtgcagtttgattggaatctggttaatttttgatacctgtaatgacatctaaaatgatattatattaaatctcatataatgagtccatcgatctgttaataagatacgatggaaatcgtatttttaatatatgacttctatttatcgatgtctttacaaatgttttaatcttaattcgtaattattaacaattattcctatgaggtttaagacaatatagatgctataaactggactttgatttgtttatctgattttcgtctaaaattaatacttctgttttgatttagtcttactagcataaaattcttttgaatgatagtataattaattataacgatagctacgatgacattgcatcttgcgaatccacaagtatggatgatagaacattgaataatgttgcaaatacttattcgtcccatcatccaaactctgccaatccaaagttgatcttccatctaatgcctgtctactgattacaatgtgaaaagattgtattttaaacgaataatatagattcctctatcaaaaaataaatagaataaaattggattgaatatattttaggagacaaatctcaatccaaattcgtcagctatgttatcttcaaccagattattccccactgaaactacctgagctctgattgtatagttgccatccccaaaatctctttcaacatgataggcacccgtattcggatccgatacatcaggaccatatacgtttgtactgttcatattgctgttagagattaactcgacctgaagatcgcttccgcctataacctggaaattgtaattgaatattgtttggttattggtgttgttttctaccataatattgtagactatcggagtagaccggtcaacggcaacgcttatgggcctaaagttaagcaatgttctgtcattttgtgtcttatttattgtccaatcgactatcgtccaattaaatatgctatcaacgggcaaaagttctgctccagatgtcagtgtaaagtgatgtcccatttcagcggccccgcccacatgaatggttccagacatgtacggatgtaatgtacagtaatagaaataatctcctgggattttaaaggtcatctgataaaaggtgccaaacggcataaaccccgagttaaatatttgtcccgagtcggtagcgtcaggtactccactggttactgtattggacctggcctggatcatcattgaaccatgcaaccgttgtacctgcaggtatagatatctttggagggacataatgtatggattcttcagaagatactgcgccagcaggtatatcaattatgtatgagggtaacactttttgcgttgctggcaaaggcgagagtccaaattgagcaaaggagttgccccaaaaaaaggtactagatactaagatagtaagcaccagagaaaacaaagaaaaagcaagtattttcctatatggaattttactagaaaaaattctattagtactgacagtagcactgtagtttaaatacattttttacaatgcgatacttgtagatagaggcttggcactgctgaatatgaatcgttatttgtccctttttgtaattgttcgactgacatgattaaacaaacgatgtttttagagtatttagataagcgaaaacaacggaggaaaacagttgttgtgaatgcaataatgtaaccagtcattgaaggcaaaaaaactggaagacatgctaaataaatgtgtaccaaaccttagattattgccgtcataaattaactcgaattcgaatggtgttcgctaatccagaccgcccactctaaggtcgcgcccaaaaacaaactctgataccaatatcatattatcagatcggtgaatttggataacgccggtcaacagtaagatacccgttgtgttaaagataaaaggatgctagcaaatttgtaaaacctaaacggacatattccgttatccaccatataagcatccaaagcaccgtttccgatgccacctgggggcaggcggatagaagacaaatcgtctgtgtccaactaggatgacaaatcatcagaaactgtattattaggaaaaggaagattggtaaagaaaatatttgtcataaaatgtagaccaaatattttcttcctatttatgtgtccttcataagccttgattccgatttttcgtttatcttgactcgctatgactaacccaatatggttaggtgactattacaaaatacggtttatgaatattacaaatattgaaaaaatatgaagcgatcatagtatattatcatccaatttcttatcaacatcttaataaccagtctctaaatattataaatctcaaatgacgtattaccgcatatactcctatttgacaatgataaaagatgaaactatctcctttggtcttctttgaggcgtactaaaagctcgttttcagtcacacgtttttatcaagctctaagagggttaaacccatgtcgctatgctctaaaggttaattatttgttagggataggaaaacgctaagaatttacgagctccagatcggtaaaaggataagaaattaaggcccagtgattctaattcgttggtcttttaagacgattttttcacattaaatttaccttcgacaaaaacaggttcatcaattccccagctccatttcctagtaggtcttattcttatatatctagattgaggatgatctgtattggacatgtaacctccttgacgatcaactgtatctgctactccataaatcctgataccccgtggttcccaaggattgatagtctttaaatcgtctataactagagcaactttattatttattaaaacatttttgtattttgtagattccaaaatattcattccacctacataaaaatactcaccatcaaaatcaaaacctacgggaacaacgtctggttggcaacttgcaatatcggattgggaaaacgaacaggaagtggcgattcttgcgagcctttgtgatttaatatactcgatttctttttctgtgagcaaaataatatctgacgttatttaaccagcattacatttaaaattattctgacaaaaacataattattactactatttcttaactgttgttatttatagggtgtatagatttagttagttttttgataagcaatttactgcgggaaccagattctagtgcatttccggccgtaacaaatgaattagaataatattaaatacaaaagtaaatacagagaattaattggacaggttggatttaaccctgttctccatcgattctcatatattttccagattgatttgataataattactattactatcgggccaatacaaatttagattcaataataatttaatctacaatgcatccaaaggacttagaagcggcagaaatgaataatgtaagcaagcccagcaaatgttatggcttgatgcttagatctaaaatgaaattttacatttactgttattgcaaggtttttgctactaagagatgtaaccaaggaattgaactacaattcgtctatttacttcaaagtaggattagtatttgagtattttccaatgatggatacataccgaatattagaaaaaccataaccaaaggtagaatttgtacgagttaatgcatattattaaatcaatcaagtacatatttatttgaattaagggattgtttttcttgttctgattgatatgagctgcaatggaatatgtacaaggttcaaggcaaaaaggaataatgatgttccatccagatataaagaaggccagaaaagatgtagtatctgtgagatatttatcaaatgtgacgaaacttattgtccatgttgtcactataaattgaggacaaggtcatttcgcggttggggaatgcggaagaaatacagggaagaagccgtaaaacgatactaaatattttgacaggttagagtaaacattcatgagaaaactggaaaagaagatataggctcttttttggacgagttaatttaaggcattcaaagcctagctctttgtattttgtggagtacagagcatctccccatttcatatcggatcataaaaatcaggaaatctaaatgtatttgaatcagattttaataaaggaaaatatgatctaaaagatcattgattcggtttatctgacctgtgtttcgctataaactcgattaaaatccttttttgcaataatttatgatgagaatttgagaatcatttgtaagaagaagaaaaatgctcttattacttttaattagtattgaaattcaatcaaatgtaaaatatgacaaatgtgtataaatagaatgtatatgaaccatccaggttattatttacggtgaaattattaaaaaatcaaacatataagcatccatattaatttgataatagtgaaaattttaacgctagtggatggatctgaccattcactaaaagctttagaatatgtcataaatcttcttgaatcagtgactgaggattcgggccagggaaaaagtaaattattaactaaacatgaattgataattttgactatattacaaccattcattttgtcagatgaagttaaaaaaaaatttctgtccgtgggtcaaggaaggaacaaaatattagacaaatatttaaaagacatttattcggcaatagagactgaatgggtcaaaaaactttcatctcttaaatcaaaatttgagaaaacgggtcttgtcataagaacaaaaataattactggaatccactcaagtcgatctattgcttatattattattaaatttgctgaagatgaaggagttgatttaattgttgttggaagtgtaggaacaggaggtatttccgaaaacaagtcacttggaagtgttacaagaaatgtggcagaaatatctactcggcctctgttaatagtaccttaataaataatctctgaattaggtaaatactatttattcgataaaagtattaataaaccagaaatgtgaaatttcatcctttagttggttctctggaataggaaggctagtacttgttatcacggtagaaagcaagtctttattttgaaccaaagctctaaagatatctctatctgttaaaatacctactaatttatcatgctctaatatgataactcgccttatttttctttcatacatcaatttcatagcatctgaaacggttgcgtttgatgagagagtaatcaaaggatggctcatatgttctcttacaggaactaccagctgatgtggttgtaacatgccaattgttctaatgatgtctctttcggtaataatgccaatgggctttctgttttctagatcgtctacaatcactacactgccaatatcattattagacattattctagacacgccgattaaattcatattctgttctgcaactataatatttttattcattaaatttgtgattccgatggaatcgagactcattataattctgttatgattagtgtagataaaataccttcctagtgatttgattatagccatatactattatttggcacgatcgtaatagggttgctagctacaacaagtaacttgataatcctcccccacttttatcttaaagatttttctatgtgaaagataattgatatgaatggatgtacgaataaagtccgctagaattcacgagtataacaaacctttagaattggataatgtttccaaacccgtcataagccgtgacgaagaagtactcgtaaaggtaggagcttcaggattatgccatagtgaccttcatcttattggtggcgaatggaaagatatcattccattaaatctaccaaagacaccgggccacgagatagcaggatggattgaagatgttggtaaatcagtaccggaaaatatgatgaaacctggtgacttggtagcagtttttggtggctggggttgtggttggtgtatccagtgtaagtcaggagatgaacaactttgtgcttttgctaaatggccaggactatcgtcttttgacggaggattttctgaatacatactagttccttcatatagatttttagtgaatgtcaagaattcggaagctaaacctgagaatctcgcaccactgactgatgcaggtttaacaccctacagggcaatcaaaaaagtgaagggcatgcttggacctggaagaaatattggtatactgggaataggtggtttaggatcatatgcagtacaatatgcaaaaatcttgggaggcgggtccaaagtatttgccatggatagatctgatagtaagttagaattagcaagcaaatgcggcgcggatcatttagtcaatctacattctactggtaatttggtcgacagaattagggccgaaacaggaggtaagatgctagacgtaatcattgattgcgtagggacagacaaaacattttacgactctattagtatattgacaaaagaaggatcggtggtaatagtgggcctatttggaacagcagctaaaattccaatagcaatgactgtactaaatgaatttaaaatacttggatccttgtggggcaattataatgaactcagagaggtaatcgaattatttaatgaaggtagaatcaggaataatataaccaagtttaaactggatggtgttaatgaagcaatcaaattattaaaagagggtcagataaatggaagaggagtattaattccctgatggtcgataatccgatgatattactttaactgctagtcaaattacacgttatgtgctctaaagtattagatacaaaagagtaattgttaatctgaacatagatataatgaactaacaattacaatagcttgatgaaaatcctagttcctgttgatggatcagaacaatcaatcaaagctctggaatatgcgatttatttgctcaagcttattgatgcgaaacctaaaccctcaaaagaaggagaatcaagtgaaataataatagtaaatgtactaccacattttcatattcctttgggatttgaaaaacccatgaagtcaatcaagacagggaatacagtttctttatctgaatatattaaagaaatgaatgacatattgaagacagagtggataaacaagttatctgaaattaaaaacaaatatacagattctggtatttcagttcgaactcaattagttgagggcagtcaatcaagtaggacaattgctgatagtattgtaaaattttcaactcaagaacatgcggatcttattgttgtaggaaatgttggcctaggagggatttcaaaaattaaagccttaggcagtgtttcaagaaatttagtagaattatcaaatcgtcctgtattagtagtacattaaataaatttactgcatcggttcttggtcaagattatttttctagcttcttgcatcaataagccatctaattatttttgatagataaacaaataaaatgatgccaacaatacaaataactccatttagcattatttgcggctcaaattgaagtaaaattataactgatagcaccattcctaaaccaggcaatatgggaaactttttgatactaaatggagaagtgaattgtctatctactttgctctttttatagcgtagccttattaaagcgatatttattatgatataaactataagaacacagaatactgtcacaccagcaatcactgacaatatcccttcgaataacacaatgatcatgatggcgataaacatgactatgagaatagaaagccacggagtctttcgtttcgaatgtattttggataatatattgggtaaagtcgactttctatcttttgaaatcccatagatcaatctcgatcctgaaattaacatcattagcacagtatttgaagtagcaaatagagctattaaagaaaggataaatgttcctggggcaccactagctctttcagctgctgttgctaagggagcttccgatagatataggtcacgccaccctaccaatgatatagcggatattgctactaaaatgtagattacaatggtaaccattattgatatcattagagcctttggtatagttttattgggaacttttgtctcatcagcaatatttaccacattttcaaatcccaaaaaagcaaaaaatatcaatcctgctgcagagaaaatcaacccaaatatcaaatttggttgtatgtttggtaatgaattgattggaacctcaaaataatctgtattgtaaatatgtcctgatgcaaacgctgcgattatgatgaataaaagaccaactaattcaacaaatgtaaaaagtacattaagatttatcgattcagaaatgccataaaaattaacgattgatagtattacaatcagaatgattgcaaaaacaatttcaggcacatgaggtatagaaatagccatatatcctgaaaatcccacagcaactgatgcagctgaggatataatgacaaaaataacaatatagcctacggatagcgataaaacctcattttcaaaagcttctcttacgaacagatattctgcagcacttttagaaaagatggatgaaagttctgcatagcttagtccaattattaatgcaagtacgcccgcaataataaaagatatccatacaatatttccagcaattccagctgcttcacctataattgaatatattcctgctcctaaaatcaatcctatcccaaaaacagttgcctgaaataagccaattgttctttttagttcagatggagatcggtcctcgccagccgtcattgtaggtcttgcatttaaaaaagtcttcctaacattaaatgtatgtacttaataaagttcctacgatgtaagatactaatgctgcagtacctcctattatcaacgtgatagtgccagatcttatgggagacttaccgactacttttgctgagataattcctatacaaaagaaagacaaagcagtaaaaactgtagagtaggcaaatatagtttgagatgcaaaatcggttgaattattcaaaacaagtgcaaaaataaatggaagaagggggattaaacctattatataaaatgcaacaaatgtcgtgactgctttgaatatgggattttcattttttttatctattatcccagttttttctctcaacaagatgtctgtccaaacttttcgattggcaattataacatctgtaactttttctagtaattcctctttaaagcccttttctgcatatatgtttcttatttctgatatcttgcgttcaggagtatcctgaatctctttatagtgtctttctctttccttttcttcgtgctctatcctagatcttgttgacaaataatttcctacagccatggcaaatccatctgcaaataggttcgcaaaacctaaaattactacaatggtaggagataaagatgctccaactactcctgcaactactgcaaatgtagtaacagcaccatcggtcgcaccataaacgaaatcttctatagtccacttcaagaataaacatgctcttaattattatatatgaattaacacgatctaatggagcaagcaggtcatttgttcccttttaagtcataagataatatggttcgatcatgcaacacggtgaaaacagatcttaaaaaataaattactagcttttggataagaattgtaaagaattcaattttgcaccaataaataaaaagaacaaggatttaaacaacggcaatttaatttatttcgatgaaaattttaactcttgttgacggatcggagcactctctaaaggcattggattatgctattaatctcctggcttcaaaaaactcggattcgaggaggtataagaataataaaatccaaagtaatcatcacctaataattttgaatatattacaacctcttcaattatcagaagaggttatacaaggcttcaagtccatcaattcagaaaggaaaaattctttacataaatatttgaaagatattaattcagccatgaaagacacctggattaaaaagcttttaaatcttaaatctaaatatgaaaagacaggggttttgataagtacaaaaatagtcaaaggaactcattcaagtcggttcattgcttatagtattgtcaaatttgctgaagatgagaaagtggatatgattacggttggaagtgttggaacaggaggtatctatgagaaaaagtccctaggaagtgtaacaagaaatatagccgagatatctactatacctgtattaatagttccttgataaaccaattgataatctgcaataaaattaatttgtactatagttgttgacctagatacacgggatcaacaaaagagagaaagattaaaagtccaccaaatcatttttgatattcataggagacttttcaaagagccgaatatccatttctttgattttatttgatatttgaggtttgaaattcatccgagataaaacatctttttcaatatcaataccgggagcaatttcttccaagaccaatttactcttatcgagtctgaatactgctctctcagttacataaatgatttcttgtccacatttagctgcttgatatccgctaaaagaaattttgtagacattttcaacaaatttggtaattggaccatcatgtagaattttaattccattttcggtaacatcaatttccttttttcctcctgtgaaagatccagcaaaataaatcttggatactccacccgcaataactggaaaccctcctgttccaaatatacgatcaggtaacatggaaggattcacatttccaaatttgtctatctgtaaaaaacctagagatgcagcatcaattatgcctccttcaaaattagaaaacatatccggaatagtagataacgcaaatgaacccatggccaatccaaagtcatttcctgataaagcgattcctccccatgggccagattcaatgacagatactaaaacatccattatattttcctcagcggtaattgatgatattaatgcaggaattccaattcctaaatttatcaaaaccggtgctttcttttgtcgaataaggttgataaactctaatgttaccctcctggcaataactttttcatacatttctatttgattgggattatctaaatttctgtttgatggagaaactatttcattagaaattcgagggtcgtaagcaatagaaccggtttgccaatgatattcagctggagaaattacaatatgatcaatgagtggaaatggtatatcgacgtcacgaggattaattgttccagactttgttatccaccgtacttggcatactactttaccgtgtgtaggttttgctttggtagcctgtgctatactaagcacagttccacgtattccttcttcttttagagaaatatttcccatttcgtctgcaaatgaagctcgaattaaagcaaaatttggtttcggtgctttatagaagaggtaatcttcattatctatctttattatttcaactttacaagtagaatgaaatttccccaagtcatttaatgctgcatcatctttccgtgggtccaaaaatgtatcaaggccaatctttgttaaaagtcctggtcttccagatgctatctctctaaaccagtatgcagttatcccaataggccatccgtagcattcaattctgttgtcaataacaagcttctgaaaccatggcgaaaatcctaaaaaaggcatcaatgaacctttcaaaaaatcttgattcttatcgttgaatagctgcttggcaacgtaatcaagtgctcttcctggaacagcaggtaaagcatctgatattatgaacagattatttgggtgacccgatctctgatatctatcataaagttgattgattaaatactcaggagtagttgccatattaaaacccgaaattgctaaagtgtcgttatcctgtacataatctaggtacctgaagcatcattaatttttggaaacatgtcgacatgtaaccagtgtcatttatatttcataaatattgccatggaataataacaaatctttggtaaatatctatatattctaaagtgttacttaatatatgtatgtgaattcaagcaagtatgacagtttgataacaataatggttttttcattattttccatattatttgcatctttttctgaatattcttctgaggctttttcattggatgggactactccatccatcgttaaaaatgacagttggataagtgagcgagataatttgaatataactataaaacttgtacctgaggtccctgttatcgatgaaactacaaaaatattatttgaagtgacatatcttaatggctctaaaccttatgaagacttgaatacacgggttaccataacagatcatgatgggagattatataaatttgaaaataaactcatacccgtgattgatggacaattttctgttaattatgtgtttcctgatgatggcgaacatagaataattttacaattatacaacaatatcactccttttactcttagctcatttgatttactcattcctcatcttactacgccatcacaaacagacaggatactaaaaccctttatcgattttttcaattccctattgtaatttctatttctttgaacgtggtctaccttatattctaaagaaggaaagagtattatcttatctcttatttcaaatatataacgatacgatggacccgataaaatgaaaaagtataccctagtcattattgcatttttaatttacctggcttggatatctacgacgtacatactggagggacgagttaatctgttacaaaagaacgatccaataggtcgccttgagtatatagttattgcaaatattgtaattggtattgtaataccattggtagttctcaggtttgcaataatgtctggtatgctatcagctaaacaaattggtttcagatcaatgacaaataccgctttattgactgctattgcaggtatagctggtcttatcctttttttggttcagggccctgcatccttaaatccaatcgcaattataaacgtgtttttgcagacattgcccacctcaatagctgaggtcattgtatgctgggttattgttggaacttcaattgaatcgttggcaaataacagattaggaaagaatattgctttgatgttggctcttgctgtgtcaatcattctatttggagtttatcattttgcgcatagtgagccatttaatcaaccacaaatagttgtttttctaatgttacctggtgtattaaccagcattgtatattttttcggccgaaatctgtatgccgcgatagtgtttcacaactttcaagctttgtttggagtattggctgctgcccctttatttcaaatgttgcaaatacagcctccagtagtactgcttgcttctgtatcaatcctttcattaataataatgaatagatttgtaatacatagaattagatatagttctaatgaatttcaaagtgaaaagtaactttgaaattagtaggaaaagggaagacatttttttatgatcatgtagatagatcatatttctgcagttgacgctctttttgtggtcaatatagtatagtatagttaatcgagaaaaattagcaaagactttcgaaggctgtttgaataatggatggaaaaaatattatcggactagcagtattctcactttatctgaaggatatggacacagaaggactagtaacagcagcaccgaattcaaacagcaaaaataattggactcaaagatttttcctggcttccattattcagggatctattgcagtattgcttacaatcatacttgcttcttttgtaatatctacaccatatgcagaacgactcatttcaaatgttttggaaaattcttcaatagggtacatcaaaatatctgcccttgctggtctcggattatattttttaataggcgtacttgcaacaggagtttctttgttgttttaccattatcttgaattccacgtaataaaaaattatagtaaattggataatgttttggcatggatgcatctgatactaatgaacctaggaatttcttctgctagtttgacaatgatttatgcagggtatataggagacgtagccatttttccaaaagaaattggcggatttgatatgacactgatacaggtttctgagattttgctaaatcagtttattgccccagttggaataatgttattggttgccgccataggtgcaattagtgggggaataggattcatcatcacatttttcaaaaaatagtcctttaattgaatagacatgagcaggacgagaagctgtagtattgttaaattctgaggttaaaacctctctttgttcttcaccctagctagaatgaatacacgatcaatcctgctaaaaacttaagttccttattcgtagtaacgtatttcctaaggattgtcacaaacactcaaattctaaattgtagataatattaaccgattttgttgttcaatcaaaattgaatattagtgtactatagtggttacaaaatcattttatttgatcaaatttttacaaaggttgatccacctatattttttgattctaaaatgactatttcactattacctttccaaacatccacggatggtatacacaataatagctaaatactccttcatcaataaacacggtagaaaaagcatcattatctgccattacaccagaatcaaataatccattgctacctgttgatggatctcctgatgtcactgtgtgaatcatcttatcattattaatccatcgtacctcttgacctttgtgcactttgattgtagagggggagtaaaaattatcgttattaggaaggcctgcgttgagtaggatggacacatttatgatattatttgttggattacgtttcaagatattttctatactaaaggcgttttgatatttttcagtttcattgatatcagattcagttttaaaggacgtatttggattttgaagttctgtttgtagtttatactgactgttaagtaacgaaatcgattgattaagaggtttctggaatgcagatccctccaagtccataggagatatttctatcatacccttgctgccatgttcttgttgcaaaccatgactatggaataagtatgtacccgggtctttccactttgtctcaattatggacgcatcgcctggtcctattagcacagattgagattgtatgggagtatttgcgaacaatccggatggataggctttgaaaattgtaccatgaagatgtagtgaaatgggtaaattgactcctgcatttataatgtagatcctaaccgtatcgttttgatttgctttaataggggaatgtaaatactgatcagcgtagccattaatcaagtaataatctgccagaaatgctaaaggattttttaagttaaattcgctcattaccaacacaacttctctggctggcggaaaagttgttttattttttggatctataattaaagcaccatacatacccattttgatatgttgtgatgttggtactacatgacaataatacagcaaaacacctgcgggattgcctgtaacattgtataagtaggtttgaccaggcatgaccatgggtcctacaccgtcattgggttcattatgataaccatgaaagtgtatagtatgaggaataggcgatttatttacaaattttacagtaatattttcgccttcggtcattcttattgttggaccaggcatagttccattgaatgtccaagctagtactcttttatttggagctatttctaggttgatattttctgcaacaagtgtgtaaatcttgtcaggttgaaatttgctgacattgtcaccgctttcaacagtagaagaattacgaaatccattataaggttcttgagctaaatggttatctaaaatagataaatttccaaaattactggcgtcagcagaagttttgtgatcactaagagagaccttatcgaatagactaataccatgtgattcagtgatcgtagacatgctatttattaatagaatgacaaatccaaataaaaaaagggagcaaacaaaactgggtgaatacgatcttctattttcaaatcggaacatcaagttaatcagattatcattctaataaattattcaatcaattctaaatcaattctaaacacttgattttatactaccaacagtaagtaaacactataacggatacacaagccgttttaaaatgtacattaatatccgttacatacgttttttgttcagttacatttagagtctgtgcttgagcctggttgattgcttgagtgagaattgtactatatgctgatattatggtcactatcaaaactgccatgataccaaacattcctattgtcaatttccaattctttatcttactaggttttttcattttatattgagaagaaataatgttacttttgtttatacttttttatggtgatttactagaaacaaaagatcgactattgcgaaccgtgtagtaaatcgctccaaatccaatgctagtcactatcacttgcgctatttgaccaaagtagggaataggaaccaagtacaaaagattgagtatgacaaatcctatcaaaaaggaagaaatattgttgatatctctcgacgactttcgtcccaataactcgaggatttttttcccgagagcaaatgatatcattaaggatgaaagggttagccccataagaagaactaataagccaaaggccgatactggcagccccaccacagttattgccgagagcactattacaactacaaacaagacaattaatagaaacccaaccactgtattttttataatagattttctaatcactaatcgaacggcatcaaactgattaggtaacatcttgacaagtataatacctaaaataccaaaccctatgacaaataaaataccaaatagacttaacaaaccctctatatcgggtatcatcgaatcttgactcactatttccaaatctccgattatgccattgttttggaaattgtcagtcatagctaccagttgtcctaatatttcaccctcgttgttgacagttccacctgcagcatatgcatccttaattatcacggaagttgagtcaaaatgtatgtcgttagctgctaatatcgcatttgttgattttccacctaaatctatcatatttccagcagcgacaatttttcctgacacatcggtatttatcgttacttgtcctccagccgcaaataggtcaccatctattggtgcatttacataaataatattagcaaaaactatcgctccgctaacaggggcgtcaatagatactgtttctccaaagattaccacatcatcttgaatgggttcttgtattgaaatctgattgcccgaaatgacttgcaaagcaaatgaggagctatctgacataactagcgataacaaaactagagctgtcatgcaggagataaagatatattttattctagtgagtaggacaattttgtcagaaacccaataccaagttaaatctaaattcataggacaaacatatttcatctattaccattctactatccttttattaatattttaatttaagtaaaaatcgactcaacctgcactaatctatatttgagaatatttacatatacattaacaaacaaaaaagctcaagtcaaataagatagagaataaagtatttgaacagcactacactttggacagtcaataaaaatttcaatcaaataattatgtaagggaaagaaatgtctctattatatcatctacaatatcaggatattgttgcatcactccatgacctccaccttgtatctgaatcaaccatgcacctggtattttttctgctatttttaatgaattaatcggtggagatgtaatatcttcagttccggttataactaacacaggtttgtctatatcctgtatgctaccacaggtacctttccattttcctactgcttcgccatacctcaaaagattttcttgggagacctgaggaagtaaaaatgttttgtttaaagaatcactattttctcttatccaattatcgggaaacagagcatgcaagaacaaagtggtatttgccgttcctgtttgcatctgctttagatcatttggtgttagttgtggaggtaaagattcttctcctccacaagatgaggcaaccaaaacaagatgttttatcttatcaggatatgataaggcaagttcttgtgcaatcattccaccaagagaaaggcccattacatctattggtttttctatctctaatgcatctattaatccaactgtatcattaacaaactgttccattgaaaaacttttgttaccagtagttgtttctccaattcccctattgtcaaatataatgacagtatgattctctgccaagtcatttagtattggtccccacatttccatagtcattgaaaaacctgggatcaataagatgggatctccttttccaaatattttgtatgcaatatcagtatctcctactattaccttttgagagggcatgttatctattgtttcagtatctgtttgttgaaaagtagataataaagtattgttttggatttgactattgttgctttgatcagtaacttcagaattgctattattatttatattgttgatggtctcagtaatcgtttgctggacttcactgttgattgccgattgcaattcatcctggctttgttgaatggattgatctagagaagttgttgcataaaccaggttagttcctaggctagacataagtaaactgctgacaaaacttgatgcaataatactaacagctaatacagaagaaatgaatcgagatattttcatacaatgtttactttagccttgctaataagatttagaaattcaacacgattcctaatcttgtttcaaatccttgacggaacatacaacataaactttgatttattacatacatcaaaataaataatattatgatatatcttgaactagttgaaaatgagttcctgtcgcctcaagaaagcaaacaaatcaagatagatacggtagctggtaatacctatgccacaatatttgtatctaccttattcccaaaagaacagataaaaaattcctgattttgtccatgaatctcccttttttagtattacagtttttacttaagatggaacatgttaactcaattgactcggcctccaaaaatttagaagacaataacgtagaggaacctttcatgattcttacatttgcattgtgtcaaatactctccattaaatgctgctccctacatagcatatcttacaaaatcatatgtcttatatcctttgtatattaataaaagatgcatcattaggcttgatgtaattgatattgatttgcatcaggtggcggcattggtactggggttaaagatttaaacattaatgaatttttttattgttatctttattagtagctagttagtaatttactttcactaaacatcctggcgctcgttctgagttgtcttaaaagattattgtaactgaattatccgtagtaatcgactgacattttatccccattgtatccttaatgacagtttctaaatacgttttcaaaaatattgatccccttttacccaattcatgtcggatactaaatttgtttactttagtttccgtaacttggtaatcgtattgaccatatccacaatgatcaaagaacattttaataaaactaatcacattaaagtggttgatttctttccatttaaaaagaataaactccttcggtgcttttgtagcaatatctattgcaagagtatttattttgtcaatatctaagctctccaaaagcaatttaaacgcctctcggcttagaattatagtcccgaacctttttacatatctattccagtccacgtattctccaaatatttgattaacaagcgtattcatactgatctttttttcttctgcctctgctcttaatagctcatcatactctttgtgtattctaaaagatactgtagaagttttttttcctttctggtagtacatttagtattaatccattttactacgagtatacttgcagataagtacaatgtaaacgtcttatagaaatattattttcactgtttttcatgtatgtatatgaacaaaaataaaccgttagaaaatagcactctctctatcacttctgatgaattaaagtcaaaacttgatagtagagttccactactgctattcgacataagagacttaaaaaactttgagaagcgtcatattcccggctcttcatgtgcagtttgtaatgaggaaactaaaagaactattatgcctcgattaccaaaagatatggagatcgttttagtcggagaacaaaaaccagctgattcagatgaaaactacccaaaacaaatggcagaaatgatgagacaaataggactaaatgcaagatatttagaaggcggtatttcatcatggaaatggcagtttaatgaatctattgatggggatatatctccaaaggacttgaagaaattaattgattcagaaaaggacaaagaaaatctgttccttctggatgtgagagaacctgatgaatttaatcaatggaatatagatgatagtcagaatattcctctaggtaaattggctaatccagaatccctggctattatcccaaaagacaaaaaaatagttacaatttgtccgcatggaaataggtctacaattgggaaatatattcttgagagatacggttacaacgtaagttcattagaaggaggattaaaggcatggagcttttcatttgaaatcgcatcaactgaatacaaaattgacaattcgtccaagataaggttgtttcagtttagaaggattggtaaaggctgtatatcatatctattggattcagagggtcaatcagtgataatcgaccctgtgtatcccattaatgaatatttagataaagcttctgaagtcggaacaaagattatcaaaataatcgatactcatcagcatgcagatcatgtctctgctgcaaaatcactagcaaaggaaactggcgcacaatatcttcagagtggctatgaaagctattctaaggaagcaattagcactaaccaaataaaagatggcgatatcatatcagtaggcaaaatcaaactaaaagcaatccacactccaggacataccttgggaagcatttcattttcgattgaaggtaacgtcaatagcgtagacgcctatgacaaatttacagggttactatttactggtgataccttatttgtaaatggagtcggaaggccagatttaagagataaatctatagaattctcagagaatttgtatgatactttacaacaaaagattatgatcctaccaagttataccgtgatactaccctctcattttgacaaagatgtcaagacaaacgaactactatcttctacattaggtgaactaaaagaaaagggtatatttttgaatcaacaattaacaagagaacaattcatacaaaacctgtctgctaaagtgatggcaactccccctaattatttgaaaatcctatctattaacaagggtgagaaattacatccatcatcatcggaaatctttgaattggaaataggtccaaacagatgtagtatttcatcctcgtagaataaattaattctagaggatcaaattctttttttctactcttgcaagtaaggaatagactagtagatgatagctgaggcatatttctggcccatatattttttatatttcattcttgaaatgatttgcttaggatttgaaaatctattgctacaaaaccctttggaagtaatttctttattacaattaatttcggctgatcttattcagtactcttttcttatatctcttataactgccattggaatattgattggactttctcttggattgattggtggagggggatctatactggcagtaccattattagtctatgttatagggctagaacctcatatggcaataggaacttctgctcttgtggttggtatcaatgccttaattagctttattgatcataaaaaaaagggtcatgtattattaaataaaagtttactatttgctattcctggagtagtaggaaccctagttggatcttatttgggtttactaacgcctgcaagtagcctgttaattttgtttgcagtatttatgatatctatagcgctcaagttactaatacaaatgaaacacaagaaaaataacaaagaaattatttatgatcacttacaagaaacaacaaaagacaacaaggcagaccaaaaaacaaagggtccacctactactgaaactaatttcggtactaataaaaggtacaagcatctaaaagtggcaattatggggactctggtagggttagcggcaggatattttggaatcgggggaggctttttgattgttccatctctaatgtatctgaatataaatattgtaaattcaattggaacatctctgttacctgtaagcttttttggactcactactgctgctagttattcgctttcaggtcagatcaatttcttgatagccatactgttaatttgtggaggtattgttggtggaaaagttggaacgatactatcatcaaaagcttcaaaaacactattaacaaagatcttttcagtattgttaattactgttgctatatacataataataaaaacaattgtcggatgatgttcaacctgctccatagtgttaattacccacgactaataattattcatcatcctttggatgatagtgataaggaaaatggaataagaagaaggcaaaataacagtggaatcgacatatataaagtatggaaattgaatatctaaaagaggcttaatgcaaaaacggtaaaatgaagacactgtcttcattattgcgagtccattcagaagaacttgaacttttatgagtaccatgattgaaaaagaatctttatcgtgacaaattatcaaggtgacaaatttgctaaaacctatggataaagataatagagcctggacaaggatataatatttataaatagtgatgggtagttatggattaacatgatctgctttgcaaatcactatgaaaagatgcgcccggatttgctaatttttgaatacaccgatatacctattccagtcaattaacatctgcatgcattttgctgttaattagtaataaatagcacttttttttaattctatgaatattttctgatagataggcatatcaaagaaagtactcttcaaatgttaattcctagataaattaagaaattgccaatgaagtatttaagaaataatgattgatttaatttttctaaattactattatgttcttgtccttggatggttgtttctggcaaaaatcttatatatcttgacttttaccttgaagtaagatgtacaattttaaagacaacgaacaagcaaggaagggttcaattattctaaccatttttgctgttattctatccgtagttctgattgcgcccttagttgaaagttcatactctgtccaacatgaacaaaagatgatgcaaaacagaacacatcaaatgctacagaatcagacagataacccacttaagctacaggagcaaaagatgatgcaaaacagaacacatcaaatgtcacctcaataaccgataaaatattcatttttttactacttcatttctcgatttacttagtgttggatcaattgatccaatcattaaaccacttttccatctcaataccgttcttgcgtatatcaaacatgattacttttaaaagcagatgctgtctacctaatattgtgtcattatgttggttatccgtaacaactttagttaattcatatcatatttatatgcaaatgtctatgataatataactaaattcaaatctcttacatgattgtatgtcttccctcctctttcataattgaggtcattgcataactactttttttatgttgttatctaaattgttgggaacttttatctatatcaattaaaagacatccattttatttacgagaataatccagtgtaaaaaaacagagttgcaattatcttgatcacatgtacaacggtaaaacattagctattttgatacctctatcttgttgattcatgggaacactgcaaaaattcataacatgattaagatctaactgtcgatgtaaactctttactcatcataggagcaactgacttttctgtgataagaattgttctaattcttattcagtaattttactaatcgcattgatgctatagttaacgggtcccatacaggagatattggaggaacgtaacaagcatcaaagcttgccaaatcatctaccgttgccttcattaatagagcaaaggatattaaatcgattcttcctttcaccgattctcctccaacaatttgagcacctagaatcatccgggttattttgtctgaaataagttttatccaaataggcttattatcaggatagtagcctgctcttgtgatgtcttctattttggtatcaattggatcaaagccattaattttggcctcttccctgtttaaacctgttttggctattaatagcccgaaagcctttgttatcgagcttcctgcaatacctctaaattgagtattaccgcatgtaactgcattctctcctgctattttcccttgcttatttgcagtcgtacctaaaggtaaataatcgtcattatttgttatgtaatttctcgcagtcgcacaatcacccgccgcaaagatatttgaaatattggttctcattgtattatctacctttatggcattgtaagccccaagttttattcctgcttcataggctatttctgagtttggcattatccccactccaatcaatatacaatctgcaaggacctctcttttattggtccttatgcctttagcatatagcatatctttgcttgtggtggttgtggaattattattagaaaaaacaatttcctcgacattttcctgcaagagaagatttactccatttttcacgagttcttcttccactaattctgccatatcgtcatctatcatacctgacaatacatgagttgatctttgaatcacaatgacagaaacacctctttttttcaatgcttcagccatttcaataccaatcagaccagcccctattattatcgtggattttacatttttcatgaaatcttgaattcggtttgcatcttcaaaatttctaagagtaaacagattatgaaaatatctaatgtttttatcatcaataccttttatgttaggaacaatcgatcttgctccagtagatattattaacgaatcataatcaaatacccgttcatttccttcctctaagtctatcgcatgtacttgtttattgataggatcaatccatgtggcctcagtattggtaattatttcaatgttatacctgtctttgaagacatctactgagcgtgctataagtttgtctaaattatcaacaactccttctatcacatagggaaaaccacatgaaccataagaaaccagaggctcgttctgaattattttaatatccgcagaaggatcaattcttcttgcctttgaagcggcgcttgttcctgccgcaactcctccaatgatcagtattcttttattagaatctattttgtttttgttattatattcatacatggatggattggaatatcctaattgagcttaaaagtgtcatcatattctggaaagttttttgattggatgattctaaaatagataaagaatttttttaatcgtttatcttttagcaaggatagcaattcttattgatgtccacttcgaatcatcactaatagtcattcaaataatagaagctaattgtgttatcaagtctgagtaaaaactgaaaaattaaattctaaatggaaaaagatggaaatcctatcaaatatgattagacaataattcaaaaaaggttcgaaaaatccttttatagattaaggatcactcatgatctaataacatgattctagacaaaaaatatacgagtttttacttattgcatagtctttttcttgacaatgaccctactaacaaactattattatttaagcggcgcatatgctcaaattggtttaacacctgtgcctacacctcaagaagtaatacctacttatgtaattgacatacccgcaggcgctgcatccaatgacttggatgttaactattatccagaagaagttgcaattccatcaggaaccaccgtcgcatggttcaatgatgatccaggacagattcatacagttactagtggaccacctaattcatccaatgcaggacaagaatttaattctggtatattgccatttggctcttcatttcaacttacatttactggtcctggagactatacatattttgataaattagacacatcaaacaatgctactattcatgtcagtgattcatttgaaaacggtaacttttataaattaagttctggagctgatatcatccaaagtgagagtggcgcaatgtggaccttagataaaaaccagtttgatagagtgttactaaatgtccaaccgcttgatatgcaaataaatgaaattgcacctgtaacctataatgttaagttattcaacaacgcaagtgaaattctagtcgaccataactttttaaccctaggaagcgatttacaaatcgaattaatttcggatgataacatcaataagactacaatatatggtccggactttacagaccctataactggagcataccatattgcagacaattttggtgatggtgattaccgattacaagcgcaaatgctttccataggtcaagactcggtaaaagataagcaaatgatagacgagttcgaaggtaaaataatatcaccttaacaatcactttgtttttcttgccttcatggatttatactcagaagaagttggagtaattgaccatatgaaataatgatccttctaatactggattatacctgcaaagatctttgacttcttaaacagttttgatttggatagaaattgaattttgattgatcgagttatttaattatagggcggtgccttttagtacctatgtcaaaatcttctattattttaatagcaaatcttgcagcaatccttagcatttttgttttatcgggtgatactactaccaacgtcactgctcaaaatacctccaacgtcacttctactgtcacagataaaattcaagtttccattgtacctggcggatctttactaaccgatgacgcttatagtccaaatccctttgagattacagtaggtcaaacggttgtttggacaaatgatgatactgcttttcatactgtaacatctggaactgttggtgcagcagatgccggacagatatttgattctggattggcaggaccaaacgccctaattagcaagggaaagatttttgaacataggtttgatactgctggagaatacccatactattgtaccttacatcctgcaatggttggaacagtaatagtgaggtaacgcaaatcccatacttttttgattaatattcttatagcctcgagcataattgcaatattttcagaaattaagaaatataagcatgttacaatgaattatctactttaaattaatgaacatcggaatgaatccaattgtccaaattaataaacaaacaaagtcctattagttaaactatgttatcatctattattcgatctaatattaaattcatggccatagaatagagaaaggcaataatctttaatataccatcatagtaataggttcatgttaaacaaaaaagtacttatagttctttttggattactttttctgagttttgcaatatattttggcttgtcagcaaataccgtatttgcacatcatataattgatgaaatctcggtgtctagacccatgggaatgacaatagatgaagggttattgtatgtttcaaattttggtaaatctggtgtatccataattaatacaactaacgatgaaatagcaagtgtaattaattcatcatctaaaggaggcatcatagatgccgtttcaactccagataagatttaccttgcacccttcaaaagtggaacgatagaagtatatgataaaaagacagaaaatgtatctaatataattaaactacctggaggaaattactctacgccaactcctcttgctgataagagtactaaccgctgcggaatttgtaagaggagtttgggcgatggactataatcctcaaaacaaggttttatatgctgcatatgcagatgcaaatcaaatactggcgattaatacaacaaatgacgaaattattgcagaaattcccgttgcaaatcatcccatggctttgaaagtcgatcctcttacaagtactcttatagttggtagtcttacgggaaataaacttactttcatatctacgctaactaatcaagtattagatgaaattgaaactggggttggtccatggcatattgctatagatagtttatatcacaaggcgtatgttgccaataggggaagctattttgtatcagtagttgataccataggacatcaattaatcgataaaataccaatctcttctccaagtcaagcagttgcaattgatgaaaaagaccatgttgtatatgttactcatggaagcagtcaaaacgtcgataagataaatggacaaaccaatgaatatatatcgacaattgacctaaatatgataccacaggatatagtcgttgactctgaaacacaaaaactatatatttctactaaatccagtgataagctatttgttataggacccgaatctgtttcatcttcaattgctgtaatatcttttattcaaccatacctagccttgggattcatacagattcatggtcaagatatttatccaaattctttattctcactttcaggtaacactttgggtttaagtgtcaacgcacctgatggcggtaatatagcatttgatgtaccgagatcactactggattcaaaagatggtacaaaggatattccttttaagatattactagacggaaagcaatcagaatatagtgaaaatgtagaggttgttacaactggcaatacttcagatacttttagaagcttagacttctatgtgcccgaaagtacaaagacaatatccattgttggcaccaaaagcattctataaactttctctttttttatattggtgttacaaaaccaaaaattgttaattgaatggaaataatatgtatctagggtagtagattgttttttgcttcgattccttattttgattgttgaaaaaaagattttctttcatccattgcttcgattatgtctgttttactgacaaccccttctactatatcaatgtcgttgcacacaaaaatcttgtcctgattttctttaatcatgacagacagtgccttttcagcagtatcatttacatttaacaactttatttcactcttgggggacatgatatttcttacaatggtggtatctctttctatttcgggaacatttaaacatcttttaagagtgactattccaacaatctcgtagtttaattttgttactggaaatgaactcttcatataaatattaaagtagttcctcaagatggtatttactgttatatcttgtgggaccgaaataatattagttttcattagctcttctaatcttaccttggataatatcttcattatatcatactgatacaaatatgattgagctccgttctgcaaaaaccaaccgatcaaaataatccaaagtccactaacaaatgatccagaaagtattgttaatattccaaaaccaaagaatacgtatgacataattacaccaattcttactgcaattcgtgtagatttgtcgtaattcttgtttctgctaaatagcagtgatcttaatattcttccaccatccattggaaaagctggaactaagttgaaaattcctagaattagatttagaatagacgaatagaaaagtattccatttgtcatagttaatactgttttagaaaaatcatcaaatgacgttgtagttaatatggatgtaatccaccaaaatatcgcaaatatagccgaaagtactaggcttactgcgggccctgctattgccattttaaactcctttttaaactctttaggctcttcttcaatatctgaaacccctccaaaaataaacaacattatttgtctaacccttattccataagattttgctactatagagtgtgataattcgtgaattagtaccgataagaataaaatgatagtccctgttaaactcattatccaataatttatctgattcattccaggtgtatattgaggcatgaagctatatgcaagcgtccatgcaattaaaaaaaatactaaaataagagaaaagtgcaatcttattggaatctgtttaattgtcgcaacctgtaaagacatatagatgatatttgtgtgaatctaatataatatgctataaactcattgacctgctattataggatatatctctacaaggcccattttttttctttgttctagtcatcggatatgtttggatccgaattcgaaggaattatcaaacagactttatggcattgctgctatattggaacttttgattgtagcgtattttttgatatatttttagcattactcagaaataagttttcaattccaaaaagtattctcttcattttgttccaaacagtttttttatatttgcataatttaccattcatgtggatagactggttgtcttattgttctatatttgtgttcaagttatatatttttaagaatggatattctttcaaattgagattattgtattactgagtgctatatcacacagataacaatgtatacgtatgtgagctaaaaattgttaattattctggattggacatggattttattaccgtcagagatggaaatcgcgataaatttacttaatgttcttttgcgttactattctagaaattatagttaatattttgattaaggatttaaactagaatctcaaataaaagttattgaaagaagatctgattccacttttaaatttgaggtcggattagtctttatccaattctaatatttacataattgaaaccgattggtaatggcgttagtgaataccgtgatggtgtaattatatttcgagtcggcaggagcaaatttacaaatacctatcttgtattgcaatgtaagtatttgctatgcgatcaacaacacagataaatacaactcgttttaataaataaataatattgttgacacgatatataaaatctaagagtataataattttctttgcactgacattacttttgatttcatctgtatcaggtgcactacgaactgggtgatagttgaatccaatgctcaaacgggaagcatggctacacttcaaaaaactcctacaacatatgcggtgagtataatccctggtgctgctcagaaatatagtccataccattattatcctccatcaattaatgtacctgttggaacaactataggctggtttaacaacgactttggacaaccctgtactgtaacaagcggtgtcactaacgcatctgatgctggttcgattttcaactccggagtgttaccggctaccaccaatgcattttttcagtatacatttgataaccctggagactatgtttatcactgtattatccgtccatggagacaagcaatagtatcggtaagtgattcatatgaacggggtcactattttgagatgtcttcaggtgtaggtcaagttttcaaccttacaaaggattttagaacattgcttgattttcaaccgcttacgataccattagacagcgcgaccccattagtctataatattacaatgataaaaaattcaaatgacacagttttctccaacacatttgtgactgatggtgaatctctacctttagaattgataaaaagcaatgcagatgaaacaaccacctatggtccggacttcagtagcacaggggcttaccacatggatgctccttttctttcaggcaatgctgaatatattattgcagtagaactttcctccataaattctcaagtgcctgaattcatgataaaggatgagttttcgttcaaaacggttacatgacaatgaaaccattaaacctttttttaaatctaactgttcctggtatttgcttttaagaattgttttattattctaatgcataacaatgaataataacgtcatacttggactataatgatgataaaaagtacttcaaatcagaaaccctctagtaccggaacaactaatacagctattcgtattccctctgatatatacgacaaaatttctattcaagcaattcaagaagataaaacgatttcaagtataataaatcatgtgctaagaaaatatgttacgtgggatcagtttgtaagtgaaattggatttgtttttttgcaaaaaccatttgtacgaacaatttttgaacatgtttctaacgaagatatagtcaaagccgctaaaaccacttgctatactggaatgagagatgcaattgcatttattcatggtaagaatgacatcgatgctattatagatgtaataaaactttggctttctgcttctaaatttacaaacacgataatcaaatctgaaaatacagttgaggtaaggatacagcacaatttaggtgaaaaatgttcgttgtacatgggtaccttaataacaatgctgtttgcagatttgaacatgaaacctgaaaaatctatgttaaaagatcattctttgatattaaatttaaaaaatcttcagtcaaaaaaataagtctgtatcatattaatacacatattcttttattattctgattaaaataaacatagattattaatacatgccaaatttctattaatatagcgcgtgttatgagttttcttcaataatgtactcgttatacaatgtaatacaatgcttaactttataagcattctgaagaatttatgaatatgtcgacaaaattacacgttgataaaaaaaacaaagaaacaatttcaagaagaatggatacaatttttgagaactttagagatgaaatagaaagtaacattacatggccttataattttgaccttaaccttcccggaatttctgaagaaaaatcaatcagaaaagcattatgtgatctgatcgacaagggagacaaataccaaatccaattagaactaccgggaattaataaaaagaatatcgatattaaggctgctaaaaattcaatcgaagtaagcgcaaagcaatctgaaaagatggagcaaaaagacaataactacatttacaatgaaagatcttttagatcggtatatcgcactatttcattaccagaggaagttgttcaatcaaaaatcactgcaaaacttaataacggaatcttagagattgacttaccaaagaaagttcctacagttgtttcaaatgaggcaacgaaaatagagatagaataagagttttgtgaatattatgggtctataaagcaatatgccatcatcaaaaagaaatgaagtattttatcccgtatcattacttacttagcggatttacaaaggagtagataaaaatacatcttacaaaatacaaaataaagagagatcttagatgtgatattgttgaacctctacttatgatatgtgctactggggctactttaagccaaattgaaccttttttagaaaaaaaaatatccagattcctattaaaatattatttgttttatctgattgagttaggtggtatatcatacggcaaaataaaaaataaatatattacagagcataaggggtttgaattaatgaaccagataaatcaagaatgtatcggtaagaatacaagattggagaaggttttgattacctttgaaattgtagcaaagggtggtttgaataagtatcgctgagtcaatatatgtcgaactaaacaaattatcagcaattaattattttgatcggctttgcaaagttaagctctaagttacagatcagagacaatgaaagatgtatttgatctatagcaagttatgattgactcaaaaacatatcacgtattatcagatagagaaaagccaaactggcattatcataaagaggaattttcaccagatagagcaaaccccaaattcccattgttaaatgaccaacaacaaaagcagtggctaacaaaattatctgaatcttatggaaaagtcatactcaattggaatccaatggactcactacctgtatttcctccacaaatagaacaggttcagcatcctttcatggtgaatcagtcagtaaacaaccaaacagaaaaacatgtagatagctttaaccaaactctaaattactaattatttttaaaaaacacttgatttgcttaatcaattagtctttttttttaatttactgcatcacttaccgtatttaatttcctgttaccttaacaatattatattttatgagtaaccatgagacatattgtcatgtaacaaagggattattattttggcatacatcatttaatagttgtagggatataatatttgagatgtcacatataataaacagtattgaccttgacaaaatccgaaaaacaacagaaagtgggcaaaaagatagacagtttttgaagaagtcagtcaaattggaaggagaatggaattttgatattcaaaaaggatatcaattcaaaacagaattagcatatgagaagggcaaggaagtaattgaaatagattcaccttcattcttgggaggtagtggtaacagactaggccctatgggctattgtgtagcaggaataacgtcttgttttataaccacattcgtaagtattctatcaagtcatggaatcaaacttaataaactacgaataaatgcagaatgtaacattaattttgccaaaacatttgatatctctgatgaacctattacagaagggataaatttcgaaattgatgcacacatggaagaaaaaaatacaatggataagcaaaaacttcaacaactcattgctatggctgaggagagatgtcccgctatttacagtatgagtcatataatcaaagtaagtgcaaaattaaaatagcaaagttacagaaatccagaattaattttaggcaataaaaatcgtagataactggaaatttctttcttaaaa

(The sequence listing continues in the following parts.)